United States Patent Application Publication US 2006/0040262 A1 - sequence listing, part 4

SEQ ID NO: 305 - DNA, 358847 bp, Mus musculus
  misc_feature (1)...(358847): n = A,T,C or G
tccctctaccttctctgtttctttctttctttgttgctttctctctttgtttcattgtttctttgtttgtttgtttctttctttctctcttttttctctttcttttattttgttaaagatataatgtttatacaattttatgagatacattatagtacataattgagattattatgagataatttagtacatgtatagaatgtgtaataagtatgacaagtattctcatctcctgcttaattatttttatttattgggaacttcatattctactcctgattttaaaatcgatcatagattattgtaactgataggtactctactatgctgaggacccagaaggaatttctctattctgtgtttcagagtatgttatgagatttcattctgtctccattcccctctgaactgcatagtgtctagtgaccactatctcgcctgctctttgagactagtatatttgtctctgcacatgagtgagaacacataggattttgtttttctttgtctggcttatttcaatgaacaccgtgacctccagttccacccatgtgtgtgcaagtgacagaatgccattcttttaaatggctgaataacatctcactgtttacatatgccactcgaactttctctacttgtttaatgaacgtcatctgcgttgtttccatatttcagtgattgtgagttgggtttaaataaacagggacataggtctgtgtttgatgtgtttcatctcttttttgatgttatactcagtagtgcatctcctagattccacaacagttttaatttcaatcttagaggagttgctactgctttccatgtggctatattgatgacatcatcccagtagtctataggagttcttcgttctctatattcctgccaaattgtgttagcttttgccattctcttggagtaaggtagtatcccagggtcttgacttacatttccctgatgcttggttagatcaatcatttattggccatttatatgcctctttttgagaagtgtttactttgtccttagtagactggccttatttttccttcttaagaaaaatagttgggtttctcttttttaaaatttccatgttaagaaatccaaagattgggagaaagctcattcagtaaacttgccacagaagcatgaacgcctgtgtccagacccctcacacacacacacacacaattcatcaagtgctgccaactttggacgcactcctgagcttcaaagtcgattgtctttccttggggcttcagagtagaggcagccaggtaaaagtactaatgctgtgttcacagggctggttgatccgtcagccaccaggctccattcccagtccttctgattacttaggaaaccccatggagttagggggttcctcttaggagctgggacaaagaccagacctcatttgggtactattaactcctccaggcaccgccccttgtctatctgcagagatgcctcggttcaccagttccaaaatacttgaaagaaaaggcatgtttcttctgtgctccctgaattactggcttagtatttagcttttgtaagttataaaagccatgtattgcttctttatgtaatttgtagctttcaaaacattgtttttccctctgatttttgatgtttccttaccagaaatgccttttgggggggggggtagtgattgtaggcatttaggagagagcaaaattaggtagctgtattcagtgggctgtctacctagataattccttagcaacctctatagaaacttgttagtatctgaggatgtacacagagtcaccaaacactgcattaatacaggtgactaaggaattttggaattcaggatgttcaaagattactctgctgtcgtggttcatcttccttctcactttgcataatgatgaaggatatgaatagagagactcatcacttgtcaggaggtaagaacatggagacagagagaatcttttaacctcggtgcttccatcttgacaatgtttgatttaatatgtattactgtgaaatgaatttgaaagaaattttagaacaagaaaaaagtcaaatgattatatgaaatggtatttaaaagttttccacttcaaatctgtgatatgattgtgagccagcgctaatggagaactaaaaatggagacctctttttatatttaatggagcaggtaggacagaacgcaaagtccccttaatcactctgatataaagtcggtctcctccctctctccgtccctctctgcctccctccttcctccactctttcttgctgtactacaggcagttttaaggttatattctgcattgattaagatttgcctagaaaaaggagtcttaattctctgaatttttatttttcatttccctttcttgatatataagcttccacgtgtcgcttattgtctcatttctccactttctctttttaagccatcttttcagattctgcagccccgtgagattcattccaagcctcatgtatagagtgttcaaagctatcggaatgtggctgtggtttctcctgtgcccctactcctgggccacactgaattctcagttctctcaacagttacctgctgacttttcctacttcatggtgtaggagtgtttttgttaacccacttcccctgcctagaatcccatcaacgtcctctcaaatatcacctttcccagcaaatggtgctttttatgtttctgtcaaaggatgaatgccattcttttagtttgcatgtgtgtatttgcctacttcttgcctatgtagtatgtagaagtgctggggtaggagagacagagattgtccctatacaattgtaattcctgaggctaaacgcagtgcatcatataaacataagatgttttacacatagttgcttctcagaagcgtcagctgatttgcaatgaatcttaattcactttattcacattaatagctgtggctaagtaacaatactggtactttactttgtatatttcagacaaggtttgtatgtagtcctgttggcagccctggctggaccagagctctgcctgtcactatgtctatcttaagatgagtgttttacaaatccagtctttctcaagacatttttctcaaataagagaaaagtggctgcctactacttaaaggtgactttgtcagcttggggtgggagcaaaagtgatgagcatccatctcgtcgtgacccacatacacactgatgatggggcgggctttgtggccgactgcctcacatagccaagtgaatctcggtgacaaggacttatttctgtcctggaagaaagaaaacacgagactagcctagccaggttggctatctgttcttcagaaaatctgggagaaggggccgagggagaatcgtgatttatgaagcacagtattgcgatggaagatgccatcgcaacactgatgcgtggctgaggggaaaagcataatttccacacaggctatctgagtgaggggcgggtgtaatcagccatgtgtctgtgggaggacattaaaacacagaaaggggccgttagctccagggcgagcctttaaactgtgtcggtctgtcccagcctgcttgtcaacatgtccccttcccaggtgcgcttgatgttctctttacctaagatgacccatgacagaacagtgtcactcccaggagtcccagaaaacatagggtcggtgggtgagaaggcacaggaagaggcgcaggtcgtggctctggagatttcgcttggagcctcagccactgtctcttccatccctcagttcaatgtatactaccaagtcgccagcagcaattagacttaaaattgttcatttcctatctgtggaccctgtaagatccagggaggcaggaaggcatcctgatgcaaagccagatgagttagaacctcatccctctaggtaggtggggcgtttaattaagcagattactaacattcgtcttgtgctttctttgcagagaccattctactatcctagactcaggtataaggtgtacttcttgagtttgtttgttttccttaatgcaatcaaattatgagacaaaaattgaaatagtctagaagatgcgtttttcctttctaaatgtcgatatgaatgggctctgtgacaagtggttatcagaatagaagagaaggaaatgaaagggaaggagaaaaaaaggaccgtttgttaggtcagaattgatgggatcacgcctaacacaatcgcctctacctctgttttgtaagatgcgacatgtagcacgcagacgtgttaatgtgactaaattagccccgtggagcaagcagggagtggaaggctgcgttcaagcttacggtgggttcatgcaatcacgagactgattctcacatcatggaatacagacatgagaggaacagtttcttgaggaaagagggaacacacaagcccatttagtcagacagctttgacagctagcacaccgtgacccttactctatctggcctcagacatgcttggtttgtggggagtaccgtcctggttctgagcggtggctgactgtcttctgtccacagagcacttgtttccttaggcgtccgtgttttggcaactatctcctttgcccagttcacactcggcactgcctgtttacaaaagccctgcctgtgactgcagcctgtgacatatacaatggcttccaaatagggactgggtagcagccctcacttgggagttaggtcaccgagcacctaagctgctgcacagccctgccagcttggagcagctgacactggcctttatcttgtttggctacaagcggaaagccagggtggggagcggaggaggaggagccagaggcttaatcctgaagggaccttaggaaccaagcaagcatttacagtgagtacagttggtaggttcccacttttctgcttcttatttaagagagggaaattacaggagaaaggagatgggcaatctgagggctggacagctcgggtctttgcgttttgattttccctaagaaggccgccctcatctaaacatatgcaaatgcatcctgggaacctcaaaagtgtttggactgctagagagataccagaaccagtccttattaagcaatccgtggtgcattgtcttctgtcttcacgggatagtaagtagagtaaggtagggaaaactctcacacaaattaataaggaaagacttaaggttgccacttctttctgcctttgtgcttcatatactgcctctcctttagttgcacggaaaagggaggatttgatggatgctatttttaacaggagccgggataaaaggaggtattatctctaatgctgggaaggaaggtgaccacagacaaacatttggtgatgggagggagggagaggcccttgggtttcaaatgctgattgatcagtcttctgtcttcttggagtcagttgcagctcggtggatacctgtatgctcttgggctgatgctctcacttgtactgttgtgacctgttgtctagtggcgttttcttttctaacatctctgtgactagaaggcctcttttcctttatgaagtgactcatgaaggaaaagcatagaacttgcagcacctagaagtagaaaatcgtgccccactgtttgtgttgaagtggaatatgtttcaaaagtaaccaggataagggcaggaagctccacccgaggatcactaccgtggtctctgcgtgtcgaagctgttgccttggattacatacgtttatcttttccatcggatgtgatttttacgaaaaccagggagcgtagccatggctgctgctctgctgcaatgtgaactgtcagaattgaaaatcaaacgttcatattaattgcttcccacgagccatgtgattgattcacttatagcacgtccctcgcttgctaagcgtttgacacatgcactcatttctcagtggcaaaagtattcgtaaggaaaagtacacaacagaaactcaagtgtgagctcagcaaagctcgcttcatctacatgcccgggctacacgggaaagttccttcctttcagttggattagttgaacatttgtcacgggagaatcttgctttgaagtttgcctttcagggcttcctagccctctccggagtaatgcacatttggtcctccccagacacctttctgtctagtgttcctattgttttgggccccacacaagaaccatgtctatgtcactagtctcgaggggacggttcctagaggggagcccttgtcatgttcattctcctgagaaaaattatcaacgccaactatgctttagaaattatctttcttagtaataatttttttcctatgaactatgagaagccagttgattctatttgtgtgctttagtgtaacggagagccactatgtcgtagttacacatgataagaatagaaaagaaagagtaatggctgtgaaatccctggatctctcactatgagcagtctcacattcttctctagttcggtcccttcattctgcagctgaggaaactaagtctgagaggcactgagtgcttgccctgtacttacttgtgtgtagcctgacagcacatatggaaatgtgggataagacagttctgtgatcgggtgagctgagtcattgataaatctgtagtttaaggtaggatatgaatcacttgctttaggaatctgacgaaactgcccgtcagtaagtgccatacagggtcttgggcatgtaggtgactctatgcatctgaggcagctcagggcacagcagcccgactcctagttgacctttggcacagtcaagtttttgagacaatcattgttacatcagtgcattctccatttgtaaccagttttaccaccttgaacaagaaggcttcgttaacctttgttatcggatttctttttctgagacttgatatttgtcccttagaaagcagtgaactgattaataattcagatgtgttcggggaagtcagagtcagcacctgtgtgatactggggtatggcttgggaagcaccgaggtaactcagaagggattggatgccttctgttaaagtttgttatacttgagatttttattagttaaggctagtattgttatcatttaataaaatttaaacacaagatggttgaaaatctgagggatgtatttctccctcctgcctgtcaccaggggacttcctaaggcaggcagcaaagggggccagccaacttaatgagatgcgctttgccttttgcaaaccaccttgcttctgaagggtcactgataaactttacttagctcaatacactccaggtgtcccagcacttggacgctagaagcaagatgatcagaactttaaagtcagttttgaatacataagcctgacatgagtgtgtgctacatgggtccttgtgagggtgggggaggagagtgcgggagagggagtggggaggggatcagaagagcagagagcagagagcagagggagaaacaaggaagtcaggagaggggttgtagagcagtacctgaagagtacttaagaaatgccgaggacccaccccactcttaagcattttgtcagttccgtagatctagttgtttcccatgctcattaggtgtggatggttacaggttggtcatgctgggagctgtcttgatttttttcccccttctatattgatagataagaataactttatttttgttacagtgttggctgattttatttatttatttatttatttatttatttatttatttatttatttaacttgaaacaagttagagtcatctgggaagacagaacctcaattgagaaaatgctttgatcagattgttctgtgggcaagtctctctctcttcttccttcctttctttctttctttctttctttctttctttctttctttctttctctctctctctctctctctctctctctctctctctctctctctctctctttctgccatgtgttattgtacagtttctattttaaaaaaatgattattttatttatttacatgtcaaatgttgtcccccagtctcccctctgcagacctccgtctctctgtctcccttttgcctctaagatggtgttcccccacccacccactcacccactcctgcctcacccctctagattctcccttctctggggcgttaagcctccagaggacccagtgcctcccctcccactcatgccagagaaggcagtcctctgctacataaatattggagccatggacccacccgtgtataccctttggttggttgtagtctttttcttgaataatgattaatgttgggagggctcagtgccctatgggtggtgccacccctaggctggcgatcctgggctgcgtaagagagcagggggatatgaagcaagcctgtaagcggtactcttccatggcctctgcttcagttcagatcctgcctccaggtgcctggactgagtttctgccctgacttcctgtcatggtagactatgacctctgaggtgaaataggtctttcctgcagtttctgccccagactgctttggtaatggcctttgttatagcaaaacggaagcaaaggcagctgctaagtgaatattaagaatctgacaaaatgtgtgagctgctttctgataatcacattaactttctgaacttttgatcagttacttgtcagtaatggaagtataacttgaatgtactaaacaaacagacaaacaaaaacaccaccacaaccttgtaaaatacagagaaatccattagccttgaatacaagctgttcccagggctgaaatagcacccatttattataaaacataagagccaaagggtattttatgctagaccactttcagaagagcatgatcgttgttagtaactaacctttatcctcaaaagtaaacttagttcaccatgatatgcagctgttaatctcacctttttactggtaactatgtatcagaacagcttattactcttaaaattccaaattcctcagaaaatttcaacataactgggtattatattaatgtaacctgggcgtgatgttaattaatcagtattaattagagctttatggtagaatctctttttcaagaaactaacattttggaattgctacatgttatttatatctatcatctctgtcgtctgtctgtctgcttgtgtatctatcatctatgtagctctgtcatctattcaaatcttcaaaatagacaatatctgatactaacacagtgtgtttggtaattagaacaccctcactttttacttcatgtattgaatatgttggttttagtcaaaatgacgtttggatgcatacattaggaaatcacctttaatcattgtttcgacacagtagaaattcgttctttcctttcacatgtcagcagtactggcagagaggctccttggtaccttatgacctacactcatagctctgtgcttcaccatcctcacctaagagcatcccagagcatctcctggcctgatgtggagctagagccccagccatgaagtccaccatagagactggagtaacggtggagagcagatgggccggcaggcaggtggcttattctagttcagcggtcccttgaaacagctatcagaatttctgcatagctattccacttctcattggctgaaacttggctaccgggctacagctagctgtaaaggaaatgggggactctagttctaaattcaggacaggaacattcacagttaaatatcagtttttgttactaaggaagtgggaaaatggatatttggagagacagtatcaccatgctcttgtgttacttactgggtcttttgactacaatgtataaaatcaaaacccctctttctgtttttgttatgagcaatggtttcttaatttagaacctggctttatttagaaaccccgtttcttctgcgaagtatcgttgctttatttggcaaactagtctgactttgctttcctatttccttttgcctttcagctgttttggaaagaagtaaggcttagatttctccatgttaaccatgagtgtgaccctttccccactgcggtcccaggacccagaccccatggcgactgatgcctcgcccatggccatcaacatgacacctaccgtggagcaggaggaaggagagggagaagaggccgtgaaggacgtgggtgctgagcagcagtatggaaagccacctccactccacacagcagccgactggaagattgtcctgcacttacctgagattgagacctggctccggatgacctcagagagggtccgtgacctaacctactcggtccagcaggatgcagacagcaagcatgtggatgtgcatctagttcagctaaaggtaaggccggctttctggaaagacgtctaaaattgcctctggtatcttgagccagtctcagttttatgactgtcaatgaggaagagtctgaggtggaactatagtaacatttggaaacattactcataacggtagccagatcgttgttcttctaattttactacattgccaattacctagcgtaaaactggcctttgagaatagaatggaaatacaagaaacagggtgggtatttttgtcccatgccatagaaatcagttgcagagaatgaaaggatctacaaacgattccgaaaggcttaacaaaagacatcaagccaggatggagagcaggtcatgtgattagtaccttctgcagaagctgaggctgcctgcctttgaagcaattggtggtttctaccctggtgggaagggcaatgttctccttgtagagagtctttcatccgaagacaatgcattatgcagaagaaaggagctttttataaccactgatcgaatgtcagactttttcaaacatctgtggcttctggagaccttttgaaggtgtcacagcacagagaaatgggggtgctggtgagcatacagttaaatgagggctccagaaatatacactgtgacttcgaccctgccatagtctcttctctctcccaggtccttaaggggaaaatatatattacatgtaggctttgtctaaacttcaagttagatgataccctaaggaagattgttttacctaagctggttcataaaataaaataaaataaaataaaataaagcctaagcagatttgtagatcttaacactgaagtgacttatggcctatagctaccatggaagcgtggtgagccgccaagagagagcttgtttctaaatgctttgagtggatctggcttagcctgttatctggcttcacctttcacgtttagtgcgacagatcatctgccagatgtcttggttacattcccactgttgtgataaagcactgtgaccaaacacaacctggagaggaaatagtttactcagcttacacctgtcaggtctcagtccatcactgaaagaagtcaggacaagaccttaaggcaggagcctggaggcagagctgatgcagaagccagagaggaatgcagcttacttgcttgctccagatggcgtgttcagcctgctttcttatagcacccaggatctccagctcagggatagtaccatccacaaaggtctgggcccgtcctcatcagtccataattaagaaaatgccctgcagacttgcctatagcctgatcttatgagacatttttcttaagtgtgattccttcttttcagataattctagcttgtgtcaaagtggcaaaaccttactaggacactaggttactacgtcaatgtttaagacagggagggaaagaagattcagaggagagaagggaggagggaaggggtaagaaagggagagagaggggagcacatgagaaaaggatcagtgtaagtcagagagccccatgccaccgatagttgctcttgggaagatctcagcatgatggcagagctatggctggaggcagccccagcagaatgtcagcccccaatagtgccctcctacggccggccttagggagcattgtgactaggatccagagataatttattcagaggaatcttggggtgagagtaaactagaagttagaggacactcctttgtactgctctctccagtgctgatctagtgtgtggcttccctaagttgatgcaggattgagcttgtaaggcaaatcagctgttattccacaaatccttcgcatgtacacaggaagttagttaaatgctagaagtgaggggggtaacacacctaccgttagaagacacagctaaaaacactgttaaaaattcaaatggttggacacgcaaactgtatatgccccagtacaggggaacgccagggccaaaaaaaaaaaaaaaaaaatgggaataagtgggtagggaagtggggggaagggtatgggggacttttgggatagcattggaaatgtaattgaggaaaatatgtaataaaaataaataaataaataaaaattcaaatggtcttaaaaatactaacttgtcattaacttcacttaattagactaatagggctggcaagatggctcagtggataagagcactgactgctcttctgaaggtcctgagttcaaatcccagcaaccacatggtgattcacaaccacccgtaatgagatctgataccctcttctggtgctgtctgaagatagctacagtgtatttatttataataataataaataaatctttgggctggaatgagcagggactgagcaagcagggttgaccatagtgagcagaggtcctaaaattcaattcccaacaaccacatgaagactcacaaccatctgtacagctacagtgtactcatatacattaaataaataaataaataaataaataaataaatcataagtcttttaaaaagaaaataaaataaaaaacaagcaaacaaaagacaaggaaaaaataattatttaaattaattatttagatgtaattatttaattatctaatgaccaataaagtacatatggaaacttaaattttaacacaataggaatgtaaattttttcgtgccattaatgtatagtttatttagtgtttgaaacattatctctggggagatctgctttctcactgtagctgtctttgtacttttagaaaggcttcttgtatctgtcattgctctatttcaggtgtgagctatcttcccccactgagaaaggagctgcaggagatgtaaagtcaggacagtggtcctatgatcccagacaatgactgttcagtgctgaattggaactgtctaccttcattttactttacggcttctgtcagcaccgtcctgtttgttgtttcatcaagttacttagctaaattctctgtgatgttctcaaatgtgtgtaacaatggagcccttctctactgagcccaaagtcagcaaactccagtgtgtgtggccgctactgtggtctgcacgaaaggcttagttttgaatcctgatatgcttatataagtttctccttcgttatataatatttctttgttcagtggaattttggtacatttaaatttttgaatatgtcactgtggtaccaggttcagcctcccttctcagggtgtgcaggtgccaccagcaaactgggggtccacagtctgcataagtcagatactgttccaggagggggtgaagtggagtgggacgggaagaaaagagagtatgaagcagctctctgagacaatcctggcttgttcatatttctctattggggatatggtggtgggtttgaattaaacaaaaggttatatagtttctggggaagggcgtgagaatatccagggagggaaagggcactcattgcctgaaggattctgctactgagatgcctcgttagttcggcgaggtatcctaggtgctgagtggtcactgattaagtgggacaagctggttgggagtcgcctagttgaatgctctgaggcaggtatggaaccagggaggggttagccctccccctgcaggtcccacgatgaggttctaatctcagtttttcagatttctcaggctcaaccttgcctgttccatgccacttcctctggtgtcgttgtacacgtgtcctccatgtcaccctttcgtcgcactctacatacattcaaaatgataaagcacgtagcccagggtgtcagtggagatttaccaggacacccttgtaaagcagctcctagatgagactgtggcaaagcagggggcagatccaccttgggttcatggtctcagcttcatattactgcttcggtccattagttgatttattaatttacagtggaacgtaatcgtcaggacaggggtgcccatgaccttgaagaccatctgtgtacagaaaaatgccagttttgtgcatctattccaatgtttccctaatggtccaaacccaagtttcttacctggttactctgctcatgtcttagtaggagtctcaagctggggatgtccgttcgatcgctctgagtgctcccctacttgctctgagtgctcccctacttgtcccagttacggtagagggaccactctttgcctaggcatacatacatctctatcaacaggaaacacatcccccagttgtgccttcaattcattcactgctgtgtaacactactgagccagcctggcccttgcctgcctgggtacttaatgcctgggtacttaatgcctggactaatcttgctttcttttaccttttatcttccccactcttgcagcctatttcccattcagtagctatttttaaaaactgtctatcagagtatgccattcttctgttttggatctcttcctttgactctttactgcctaagtctctggtgtggctcctcccattcaccctgatcgttaaagccccagagaatgtcaagctagttcttgccctgtagctttccttgttccttttgcccagagactatgtttccctgtgtatattgcacagccgactctagatcctcactgttagccagaggcacagtcaggttccaacatccactcacagaggcctggaggggatcaggcaggggttgggaagaagcaggtggggcttattctgtttttgatgaagggaacacacacacacacacacacacacacacacacacacacacacactacagttgtctacacacctcacactgcctttacagtgcttgctttaagtcattttgacactgtcttctcgggaaaatatattaatgtacattttttaaaaacttcattgaaaaaatggttttggaaaatgctcacagtggctttcaccagtggtcatatattaaatttttagatcatcaatttctgatgcctactcttaaaacacctactcataatctcatagacattagtcattctaatttacttttataaaaaaatcttatacagttacagcatttgtttgcttcttgtgtcagatatctattctcccttatccttcttgctcaggacagaatagggtactgagtgtgggatcagttcatacacaagcctagatagttaaacccaagtctttatgtccattgcctcctctccccacaggcaggattgtttttaaaaacatatgggaagtgtgcttgctccgttaagactgatttcagacaaaaacattggaggaattaagacacaaatatgtttggggtattgttctcacactgttggagaatctgagagtgtatctgaagtcttggatatacacgttgccttgggaacctgcccagagattctatatatttcatagatggatacgcttgcccaaacccttgcaatccttttttttcctttggttcattaattggcagttattttgatcagtaaatgtgctttcaggggcctagtggtcactcagtcagtaaagtgcttgctgtgaaaacaggaggacctgagttcagtcaccacgagtcacgtaaatcttagcacagacttatgcacttgcaatcccagtgctaggacacaggacacccacagaagcatcccatggtcgtgctggtcagactgtgcagcctaatccctgagctccaggtctcagttagagaccctgcctctaaaaacaaggtgggaagcttctgaggaacccaagatgtacatgtgcacatatatgaacatgaccacacatatgtgcacatacaaacacacaaagtatatgttcagacatttcacccagatgctcatttccttccacctgcccctgccccttgtgacatcagatcaaacaccaagactttgcatccccagcctttttctctaaaggtgacttttggtcatggtgttggtcttaaagtttctctctcatacactacttgtcttattctgttgctgtgaagaggaccagggcgctaattgtgggatcagttcatacacagggccagatagttgagcccaagtttgagtccaaggagaccatgaccgtggcacctctgataaggaaagacatttatatggggctggcttacaggtcagaggtttagtccattgtcattatgacaaggaacgtgggggcatgcaggcagacatggcactggagaggtagctgagagctctacatatagatccacaggcagcaggaggggagtctgaggctgacttgaacacctgaaaccccaaagcccagtaacatacttcctccagcaaggccacacctcctaatcctgtcaattagtactcactaatgtccaagcctttcttgagcgctccggactggccagcagtaacgacgctgcaacaggatccttctgcacacatttattgggagagcttgattacagaggcgaagagaccccaagcccagaactggtgctgcttatataggcctaggagaggcgtgtctcacacccggattggttatgcactaagcctcatttgcatgttcctcatctgattggctactctctctctctgtacctcacagagcctcattatcatacctcatttgcatgtctcacatctgattggttatactcccaaagcctcattatcatgtctgggccaggcagtgtctttgcaaaaaactttactgcatatgtacacattggttgtttgtctgaacttatgcatgatggccagcagtagtcagcgccactctgcaacggcacatgtggcttcccacaagcctttaaatatatgagcctatgggaaccaatcgtattcaaaccaacacaccactctcctatctctcttagttccaagttctcaggaggaaatttcactataacctccagattgagttaatcattattacaaagttttcacagggaagtgattgctactgaaagcagaaaaaaaaaaatctaaccttaaaaaaaaaagtcacaggaaaactgacttatactaaatcctttctccattgttttcaaactgaacacacagtctgcctattttacttgctactttccagacgtgcccggttagaggtgtgagaaacaccggaaacagttacacgcccatctgcacgagtacccacacgcccaggtctggaagttgtgctgcacaagacgatctgtccaagaaccttaaacattgcagtcttagctgagacctcagctgcatgaccgtgttaggtgctaagcaggcactttctcagggagaatgctgcctgtatccctgaagacaggacagcaaagaggtggcaaggcatagactaagaaatgtagcctgtaaataaacagaagcctggaagtgacttaattgaaatcagttcccaactttaaattctactttcaaactcccaccatgtaagacttgtgcctgaatctttgatataggcctgattttcaaaggtagaacactggattaaaatctgtttataggaccttctgactcagatgcctaagacatctgggagttaatccagacacccactaactcacatgggggctagagggcctgttgggaaagggctgtgtcctcttcacagctgggaatttgcacatcaggtatgcctgatgatctaaagatggtggaaatctagagacaaggggctgctaggagaggattcatgctcatcgtgggtccaagaggctgtgccaatataacacaaagagagaacagtgatgggctgtggcacagtgatccagccctggaacagacctgtgggtaacaactagggagaagagaaggctgagcacatggtgccagtggcttcctgactggctgaggtagacttgcccctgatttgggaggttcagagggagaaacattctcttctttctgttatagaagaacaacaagtgagttttgaccaagatgatggtggttttcccagaggacagctatggagtccagggtccactgcctatgatcgtgagcagcagccaaggttgactactgagggcttctatccagggctccaaattcttggcatacacatctgagaactactaacgtcaacatttgggggtctggaggactctgatcttagcatctgtgtgacccacaccatagtctgaagcatccaattcctaacacctctgagtaaatacagcatatcttaaatgagattgaagagaatattttttttctgggaaaaatacacattttcctttttgtcttttcaaccattattttttccagagcaaaataatctcagtccatttagcaggttgtgaaatggatttagtcagataactgaaacaatgcagctggacagaattgtagagataaaatattttgtaaagtttgattatagatgtattcatgaatacataattggtcatggtgtacatttattcttttactgagccaatattagagtggtttaatagtcactgatttagaccattctcaattttcctcaatatctttgatatatactcaaattttagaagatatactgcacacaaacttagtcaggtactgttttgtgcactatgaccattgttctttattctgggctcaaacttagatggaacattcattaaatcaccaccatcaaaggtatatcccacatctcaggagtttaaaatagggattgattggcagaaatgaagactaattttaaaatttttctcctcaaccttagattttcccaacctagaatctctttttgattgatgtgtaacatggtctaaatatatctccccaaaatttttgtgtagcatttcttaagaagtatagctttaaaggaccccaccctcctgagtgagatggctaaccttagaggctgggctgtttcttttgccatgtaaggacacagtgagaagctacctactccagagcaggaagtcctcaccaggtacgaattttgatgatgtctcctcatgagcttcccagcctccaacagtgaaaaatgtccttctttataaattactaaacaaagctgaaatccgtccacgtggtgatcgcttaggagtgagctttcttttctgttttcatttcattcctttttgaattttagaaaagcactctaaagtctaggtattttgcttcttcttgtacatggagccatgaattggtaggaaatgggctccagccactcaggccccttttcattagttcccaccgagtgtttctctgggtaccatgggctgctgcttcaggtgaatcccagtgactttctctctgcttcctttgtcttctgatcattttccttcgccctttgcaggatgctgtcttggttcctcaagcactccctgtgatcagtatgtacattcattcttttggcaaagatctcgccccaaacttgcctgtttacaatgatgtcagtgtctttctgagtgttggagactcttccagtgtagctgagatgacggttttagggcattcctctgtgaacggtgcccattcacttgatgcctacaggaccatccttcctgtgtatttgatgaatgtggttgaaggaacaagtttttgtttcctaaaaggccaagagaacacatagcgtggacccctcctcttctgtgtttgccattttggcagattactggaagatggctactttctttcctttttaatttttctttcggagatagagtctcatgtggctcaggcgggtttcaacctcaccagcctgaggatggctttgagttccacccgcctcgtgtacttcagtttcaggcacagaccatcatgccagcaggactgtgattccattacatcaaatcagtaggaagttttcacaatatctagtgtatagctcatgtgataatatgtgatattattgaccaataaacctgtgcagtacagtaagtttgtagatactttgtacaacttagcgggcttcatcaaagtaatttatatttttaaaggaaaagaaatggaaagaaagggaccagagactcaaggggagttgctggcccaggacacacaaaccactgggttcaactgctagtgtgcagaaggcagagttgaggactgctgatgcttaaaaggcccagccttatggaaaactccatctggttgagtaattatctcctccatcctcacttcatgaccaatgctggaagacattgatgaactgattggtgaaagtattttcggtatgatttggaaatatatcgtaagtcgtagacatagcacatttttttttttcaaactatgtgtaaaattcttcgtaaagacttgggcaaggtggggctggagagatggctagatggttgagagaacttgctgctcatgcagaggactgtggttccctttctaccatccacatggcaactcacaagtgtctgtaatcccaatgccagaagatccaatgccctctgctggcctctctgggaaccaggtatgtacatggtacacatgcatacattcaggcaaaactttcatacctataaaataaagatacataaatctttagtaaattcttgggccaggcaacatggaagacaaccctgttgggtttggatgcacgttgttgtggagatgtttgtgtataaaccttagccacatggactgatgcagttagactcagaatgagaatgttaaatatcaggtggttccagaaacctaccagatggttgagctgtgtacctttaaatagcaaaaggaatattgaaaaatgaatagtatcacagactataaaacttaaaagaaatcattaaaacacattaaagaaaaatattatcatagagacatttgaaactgagaccaaggaggcaagcctgaaactggcattggtttaactagggactgattctggggattgttcctttcaaatgttggcttaattataattgaagaacaacagccatttatttatgtggtctaaagagggaaatgctggttagaatagaaatggcccctacagactcatgtgtttgaatgcttggtccatagggagcggcaccattaggaagtgtggccttgctggagcaggtgggaccttgttggaggaagtgtgtcactgtgtgagtgagctttgaggtcttatgtgaccactgtggctcacagtcacttcagctgcctgggggtcctgatgtagaaactctcagcttttcctctagcaccattctgcctggatgctgccatacttctgactatgataatagccaaacctctgcaactgcaagccagccccactttcatgtttttctttgtttgtaagagttgccatggcttatggtgtcttatcacagcaatagaaaccataactaagacaggcggccattagaaatgggatatgaattaaccctttctttgcctggagagctttttgttcagtagtattcgctgaattcttaatatatgtcaggactttttttttaaattttaattctaattcttcacaacaacctgctcttacagatgaaaataaacctcaaaagtgccttcatcacttcgacagtcttaccatgctttttgtgcatgaagcccaacattccttctatcttactgcattggcctcctacccctcacatgctgaggtctaagaaagagaagagctgtgacttcgagagcctggctctcttatactaaacacttaccatgaatggatatgatggggaggggtctctgttttcaaattaaaaaggtaaaatcaatgtgtgttttaatttatcatagataggaggatgaacagcttgcagtaggggtgcaaatgaagtctagagcctccctgactacgcatctcatgactgccttgagtcaagaaggaactggctgccctctgctcagctcaccatttgccacaactctgaccattctacgctctttacaagttcatatcctaaaggaagggggcatctggtcgaattaaactacaattctgctagcttgtgatttcctgatccctcgaggtggctggaactggagatgagaacattaatgagaaacactaacagtcccattggcttccagggacagtacatgacagcctttggttcttgcctttggctgcatagcagaatatttcaggaagctttgaaagttattgtcctggatatgctggggatcagctgcctcagaacttggttgttagtcaccctgacacccatcctcatagaggtgtagggctccagtatacacccagagctgatgatcctaggaaatgtttgaggagatagtttatgtatctcttgctttttttggtactttctctttcccaagcaacacagctgggaaaagttacagctgtggatttaaagtcactgtttctaggagaaatggctcccatatgactcatttattaatttttttaggtttttttttgtgacctgactagtcttatgtcaacttgacacaaactatagtcgtctgaaagaagggaacctcaattgagaaaatgcttctataagacaaagatttagagccgggcgtggtggcacacgcctttaatcccagcactcgggaggcagagatgggcggatttctgactttgaggccagcctggtctacaaagtgagttccaggacagccagggctatacagagaaaccctgtctcgaaaaaaaaaaaaaaaaaaaaaaaagatttaggacattttcttaaatagtgattgatggggaagacctatcctatcatgggtgctatccattcctgggctagcagtcctgggttctataagaaagtaggctgagcaaaccatgaggaacaagccagtaagtagtacccttcccatggcctttgaatcagctcctgcctccaggttcttgctcttgtttgagtttctgtcccgacttcctttgatggtggactatggtatggaagtacaagccaaataaactccctttcctccccacttgcttttggttgtggtgctgttttatcacagtggtaataactaactacgacagaagtttgtaccaggagtgggtattgctgtgacagatatgaccatgcatttgggaagagtgtggaaggacttttgaaactttggggtagaaaagccattgagcattgagagctcaggtggactgttctgtaggaacttggaagataagaattctaaaagcagctgggaggtggtggcacacacctttaatcccagcacttgggaggcagaggcaagcggatttctgagttcgaggccagcctggtctacaaagtgagttccaggacagccagggctatacagagaaaccctgtcttgaaaaacaaaacaaaacaaacaaacaaacaaacaaacaaaaagaattctgagagcagatgatggaggcctgactcttgaagtttcgggggtgggggtggggcaaagactctactgggccatttgagttaagaatctgttgtatctggttacctggagctgaagagtcagtcgtgattaacaagagactggcaacactgaaatgaaacttttgagttctatgattgatagaagagggccctttctattgtgggtggtgttatccttgggctggtggtcctggttgttataagaacacaagctgagcaagccatgaggagcaagcaagtaagcagcatcccttcatggtctcagcatcagctcctgcctccaggttccagctctgtttgagtttctatccttagttctttaatgatggatcgtgatgtgaaaatataagtcaaataaacttttctttccaacttgttttggtcatgctctttcatgacagtggtagtatcttttactagggcaccccataaagtcaggagaaacaaaagtagagatgtcagaaacatgcaggcattacccttttttggttagaatatacaattctatgttatttatattatatatttttaactttttaaagagaaaaggagaaagcttgcatttcgctctcatttattggtgtggaaatcatcttacacatgggtccagacaagaggcatctttcctgtagccatacacgttacttatgaacggctcattttgaagctatgaatttgtgacgtgtaccacacacagagtcttatggagccatttcgttcaagagatggagatggtctgaaaaaagagcgctgcatctgaaggaggggcattttctacactgtaaagaggatgctacatgactgggcttgggcttgggtgggggggggcacactgggaagacaacgaaaactaaacagtctcaatgaagtgtgggcttgatagaaccatgacaaaagtatctacaaagggaagcatagattaaaattcttttaaaaacccagccctcgttcttagcctgactttacaggtgtacagggtgattcgggtaggagagagatatgagctgcttacaaggctgttaagtgacaccctggctggacttgggctgaaagggtagaaagaaaaacaaaacacaaaacccatcaaacaaaaagcccatcacacggaataacaacctgggctgagcagggaattggaggtaacgaacttttgccgcccccaccagtttcttgttgttaggggctgagtaatgtgcacaaggctgttagcagcagagtctggtgtacactgcttctgtgattcgaggacgagaaatggacctgcctccccagcggcctttgcccaaactggagcttcttacgatttcctctttgattcatcaacggaatttctgtcgcagctcgcgcagtgatcatcaaacactggtgttaccaacggcctccttgcaaccctttactgctacagagggaatggctactgcccctgctgaaggaatccatctccaaaataatgagagccaggcctcagtggctcaataaaaagacagcttttccctgtctctagttcttcaaacacctgtgaaggtggtgtcctttctgcacctgtctgtgcgtcttcctcaaagcaactcagagcaaagcgttgttttaagaaatattttaactacagatcttacctctcccagcttccaatgttgctctcacgtaaagtcaaggtgcatgaatacactctctgaaatgtcttcaaagtttacactcagctggcctggtgttccttctaacttttctctttggtacctctgagaagccagggaccttcagaaacgcacgcctcagaagagtttccctctccctatagaactaccacggtctttaggctgcacatcctttctgtgacagatgaagtgcctactcatgaaaccatcttgcaggccaagcagctgagactctgtgggagtctcctgagttgtctgctgttgcaaggtcatgaacagtactccctgccgtgtcttcaggggggtctccttcctctccgtagctatattcttcccttgatacttatgtctttgaaataggattggggaaaacaatcagctttcagatcatttcctctgattattttcttgatggaaagcaaaccgatactcttttccgtgtgatggctgagaggactcccggagtggagttattttcactcttggacatgtgagtgttagtatcccttcagtttcttccagacccagtcctggaacacattgcacttaagggaagtgacttggagaagtactgaccataaaggctctgtctgcagttttaaaattgtgaatatttagaggtaaatcattttgttatcattgagaatagtttaccttaggagatatgaaaatgtggtgagacattgaaactgggattccctttgccctgcttcgtacagacaaatgcaaggtttctttactcacacgcccagcagagcttcgtctcaaagctggtggacatctgcttggtcattttctgtggcagtggaggagggagctggtttcaaaagcattggtttagcttttcctacagttctctgggcagctgtatatttttgtctgtcataagaccacaaataggaataaatatttcataaccatttagtgtggttttccgaaaattcaataagtcttctaaaatgcaagtccatggatgtctttcaggttgctaggacaaatctattaaagctcagaacataaaaatttataaagactgagcatttactgtgtgcttatgtaacagaattttatggcttctgcctttattttaaaaaagccaatgtggtgcgttttagtattcatccaccctaattttttttatttgatatgtcatttccttaacactattatagatggcccaaaggactcctcccttcaaacagaagcatgtgtaagatgctcatattcttttccttacataatgacagaaagcagacactgcagaatggatcatgtaggcatggagacaggcctcgcatccatctctaacccggcagttacacagaggtggcagctcccggaaatcccccctgcctctgtccaaactgttcattgcctctacctgtgtctgaggacccggtgaccttatttgctttttcctacaccattttctaaccttcccatgcaactcttaaagctttttagggtcaagtaagtactcttatttctttgtaaaaaaaaaatgcaaatgcttttttcccccgtactctaaatgactgagttcccatatggtcatcttaaaatttttcttcttaagtcaggcagtggtggcacatgcctttaatcccagcacttgggagacagaggcaggtggatttctgagttcgaggccagtttggtctacagagtgagttcctccaggacagccagggctacacagagaaaccctatctcgaaaaaaaacaaaaacaaaacaaagcgaaacaaaaattccttcttctcttcctataagtgacattagcataccatggaaaccataacttctaaatcatatttcagaaaaatactaaaatatattcataagcactattaaattagcaaataattcacagaaactcaagagttaggagttggccaatgtaaactgaattttggtggtttgaacttggatcaaaatttgacattttcaaaacagtgcagtgttgctattttagttaaattccatcatagacaacggactccagagtttctccttattgtttgtggtttcggttaaatagcatttttgcggtctaggattcaaacctagggcctcaaacatagcaggtaagaattctaccacagggctatgcccccaggcctagatcccagttaatataactcaaaggttgtgcccaattaagtcttaaagctctctaaaagtccctattatttcagttcatgaacggagaccatgctattggaaaggaagtgggtttctgactctaacactgccttaaaccagtcagcagcctaacgttcacatatccattctctgtaaaccaaggcagtgtgagaggatgctaacgcacactgtttcccagcatccgcacagtggcttcaaaggttacagcaggtaccacgagacacttactgtgcacactgtgcccactgtagaatagagagctctgaggagaagcaggaaagaaatgcaagagcactgtcagtttgattaatgaagtccaggaccaacgatcatctttcaagggagaaaaatgtctacagatcagctgacgttaaggggctagccaacagtagtactatgagctggttcttcctcctcctactcctcctcctttttctgccttctccactttctccttcacctcctctttcttctcattctccttttcttccttctcctccttcattattattatcatcaacttactcttattccttctccttctctgttccttcttttttctctcttctttccaatctccttccccnnnnnnnnnnnnnnnnnnnncctcctcctcttcctccttctcctcttcctcctcctcctcttcttctagatgcctggactggaaccaaaatctggagtccaacttttgccactgacttgatgttgtggcatagccaccatctcctcggcctcagcatggctgttcaaagcctgaggaaaatgcttggtgctctccatgagggtatctgtggagacagctaagcccatcctgggcagacatccattttggagattttgtaaccttggtttgtcctcttctttctatgtctgtttgaggaccttcctctcaaggctcctcacattcttttgccattcaagtaatggtgtaatcggctattgaccttgtttactttcgttgccacaaagcacttttcagttatgaattttaaaaagtctgtataaataatacttagttctctgatgagagaactgaggagcagagaggattagcgacttccctaaaatcacacagcaggaaggtggcagagttaggattagaaagcaggttgtttaagaaacattttaattaattatttgataatttcatacactgtatcttgaatatattcacccccttcccaccctccaatcccttcccacccaactttgagatttttctttttaaccccagtttatgttggctagctagtcttgagagtgggacctgatgtagcatgtggttgatttacgattattaaattgtatttacagttaatttgattttaaattattaaattattattaaagaaatggactccccctcctagaagctcttgaatgccaatcgcttcttctgccaatgttggtatctgccaggatttggtgtggctggagctttggtggggtttatgcaggttgtcgctgttgctgtgagtttatatctatagctgccctgttgtatctggaaaacaccatttcctttatgtcatctaccaccatggctcttacaggctttctgccccctcttctgcaaagatccctcagccctggctggtgtgtgtgtgtgtgtgtgtgtgtgtgtgtgtgtgtgtgtgtaataggaatctcatttagggcttagcacgccagtgtcttgttctcagcatgttgaccagttgagggtctgtgttctatctactgcaaggagaaacttctttgatgagagatgagaaatgctgtgatctatatatataataaaaagttattaggagccattttaacactatatccatttagccaaataataatattcagttctacccaagggccctggcctatatttagccacaggaattaagtctttctaatcctcatccagattaatctttttcatattagtggtatttttgataatgtgatgaaagctataaaccatttcatatacatactcataatattttgtgttctatatcaagagacgctctcccacccccaccccaagacagtttctttgtgtatccctggttgtcctggaacttgctctgtggaccaggctggcttcaaactcacagagatctgcctctgctaaaatgaaaggtgttcacctcccagcttcacaattctcttaaccccatttgcagaggacttcgagttaaccccagtatgtcatatcattctactttttcaggtccctgatttcaaaatgggaagagctagaggggcggggagaacacagctgattgcattgtgctgtgtttagtagtatatagacatgtgggcctttccgttatatttcttcttctacttgagcatcaggggctttgagaaagccttcattcctagctgcaaagtgagattaccagagagcctcaccttacaagaagaacttcttaccctggggactgggcaggagggaatgtgaggccagccaggctgacaagagaggccccctcgagaaacaaaatgcttaattaatactgccctctacaagactttctttctctacttagagacggaggattaatggtgaatgaagaaggctagtcatgcattggcttgcattcacactgagaacagacaccagggcttttacttgttcatctattttatgtgcatgtgtgtatagaagtcaggggaccgtgtgtgggagtaggtcctcttcttctagcatgtggatgacagggctggaactcagcctgtcatacttggtgacaagagcctctaccaggtgagctatcttactgcccacccctttagtggaaagcagaactctagcttagaaaatggagctggaagaaaacagcttagcagcttctgaaagaacctttacctaaacaccatggtataaaatgtgtgtcttccttgctttttttcttctttttgtttatgtcttgtttggtttgggtctttaggacaaggtctcaatgcatcctcagctggctttgaatttattatttagctttggatgaccctgaacttctgatcctactgcccccaccctctccccaagtgttaggattaacacaggccctgctacctccaatgtatgcaaagctgtggatggagcacagaaggctgtgactactaggcaaccatattaccagctgagccatgcccccaaccctaaaggtcaggtcccaaccatgagggctgtgactaccatggcaatgaagggtattctgaactctagtagttgtcttgtcgagtgttcagtgtatactgggatgtcccagcctgcttcctagatgatggctcatttagtacaagctgccttagagatttcaaaagcaccctgagagaatgagactcagctgtcagtctcaacagctcacaatggggattcttcagtctcccaaagggttgtgattcctggtttcctgtcatcccgagtgtcagggtgaccaagagcaaggctgagtggaactgcttgcgtatgctgatgcaggcctggttcttatggtctggtctctattacttactaggaattagacaccaaacagtacgataacttctgtgagtcttaatatctttagttgtaaatatcttacttggaaggctgttgttaaaaccaagaaggaccattgtgtaaaactctgaaatttctcaaagatcacataaatcttagtaaatataactgtgacagtttcccagccaaaacactgctgccactcctgtgactttagttaataagtgaatacatggatacatgtgctagattagtggcaagtatatacgctaccaatcatagttagactcctatataatttactgatagatactaaaacacaacaaaattatccttagccatgcttaaaagaagcaggctatttattgttcgaaattgtggtcaatagaatatgataaaaataaacctgatttcccatcaagataaaaacaaaacccacagaacactgtgttcctacatcagcgtgtgttcacaccaagatccctgtacacagtactggttgtctctaagtcttcctcagcattaatgataatgcagtttttaatgttagcacctaaaacatcatttccatataacaaagtgcattggtaccaaatgtttcctctttccttaactctccatgaaagtttttggtttcccactaaaaagtgacattgagaaattcctttatggctttcttgtcttgttttgttttattttagtaggaatgatatagtttgaggtagggagatcgctcagcaggtgagagagcttagctatacaagtgttgaggacctaagttcagattgccagaactgtgtaaaaagctaactatgctcacacatgaacacctgtcacctcagcagtctatatggcggtcgggggtcattagggcttgctggcccagcctagctccaggtccattgggagaccccacctcgagggaataaggcagaacatcacagagcaccagatatccttccctggttgtgctcatgtaacttcgaatgcacatgagcatacacacacacacacacacacacacacacacacacacacactcaaaatggaatgataaatttggaccaatgtagtcaactgggctgataaagctccttgtggtgtgtttggggagggtgtgaaggcatgcgtgtgtgctgcacgcctgcatgggcttgtgggaggctaatctcaggtgtccttactcagttgctgcacaccttcagacaggtctttccattggcttcagtcagtacagcctcctcaattctgggatcactagcatgtactgccacacccgccacacccgtgattttctgtaggctctggggatcgaactcaagacctcccgcttccaaggcaaatgttatactgactgagccatctctccagcttatttttcccttccttttcctcttgcctctttcttttccttccttccctcacccctctataccatcctgccccctttcttactttttccctagatactgaggtttgaatttggagccttgttcatgccagacaagcgctgaattaactgagcgatgtgcccagcaccaggaagcttctctgattccggaatctctaatgaagtattactatgtttcatttctaataacccaagctgagaaaaccacaaatgaaaaaaaagagagagcttgattattatcttttttctcagctgtctaacaatctggcaatgaaaacctcatttgacggagaaaggcttcctatctgcaaacagatcagacttgggaaacactgcaacagacaacccagcccccaccccatgctttgtgtaggtcaaaaattacgttaactgttagctggtttgcacgattctcaagactctcttttaggctggctgctacatgagaaaatacggtgtgttgttgagttctccattttgatatactcaaagctggtaagtagaaaacacaagcttcctacttcccacaaatccattctgggagctgaataatttattaccctctcaggaaaaaggaccctgctgtcagggttccagcttctactttctgctccctcccatgatcctcctctcttcttcatctcctggggagctgcaacagaggacgctgctttcttggcatgctcttgtttatttgtgggcgtgtggactggtatctaggaaactttccaaggagcacagtcatgcacggtatggaaaccacatgcatacaccacaccctgctccccgcacagcagcgtctctggagaagtttctgttgactaaatctcttctgtatctcctggctgtcctctagatgtggtcccgattgctttttgttgttcgtggtgtttgtgttgatttttacatacttttctgtttataaagtaacacgtgaaatatctatgtctatctcaccatcctgtccagtagggtagcgtctggtcacatgcgattatttaaatttaaattaattaaaatgaacttaaactaacaaaaactcagttacatgctcaaacacagtaagggtagagcgtgtcggtctggactggaaagcccagagaccggcttctgcccaggggaggagccacactgtagagcaggctaacttaccttctctccatagttctactgtatcatacagggtcctttgctcttactataagtgctccattgtgttctactgcttggatggtccttaattcacttatctacggataaatatatagattgcttctattttccctgttttgaaaacaatttgactcttttttttgcatatttgccttcgtatacttatctaaatgttgaaaattggaattggtctacattgtccaattttggttcatatttccaagctaccctttagcaactgtatcaaatgactgtaattcctttggcctgctgtgagtcactgaactttgccatttaaactagagccattagaatacttaccctgtcccttactgggtaatcacgagatacaagtaatataaacatactaatactttaaaaataaaacatcaaggccatgtatggtatttatattaatttgtatgatagttgtaaggacaggggtgggaaccacgaatatgttgttatctagtttaacacaaaagaaagaatagttgtggagatcggggtaagattgcggcccaggagatttccttatggggtagagcctgtggctccagaatcattgtgattgtaggcataggcatttgctaataggaaggcagaactctccaaggacactgagagaagtgaggtgactttggttttggtgttagaatggagagaatgagatgacagaccatccaactattctgttctttctatacacaacacaagactccagagacatgaaatgaactagtggggctcattcctagcaggtggtggaacccaataccccgacttcttactgtctagtcggggtctcctttagggtccccctcccaccaccccacccccattttgaagggtacagtcaggagatgattttactgtcttgaacgtgaaagtcatgctggtgttgggtaactgacatttacttagtctattcttgaaacgaatacttaatgaaggctagcgaggcacgtggaagtcggacctcacaatgctgcttaccagtcacttgaaacggcagcaggaatcctagaactgtccatgctgactctggggccaaacgacaaatcgcatctgctccttacaaatggcagccacgccatgtcaccttccttaggaagacgctctgtttttagttcacctcgaattttagttccctttaaaaataggaaatcaaatgactaggcagccttaagttatgcaggagattaggagtagcctgtaaaaccagccagatgtccaggacctccaggctctgtctgaaatggcctcagaatcccttccagggaggctgtaactgctagacttcttcacggtccctcttttcattggaatgttcaactttaaaattactttctatttgttctgtaagaatttcacatatacacataacatatttgatattttcatttcctactcttccctttacctccctccagatagatctgtcctcactcctccccccaccccagcttgtgtctttttttttttaaataactttggtctaatttgtgctgctcatatactcatgcatgtggggccttccactgatgtgtggttgaccagtcaggcaccatagccttaaagaaaactgagtctcttacccacagaagccctcatctgtcaacagtacctcagctagaggtggggaccacactctgtacatctccaggggttgacttaactggaggggcaaaggatgaagaaatcacaaacacacagacacgtaggcagagaaaacctgggatggggtggtctgcgctctctgatggagaagctgcagcatcatgggggctcagcatgattatttatataagggaggcaggcattaagtagagaggcagggtgattgcacatggctgaataaggaggcaagtttggctaatcttggtaggaacagtttctgtagtagagcagtcgtaggtcataatcatgggagtggggaagctacaggtgggcattgtctgtatatattatcaacaaccacactgagaccagagggatgttctgctatctggctgagccttgcccagggaaggcttcgacacttccaaggttcctttgaggctccttgacacggctgtggccacgtcaacaatgtcagatgggggactgtgagtcctcccgactctgtgctggactggcttgatcttgtgcaggtcttatgcaggcagtctttgctacagtgagttcatgagtgcaacagtctggtcatgttccgaagacatgatttcactgcagtcttccttgaccgctggctcttttctacgtcctttccacggttggtccctgagccttgagggaagttggagtatgatacagatgtcccacatgtgactgagcgtgacacagacatctgttctttacacctttactagccgtgaattgttttacaggtccactagctgctagaaattgatcttccaatctcatttattcatttatttagcatccatatgtcctaaattatagctgagctcttaaccccggagctgtcagaacccctccagggaatcctgtgctgaaatcaaagagagagtgcctggcttttgcaggaaaccaaaggcctctgaggtttctggatggagagcagcttctatgactcctgcagaggaaggctttgcatgcacagcagtacttggtcttaaacttgctaatattttcaactataaagcagtagaaaacgaggtaacagaatgctttgttccaccagaccaaggtgaaaatatgtcaccgtggaatattaatttttatataaaattaaaaagttaaaaaaatttgggggcatttaatttgataaattgctcattatttcagatttatcttttttaaatatcttttcagttttagaaacacatacttagagttggtttgatggctcagtgagcaaagacagtgactgccaagcctgatgtgggagaaggagagagggtttccacagggtttcctctgccataggtgtgtgggacaatcacacacacacacacacacacacacacacacacacacacacgcaagggagggagtttgaaaacccgaatagttataatattttcccaatatcagtgcttcctttgtgttcaattgttttcttctgttcattttaaaatttagaatgttttctagaacattcatccgttcattttatagtttgatggtttggagggaaggctgcatggagataccgtctgtgcttttatccaatagccatcagcatagcttgtccccaacccctgaaactcccccttgaaattaattagaaaattagttcacctgccttctccatcacttctctctctcttaagcaaaactaattcacttcaaaatgtttttcatttgtgatattgagccaggatggggatacagtaaaaccttattgtctttgctccttttatctcctttggtctgctctgatttattgcttctgctctattttcaagttgtctagcacttgcaacctgtcccaagctcacttttaaaatatatacaagcaaaccctaaacagatggctctgttgatcttctgtctgctgatagcaaatgggtttgtgtggaaggccactgacttcagagaacctccctggtgagagagggtgacgaaagaagggatttgctgtggtccttacatttacttagggtttttttttttctgattttatttttgttttatgggatagatatacatggagaagggcagatctatgtgcatttcaggatcatagaaatcactaagatttgataaatgcatgtgtgtatttagtacagcttgctatcagtagtccatggcgatctgcctgaatatgattctggtgccttcnnnnnnnnnnnnnnnnnnnnnnnnnnnnnnnnnnnnnnnnnnnnnnnnnnnnnnnnnnnnnnnnnnnnnnnnnnnnnnnnnnnnnnnnnnnnnnnnnnnnnnnnnnnnnnnnnnnnnnnnnnnnnnnnnnnnnnnnnnnnnnnnnnnnnnnnnnnnnnnnnnnnnnnnnnnnnnnnnnnnnnnnnnnnnnnnnnnnnnnnnnnnnnnnnnnnnnnnnnnnnnnnnnnnnnnnnnnnnnnnnnnnnnnnnnnnnnnnnnnnnnnnnnnnnnnnnnnnnnnnnnnnnnnnnnnnnnnnnnnnnnnnnnnnnnnnnnnnnnnnnnnnnnnnnnnnnnnnnnnnnnnnnnnnnnnnnnnnnnnnnnnnnnnnnnnnnnnnnnnnnnnnnnnnnnnnnnnnnnnnnnnnnnnnnnnnnnnnnnnnnnnnnnnnnnnnnnnnnnnnnnnnnnnnnnnnnnnnnnnnnnnnnnnnnnnnnnnnnnnnnnnnnnnnnnnnnnnnnnnnnnnnnnnnnnnncaccaccaccaccataatcatcatcatcatcatcatcatcatcatcatcatcatctgatttccagcaaaggtgacagaaacatgttggagaaaagaggatctttgccgcaggggatgctgggaaccctggaaattcacaggagaaaccaaactcatgccccacttcacaccctgggaaaaataactcaatagaagccggagtccttgataaggcataacttttcacgttagagaaaacccttgatgatacagctgcaagcaagacctttctgatagctcaggagatagtggagaactgacaagcaggattgcatcaagcttcagccattgaagaaaacagcaaagagaagggcaggctaccaagagactattcattcgatgagataagcttccagactatctcactgggtatgacatcatgggctctactactctctggaactgtgagccccaaattaaatgctttcttttataagttcccttggacatggggtctcttcacagcagaaatgtaagatagatgggtgacgtcctgtgagactcatgtcagctaaagtaatatttcaaaaacgtttttttgtctgatggctggaacaaaatgcctatttcaactaggtgctttaatttatctgtgggtggaaaacaggactggtcttgaccagtgctggagaattggatcatgtccatagacctcaaaaataactcttaatggactctcaacttctttgatgctaataattataaacattttaatcaaataattatcttacccaagagagggaaataacatgtactaataaaaataattgaatgtaaaaataatgaatgatcttcaatttgagatactcaaataaataatagctatcaaactacttttagaacttttaaatgcctaatgaaaactgcttatttatccttgatatggcttcacaggttgactttttcttgtttcctggatctatatcatggtagaagtaattaacacttcttatgttggttgtggaactctgagctgcattatatttttcatagattaaatggaaaaatagaatagttttcaaattaatttagtttactcatcaggcacagtcttctaaaccaattgtttcattagaggaaaaggttggccataatgagaaagctagccaacgacgtttctccacgaacaccagattggagaaccactgggacagtgtagttaacggaacattttcacccaagcgtggctcaggaagtgctgtctagaaagggtgggcctcaatacagaagcactggggctagatggagctctggtggcaatgccattttttactagtgtccaggtagaccgtggggacttcaactcctaccatagctattccactgaataacctaggtggctctgccatggaggggtagctcacaatcaactctttttgagtagctggaagttcttaatacggtaaatctgatagaagcatttccctgggggagtgtagtcttcaaggcactgcaataggtagagcttagacaaccctcgagctttctgtgaatttaggaccagccttaggacttccacacagcatgggagaggaagtcactcacactgacaaatgcctgtgtggtgagcttcagggctaacagacacctgctgacactgaacacacaggggctgtggtctctgcaccacatgcctttcatgtgttgtaacgatgacatttctggagtgtttgtgtccacattttcatttttgttcagaggtcacacactctaatgatacaactaggatttaactctcatcatcccaaacagagaacataagcatctcttcatttgctgccggagacctcttgagacctccttcccaacctagcaagtctgaactggtcatcgcagcagcttggttgcttacttatttgtcatttcgggatgctgtcagctttcctatggttatcttctagtggccaaaagtcacatttcactttatctgtctggttgagaattcactgttgtgaatgaaaatcatggaaaattaactataactttttaaaattaacttgctcagaatgacatttttttccattttttattaggtatttagctcatttacatttccaatgctataccaaaagtcccccatgcccacccacccccactcccgtacccacccactccccctttttgaccctggcgttcccctgtactggggcatataaagtttgcgtgtccaatgggcctctctttccagcgatggcggactaggccatcttttgatacatatgcagctagagtcaagagctactggttagttcataatgttgttccacctatagggttacacatccctttagctccttgggttctttctctagctcctccattgggagccctgtgatccatccattagctgactgtgagcatccacttctgtgtttgctaggccccggcatagtctcacaagagacagctacatctgggtcctttcgataaaatcttgctagtgtatgcaatggtgtcagcgtttggatgctgattatggggtggatccatggatatggcagtctctacatggtccatcctttcatctcagctccaaactttgnnnnnnnnnnnnnnnnnnnnnnnnnnnnnnnnnnnnnnnnnnnnnnnnnnnnnnnnnnnnnnnnnnnnnnnnnnnnnnnnnnnnnnnnnnnnnnnnnnnnnnnnnnnnnnnnnnnnnnnnnnnnnnnnnnnnnnnnnaatctgctgataagcctggtaatctgaatttgagtcccgagtaccatatagtgaaagaaagacttgcctcccacaagctgtcctctgacttctaaacatactgcaatgtgcaaatggacacagacatgcacgcacgagagtgcacgaatacaccccctaaaaaaataaataaaactaaatgtagagggaaaaaataatttaaaaaagacggtgcctcaggttaagacgtgatctgtgggtgctcacaggaactcagagctgtaacgctgccttgctgtaaacgtaaagaaatttaagttttggtgcattggtttctttttcagaaaacaaagataaatctgactgtaaaattctcagacaggaaaaatgtcactactgtctacagaagacatcaacatggactgctgctgctatactttcttcatgtattcttttctagagaacttatttctatcatttaaactatgtgtaggtgtgcaggggcggggggaagcatgacaaaggcatagtatagatgtgcacagaggccagagccatccagtccttgagagcgttacaggcagttgtgagctgcctgacatgggtgctaggaaccaaacttgggtcctctggaagagcaacacatgattttagctattaacctacctttcaagccccttccaggttattttttgaggaaagcttttaaaaatattatttgtaattgcaaatgcttttaaaagtgttattagtatctacagtaattgtaaagaaaatgggcaagagaagatattaattaccaaacaaaattatattttaaaaagagacgcaacatactaatgtatttgcagataaagaaggtataccagaaagatatgcccacatccatggaaatgatatgaaattctcctgatgaagccaaaagctactaagaaaatggtttaaattatgaaatgcaaacaggagtaagacttggaaacactcaggctaagaagatagctcaatgggtaaactgcttgctgggtaaagtgtgaggacccaatttcagatccttagcatctgaagaaagccaagcacaggcctgtaatcccagcacataaaccagaggctgaataaccccaggggcctcactggtcagctagagtagacgatcagtgaaccacgggttcaatgaaagagcctcagaaaataaggtagaaaatgatagagggaggatacccagggccagctttggcatcagtgagtttattcacaaacatgtacatgcacacatatgtacacacatacttgaatttggacaactcaagtttccttattaaagagaaggaagatctttaaaatcaggcggaaaaaaaaaaaaaaaaaaaaaaaaaacctctgaaaattagaagtaagctcggtgtggcgggtgtgtgcctttaattccagcaccccaaaggnnnnnnnnnnnnnnnnnnnnnnnnnnnnnnnnnnntttctaaattcaatgttcgctaggtctacacaacaagttccagaccagctggggctgtataatcagacagtatctgaaaaagaaaaagaagaaaaaataaaagaaagaagggaagagaaaggaatgaaggaaggtagcgagggagaaagattgaaatttttaggaaaggagcctaagctagaaggaaagaacaaatgcacacgagcacagcaggggataacttagggatgctggactcgtaacagctccaacctggagacaacccagatacccatccactggtaaacacacacacacacacacacacacacacacacacacaaatacacagagaggggtgaaagggaaagagagggagagggggagaaggagagagaggaaaatgtctcccatatagaggacaagaggacctactgagaacataacaaattaactacttttgtgtacagtcacattgatacatcccaaagcattatgttgcatgaattacataaagcacaataaaaactgcgtgctgtgtgactccatttaaatgacattctaaaaatggcaaatatctaggggctgaaaactgtggtatgtatctcggtcttgctgctgtttatcttcaataacagttgccaaactctacacttaagaagataaattatattgcatgtaaatcatgtcttagttaaaaaaaaaagataagaggatttgagaaaaagtgatcaccacaggcgtacggccaggaagtttgaacttgtgcatctcaggcaccttggagaagaagctgcggcagtgtggtcccgagcaggaagtcgcccaggctcacgaaagttcctcaaataaggctgtaggtgactgaaaggcaagccagtgattcagctgttctggagtggagaccacagtcacacttgaaggaaattagggtatgttgttcctgtgagtggttctggtgggatcttttgtaatcagaatgactacagagatccccacatccatggagcatgaagctcgcagtgaattcttctcgctaataaaatcacgaacgggaagacatcatatgcaaccctcttgccaaaaccacacaccaccgtatatcaatcattctgagaagggtggggagagaggaatgaagaaaaagaagcctaaccacaagcaagcctccagatctgccagttttcaggagaggggattgtgctaaacaattcgagtacagtaagcaaaaaaaaaaaaaaaaaaaaaaaaaaaaaattggagtctgggaaactttgcagggcatacaagcctgttccttcagcagaactccaggaaagagaattcagggatagagcaaatgtgacaatagaggtaagaagaaacgcattaccactcagtggctgtacccctttttgggtaatgattaaaaatataaggcataagaacacgacagttgagagagtgcaggcagtaatttatattttaacactaaggagttaactttaaatggaatctacagtggcattgtggttatagttacaaagcaggcagggctcttgtgttttagctgtctgtactgcaatcccactgtgtacccgctttgcttaccagaaggcttaattataattgggggaactcagataaagtgggactggctgaagaccccatctgatttgctcagtgatggattcatggaagcttatgattctttcttaccctgcttttatatctttgacattttccagaatgaaaactttttttttaaaaatagcattcatataagacttctcacaaacctgtaacaaaaacgttatcgtccacatagacaggaagtgttattgcagaggtgatcattggcctcaaacgtggaggcccatcctcagacaccctgtcttaccgctgcttgtttgaccgtgttatcttcaaatcagagatgggcatatcatgggttggctttctcttcccagtgctctgacagccagctgtgagccctgaggtagtgacactcctttcaaccggagccctccgctcccttgactcacattgctcaactctccatccatcaccacagatgaaaatgccctgcttttatttgcttctgtttccccctctcatttttgactttcttctttctgtcccgctgccgtgtctccctgaaccccttccttcacttcgccaagtgacttgtcgcctgctggctgtgctctggacaccatctctctgcccctcccacactagtgatggcctctctacctctccaagcactggattcggcaaaggaacctttcactgggcatgtgcagagctggaacctgataagaacgctcataattacacgcttattgttggggaagatgctggcatcttgaatgccaaggacattgagaagaaatgacatcagaaaggctagttttataccccaaatattccatactctatactcctggaggagtgccaatcttcgtccctatatgccttgcttcctacccaggaaatgagtacactgaagccttcagcaacaacacatagatctttcaaggcacacggcattaaagtggaagatccttgtgggctgggactttgctgatttgggtttaggcctctgtgtgtagatatgctgtggctgcaagcttctacaggatgttaaacacttttgctgaggtccagtggatgaagatctttgctggctcacccagctgcagtgccacatgagaaagtgtggtttgaagcagtgggtttttcacttttggtgtactttgctgtcttcctgcttctgaacattgtctttctcaagtacctcctgtagacactcacgtttcttcctccttatcaaagtcctaccatcaacatgacaaccttcaaagactcaccagttccccagtgccctgcacggcagttgggcaaaatcctttgctgaaaaattttcacattgttttcatcaacattaatatttctagatatccatcgcagaccatcagtagtaaatagctcttcataaaataggaatgggggtcctcttgctcctgctcttgccttcctgttcctgctctctcgcttttcctttcccccctctctccatgtgtgcatggccagcctctacttctctctctgcctttctctgcctctacaagcctttcaactcccctacccatgccctgaataaactctattctatccaaaaaaaaaaaaaaaaaaaaggagggctggagggaaggcgcacataaataaaaataataagtcttttaaaagagagaaaatgaagggactaggggaaagggagatggattgtcttgcaacccttatgaccagagttccattcccagaacccaagtcagaaaaggtgggtatggtgctgtgcctctgtaataccagagtgctatggcaagaagggaagtaggggcaggaagaacgtgtaagaactcacgtatcaagaaagaccctgattcaaaacccaaaaaaactcacgacagcagaggaacaagattgagtgagagaactaaacctctgtgacatgtatttacatgaatacacacacacacacacacacacacacacacacgtgtaacgattgctttcaaccctgtagtgatgttactggtaggcttattaagcaggcattccactagcatgcttgctgatccctcctctattctgttaatcctccctgactcatgggttttactgcgagaactaatgcaacttcgtgaaattgctttactctgacacgagattttgtgccaggaaatcatttctaggcattgtctgatcaagttcatcaacttgctacaaagtagcccctgaaagcaagagagggctttgagttgctcccaatcgccaacactgagttttagaacctcctttgtatgactgcactgaacggtctttgtgacccataatattatccaagtaatttatgaagaattaaaaagcatacacgtacacattaaaaacactaatagattgtgcaatgtttaaattcccaatagattaatggcattctgcagtaaaaaagcctttaaaacatgtccaaaggtctaatataaacccaagatcatttggatttctatctgtaaaagtgtggcaagatttagtgactcccagaaaggaagcccctggacaattggcattcacttgttctgcagcgccatctagtgttcatggagaaatgcgcttttaagcctcatcttcctcagccttgccttgctgctaagattatctatgcagatttctacctctacctggcagccaatgatgcttagagatgcttccaacttacataaccttatattaatttccacggtgaaggatcattgatcggtgaaggatcaatcaactaatgagaagaattggtgtatgtatcagtatgcatatgtgatgtattttatttcaagactactatctttatttcccaataaaatagcccatagatgctgggatttactggtttactttaaatttaattgcccttacaaaaaacatcttaaatggcaaaacattaatttcccaattattattatagcatttactatataatataacatataccacagtacaaatgtcctattaggtccggggactgtcttacataatattgctccctttatgcaacttccaaaaaattctttattgctagaaaaagctacaaagcatcatctggactctaacattcagagctttgctgccctaagtgtggttcctgcactggacgcttaggcagccccttggcagatgttagcgttgcaaaatgtctgtaccccactttgcctcccaaaccacacttctcacttatgatatcccagagtttcagatgtacataaaatttgagaggaacctgttttagaaatgtcttcccctcatgtgctcattggacagtagtcaaccaaaactggagacttccattacaatttcagatttacgatattttattcttggagaaagttacataacttccctgtctgactcgtggcttatttcagtgtatcatggttgttgctgagactcacacagcggctgaacaaagagagtacattcctcccctgtccaatctgtcatcttcatctctgcagaaccagaagctgagaggaactgccgactgtgaaatttagggcacgcattcactaccaaaaatatttaagtctgctgtgacagagtcatgatttgaacccacagtaggaggcgaggcttaaatcttcacagctgaagctcaaaggaacacttagaagtaaaaggagaggttttaaatcatggctttccttgggccttaattctctctctctctctctctctctctctctctctctctctctctctcacacacacacacacacacacacacgcacacacacacacctttaaacctagcaagcttcctatgaaaatcagagtatttacagccatccattcgcttctttttggctaatgttcagttggttcataatctaatactattccaaattcactcaaattccccgagacacttatctaaccatttcagataacagaatagacttcaaagtgcaagaaaatctctttacaggctgaggctagtttggaaagtattttaagtgcacaattatgataagccaggttcttacatattacaaaattttccccttttctaaaatctgggctaatagctattaaacatttcaaattaaaactcaaagtaatatattgttggttcatttaaaaatttcagaatttaaaagtaataaatggattggtccatagtcatgaaaattatcattgcaattaacgcatagttccacaagctaggctaaatcccattatctctgtggttctaattatcgaagggcttaaagaaagcagaagttatttgacccgtgactggccctgcagtctgctggtgagggtatacggtaacacatgctgcagcagaactcagatgtcctaaactgcagattatcatgcagaacctttcttgggttgtcttagacgtcaacagagaattccaaggtcacggccacgagctaggacggattcacatccccgtgcctctcgactgctgaatatattctaccttcctttgcttttcctgtaaatcctttcagcatccactggcttaattggggtgaatggagtctgtgcctcccactagggcaaatgtcttgattgaataattagtgttaattgacacaggcacctttgtccaaggtatgaagtgtcttcctagtttatttcattatctgtgtctttcttctccattttacgggatcctgctgacattgctacctgactggattggctaaagttaaagctgggcatgctgttgcaggactctgtttggaaacacagatattgcagagtgttaggaatcctggggtatgacctgggctaacaaattatgagctctaacttgaaaaatgagccttcaaagcataaagcttagaaacctttgttcttacaagaaatgtgacgtttgacgtttgtcacaggtccctaggcagtccatcctggacctggggttctgaattctgcattctgaaggtttgttgaggatgagaaaatgtcagaggaatctgaaaccagatcaagctgaccgattagccaaattatcctcgagcatctaccgtagaggcgagggcttttaatcaggagccctgaggtgtctccctccagctttggatcctctccagagagcagccaggaaaagctttcccagtgtggaaagctcccaggggagatgtggccatggtgggacaatacccaggaagggctcatctgagagccccagagtagcagcttggggagtaagagcctgagcagacaagcaggccaggccacaaggaggagagatacactagcattttcctacaagtgnnnnnnnnnnnnnnnnnnnntcatttacatttccaatgctataccaaagtcccccatgcccacccacccccactcccgtacccacccactccccctttttgaccctggcgttcccctgtactggggcatataaagtttgcgtgtccaatgggcctctctttccagcgatggcggactaggccatcttttgatacatatgcagctagagtcaagagctactggttagttcataatgttgttccacctatagggttacacatccctttagctccttgggttctttctctagctcctccattgggagccctgtgatccatccattagctgactgtgagcatccacttctgtgtttgctaggccccggcatagtctcacaagagacagctacatctgggtcctttcgataaaatcttgctagtgtatgcaatggtgtcagcgtttggatgctgattatggggtggatccatggatatggcagtctctacatggtccatcctttcatctcagctccaaactttgtctctgtaactccttccatgggtgttttgttcccaattctaaggaggggcatagtgtccacacttcagtcttcattcttcttgagtttcatgtgtttagcaaattgtatcttatatcttgggaatcctaggtttggggctaatatccacttatcagtgagtacatattgtgtgagttcctttgtgaatgtgttacctcacccaggatgatgccctccaggtccatccatttggctaggaatttcataaattcattctttttaatagctgaatagtactccattgtgtagatgtaccacattttctatatccattcctctgttgaggggcatctgggttcaagccactaaagtagtattattgctcagaaatgttcctcctctttcccactctcttcctggtggtgcgatcaatcccagtgcttgtacgctttaggcaagcactctaccactggactatattcccatcccaagtatgaatccttctctccctctctcctcccctctctccctccctccattcttcctcccccctctgtttttcttccttccctccctcctttccttcttcttcttcctttcccctgcaccctcaaaaaaaaacccaaaaacaaacaaacaaacaaacaaagaaccaagagccagacatgatggcctatcttgtaattccagcaccaagggagcaggaacaggtgaacttttatgagttcaagaccaacctggtttgtatagcaaggggattccatgctagaacatgctacacagtgagacaagatagagatagagatagagatagagatagatagatagatagatggatggatggatggatggatggatggatagatagatagatagatagatagatagatagatagatagatagatagattaaataaaagtaattaaggctgggagatggctcagggatcaagataatctgctgataagcctggtaatctgaatttgagtcccaagtaccatatagtgaaagaaagacttgcctcccacaagctgtcctctgacttctaaacatactgcaatgtgcaaatggacacagacatgcacgcacgagagtgcacgaatacaccccctaaaaaaataaataaaactaaatgtagagggaaaaaataatttaaaaaagacggtgcctcaggttaagacgtgatctgtgggtgctcacaggaactcagagctgtaacgctgccttgctgtaaacgtaaagaaatttaagttttggtgcattggtttctttttcagaaaacaaagataaatctgactgtaaaattctcagacaggaaaaatgtcactactgtctacagaagacatcaacatggactgctgctgctatactttcttcatgtattcttttctagagaacttatttctatcatttaaactatgtgtaggtgtgcaggggcggggggaagcatgacaaaggcatagtatagatgnnnnnnnnnnnnnnnnnnnnctctttcttcctgccttttatgtaggctgccagcagaatggtgtggcccagattaaagatgaatctttctacctcaaaatatgtagattaaaagttgtagcttcccacctcaaagatccagattagaagtgggcctttccatctcaagtgatctaattaagaaaaaaagcctcataagtatgccgaagtatttaggtttcagttaaatccacatgtagtcaagttgttgattaagaatagccatcccagggttcaactctctgcatccgaattccagatcttcttcttatgtgctgtacagagcggctttctatgccttgtttttctcactgtaaaatgatggttacaatgatagcttagctctcctaggactgtaaggaccattagattgactaatatctgtgaaatgcttagaaaaatgcctggaatggaaagcactatgtaaatgtagctaatatgatgggggagtcttggagtcttctacaaatgggtattaccatcgcagggcttagcctttaaaatgaatcttttacccagcttgacagacctagcagtcacccccactaaacatcaaaaaccaaccacagacttagcatgtaggcatatgctgagtattgtcatgtatggagtcttaaatttcctttttactttcttcttttatcttcttttgataatcaaaaagatgtggttttgccagtaatgatgagacatactatattctcagcactaaagagaggatcagtagtttgaggtcatcttcagccacatagcaagtttgaggctatcctggaatacataagacactgtctcaaaaatcaaatgcaatcaaaaaaatatgaggtctcagtattatcggggacagccacagtagactcaaatcatccccctgcatcagcctcatagttggagttatagcttcttaaattttgtcagttattaagagccagcattagtgaatgttgttgccaagaaatatcacatacatgttagtcaaggcaagctactgtgtgattgccatacaatctttcaggaagatattcccctcatatctacaagaccgttagtcattgtcaggaagatgagtgtcctttcaccaacagatgtttggacgattggataatttagtgagtgctgaggcaagaagtttccaagctccgtttggagtcaannnnnnnnnnnnnnnnnnnnnnnnnnnnnnnnnnnnnnnnnnnnnnnnnnnnnnnnnnnnnnnnnnnnnnnnnnnnnnnnnnnnnnnnnnnnnnnnnnnnnnnnnnnnnnctcaaggtgccagcggagaaggtagttgacatccatggggagaatatggaaagcgcacatgacacagacgctccactgagttggccagataggaagagaaatgactacggcatttcacagtgggaaacctgagggatagatggaggctggccacacagatacatggaggataatgggatggattaaaatagaagatgaaagaatttccttagtgcaatggccaggactttctgatttctcctgagctatcctatttggtacaggataaaattagtatgtaagagggaggagctacactcaggtcataaagaactaagaaaactagcctgaggggaggggagcgggatgcccatttttatttccatgaaaacttgctgtgttaaaaaattccctaacaatatggggtaaatgctttctgaaaaagaattctattgactcagttttagacctaagaacatgtggcttttactaagcaaatagcaacttcttacttggatacattttcagtattgcaagtagttgattttaaaagtcgtgtgtgggccatcaaggttactcagcagatgagaactcttgatctctggaactcttgtggtaggaggagagaactgacttcagcagggaagctctcttctctgtgtgtgctgtagcaacccgttcccatccatccatagtaaaaagacaaataaataaatggttcatttgttttaaagataattgtatttgttacgaagatggctcagtcagtaagatgcctgccactcaattatgaggaccaggatctctagcacccattatgctgtggtgggcacagtgtctgtaaccccagagctggagacacaggctcgtaggtcactaaagctcactggtcaacctgaattggtgaactccaagttcactgagagactgcctcaacaaataagatggaaaatggatgagaacagcagtcattgtcaacttatggcctacacacagacacacacaaaagagaggggaaggagagacaaagtttctagtattgcttcctcctgataataaaaataatacatatttttacaaacattttctatgacccactggtactattgctattttgatgaatttcctttttctaattctcatttatatgcattaagtctgacttaatcaaaattttagacattatttctttcttatttatttatttatttatttattttaaactccagattttactccccttctggtctaccctctaactgttccacatcccatacctcctctccaccccacccctgtctccacgtggatgtctccaccctccaccccaccccaccagacctctaaactccctggggcctccagtctcttgagggttaggtgcatcatctatgaatgagcacagatccagaagtcctctgctgtatgtgtgttggtggcctcatatcagtggtnnnnnnnnnnnnnnnnnnnnnnnnnnnnnnnnnnnnnnnnnnnnnnnnnnnnnnnnnnnnnnnnnnnnnnnnnnnnnnnnnnnnnnnnnnnnnnnnnnnnnnnnnnnnnnnnnnnnnnnnnnnnnnnnnnnnnnnnnnnnnnnnnnnnnnnnnnnnnnnnnnnnnnnnnnnnnnnnnnnnnnnnnnnnnnnnnnnnnnnnnnnnnnnnnnnnnnnnnnnnnnnnnnnnnnnnnnnnnnnnnnnnnnnnnnnnnnnnnnnnnnnnnnnnnnnnnnnnnnnnnnnnnnnnnnnnnnnnnnnnnnnnnnnnnnnnnnnnnnnnnnnnnnnnnnnnnnnnnnnnnnnnnnnnnnnnnnnnnnnnnnnnnnnnnnnnnnnnnnnnnnnnnnnnnnnnnnnnnnnnnnnnnnnnnnnnnnnnnnnnnnnnnnnnnnnnnnnnnnnnnnnnnnnnnnnnnnnnnnnnnnnnnnnnnnnnnnnnnnnnnnnnnnnnnnnnnnnnnnnnnnnnnnnnnnnnnnnnnnnnnnnnnnnnnnnnnnnnnnnnnnnnnnnnnnnnnnnnnnnnnnnnnnnnnnnnnnnnnnnnnnnnnnnnnnnnnnnnnnnnnnnnnnnnnnnnnnnnnnnnnnnnnnnnnnnnnnnnnnnnnnnnnnnnnnnnnnnnnnnnnnnnnnnnnnnnnnnnnnnnnnnnnnnnnnnnnnnnnnnnnnnnnnnnnnnnnnnnnnnnnnnnnnnnnnnnnnnnnnnnnnnnnnnnnnnnnnnnnnnnnnnnnnnnnnnnnnnnnnnnnnnnnnnnnnnnnnnnnnnnnnnnnnnnnnnnnnnnnnnnnnnnnnnnnnnnnnnnnnnnnnnnnnnnnnnnnnnnnnnnnnnnnnnnnnnnnnnnnnnnnnnnnnnnnnnnnnnnnnnnnnnnnnnnnnnnnnnnnnnnnnnnnnnnnnnnnnnnnnnnnnnnnnnnnnnnnnnnnnnnnnnnnnnnnnnnnnnnnnnnnnnnnnnnnnnnnnnnnnnnnnnnnnnnnnnnnnnnnnnnnnnnnnnnnnnnnnnnnnnnnnnnnnnnnnnnnnnnnnnnnnnnnnnnnnnnnnnnnnnnnnnnnnnnnnnnnnnnnnnnnnnnnnnnnnnnnnnnnnnnnnnnnnnnnnnnnnnnnnnnnnnnnnnnnnnnnnnnnnnnnnnnnnnnnnnnnnnnnnnnnnnnnnnnnnnnnnnnnnnnnnnnnnnnnnnnnnnnnnnnnnnnnnnnnnnnnnnnnnnnnnnnnnnnnnnnnnnnnnnnnnnnnnnnnnnnnnnnnnnnnnnnnnnnnnnnnnnnnnnnnnnnnnnnnnnnnnnnnnnnnnnnnnnnnnnnnnnnnnnnnnnnnnnnnnnnnnnnnnnnnnnnnnnnnnnnnnnnnnnnnnnnnnnnnnnnnnnnnnnnnnnnnnnnnnnnnnnnnnnnnnnnnnnnnnnnnnnnnnnnnnnnnnnnnnnnnnnnnnnnnnnnnnnnnnnnnnnnnnnnnnnnnnnnnnnnnnnnnnnnnnnnnnnnnnnnnnnnnnnnnnnnnnnnnnnnnnnnnnnnnnnnnnnnnnnnnnnnnnnnnnnnnnnnnnnnnnnnnnnnnnnnnnnnnnnnnnnnnnnnnnnnnnnnnnnnnnnnnnnnnnnnnnnnnnnnnnnnnnnnnnnnnnnnnnnnnnnnnnnnnnnnnnnnnnnnnnnnnnnnnnnnnnnnnnnnnnnnnnnnnnnnnnnnnnnnnnnnnnnnnnnnnnnnnnnnnnnnnnnnnnnnnnnnnnnnnnnnnnnnnnnnnnnnnnnnnnnnnnnnnnnnnnnnnnnnnnnnnnnnnnnnnnnnnnnnnnnnnnnnnnnnnnnnnnnnnnnnnnnnnnnnnnnnnnnnnnnnnnnnnnnnnnnnnnnnnnnnnnnnnnnnnnnnnnnnnnnnnnnnnnnnnnnnnnnnnnnnnnnnnnnnnnnnnnnnnnnnnnnnnnnnnnnnnnnnnnnnnnnnnnnnnnnnnnnnnnnnnnnnnnnnnnnnnnnnnnnnnnnnnnnnnnnnnnnnnnnnnnnnnnnnnnnnnnnnnnnnnnnnnnnnnnnnnnnnnnnnnnnnnnnnnnnnnnnnnnnnnnnnnnnnnnnnnnnnnnnnnnnnnnnnnnnnnnnnnnnnnnnnnnnnnnnnnnnnnnnnnnnnnnnnnnnnnnnnnnnnnnnnnnnnnnnnnnnnnnnnnnnnnnnnnnnnnnnnnnnnnnnnnnnnnnnnnnnnnnnnnnnnnnnnnnnnnnnnnnnnnnnnnnnnnnnnnnnnnnnnnnnnnnnnnnnnnnnnnnnnnnnnnnnnnnnnnnnnnnnnnnnnnnnnnnnnnnnnnnnnnnnnnnnnnnnnnnnnnnnnnnnnnnnnnnnnnnnnnnnnnnnnnnnnnnnnnnnnnnnnnnnnnnnnnnnnnnnnnnnnnnnnnnnnnnnnnnnnnnnnnnnnnnnnnnnnnnnnnnnnnnnnnnnnnnnnnnnnnnnnnnnnnnnnnnnnnnnnnnnnnnnnnnnnnnnnnnnnnnnnnnnnnnnnnnnnnnnnnnnnnnnnnnnnnnnnnnnnnnnnnnnnnnnnnnnnnnnnnnnnnnnnnnnnnnnnnnnnnnnnnnnnnnnnnnnnnnnnnnnnnnnnnnnnnnnnnnnnnnnnnnnnnnnnnnnnnnnnnnnnnnnnnnnnnnnnnnnnnnnnnnnnnnnnnnnnnnnnnnnnnnnnnnnnnnnnnnnnnnnnnnnnnnnnnnnnnnnnnnnnnnnnnnnnnnnnnnnnnnnnnnnnnnnnnnnnnnnnnnnnnnnnnnnngaagaaggacttgttggctatcagtggaaagaaaggcccattggttgtgcagaccttatatgcctcagtacaggggaacgccagggccaaggtgtgggaaagggtggttgggggagtgggtgtggaagggtgtgtgtggggcttttgggataggattggaaatgtaaatgaaataaatacctaataatatatatatatatatatatatatatatatatatatatatatatatataaagaaagtgtgaataatgaaagcagagccttctaaactacacaggaagagcctgcttagtaagatgctggtacagggaactgatttaaagatggagttatttaaaaaaagggaagtataacttaaaaagttaaattgggaaatagtaagaagatctgtttgtgagtggccaagggtggtgatgtagctctttgatgaggacaagggagatggacataagctatctaacccaggatctgtggcctccaaaactgcgagaaacacatttctatcactcacaagctacttagtgatgatgctttgttatagcagccccacccagactaagagtttctgaagtcttcatcttcctcacactggagttacgatgacttaggtctttgaggacagttaaggatttgtaatgcaccctgagttgtgagaagatgaaacagtatttctgcaaatttgagggagctggaccttagaattcgggttgctgttcttaataattttgctttcggtgtgtctgataaacactttagtctcttcttttttatttctagagcttatttatttttattttatgggtatgagtgttttacctgtgtgtgtacacatgtatgtgtgtgtgcgtgtatgtattcatgtgtgttcatgtgtgtacctggtgctcctagagaccattagaacacactcaatccatcccctgaagctggacttacagactactaagccatcatgtggtgctaggaattcaacccaagtcctccagagacaggcagtgagagtgctctcaacaaccgagccctatttccggctaaactttttaggttttttttttttttaaagttatacataataagggaatttttggtcttaggagaactataggtgctatgtcagatatctaaagagaaagcaaattatccttcagtggagactgagcatcattgctccaaataagagagggttttggttgtagttgaagaggaaaaagcctgtgaatgatgtaaatagtgaactctcctccatggggtcctgcactaatgaaaggtctatgcccatccccagacacttatgcctgaaataacaccaccatagggggactcgcaggctttattttcttcagtatccatgcctagtcaccgagaggtacccattcacagtcacactgtctggtgtttcctttcgtggtttgatgacagtcgtataaattgactcatccagctattctgagggaagaaagcagttgtgtagagccagaagatctgtgatgccaaatacacacatttaaaaaaatggctttagctcaccattggtttgaatttagattttactgtgctagacacagtttagtattcaacagaggacacacactcaggaactgagctcagtgcactctacctctgtcagcttatgttgatgtttcttactgcctcatctctcagtaccattgtgcaagcctgaaagtgtttcttgccaggaagttgtctatgtgggttttccagttgtttcagcacaaagaattagtggatataaagtttcatctatgataaaagtaccttaaaatatactatatttctttctgatataaagatggttgtacccttggcaatgggcaaagagacaccttgtcggtagtgttttccttatattagggacagagcagaaggcagccattttctttttttttgatcctaggttgatacctggcttggtggcccaagctgtcttatgcgtaggactcacaaaattnnnnnnnnnnnnnnnnnnnnnnnnnnnnnnnnnnnnnnnnnnnnnnnnnnnnnnnnnnnnnnnnnnnnnnnnnnnnnnnnnnnnnnnnnnnnnnnnnnnnnnnnnnnnnnnnnnnnnnnnnnnnnnnnnnnnnnnnnnnnnnnnnnnnnnnnnnnnnnnnnnnnnnnnnnnnnnnnnnnnnnnnnnnnnnnnnnnnnnnnnnnnnnnnnnnnnnnnnnnnnnnnnnnnnnnnnnnnnnnnnnnnnnnnnnnnnnnnnnnnnnnnnnnnnnnnnnnnnnnnnnnnnnnnnnnnnnnnnnnnnnnnnnnnnnnnnnnnnnnnnnnnnnnnnnnnnnnnnnnnnnnnnnnnnnnnnnnnnnnnnnnnnnnnnnnnnnnnnnnnnnnnnnnnnnnnnnnnnnnnnnnnnnnnnnnnnnnnnnnnnnnnnnnnnnnnnnnnnnnnnnnnnnnnnnnnnnnnnnnnnnnnnnnnnnnnnnnnnnnnnnnnnnnnnnnnnnnnnnnnnnnnnnnnnnnnnnnnnnnnnnnnnnnnnnnnnnnnnnnnnnnnnnnnnnnnnnnnnnnnnnnnnnnnnnnnnnnnnnnnnnnnnnnnnnnnnnnnnnnnnnnnnnnnnnnnnnnnnnnnnnnnnnnnnnnnnnnnnnnnnnnnnnnnnnnnnnnnnnnnnnnnnnnnnnnnnnnnnnnnnnnnnnnnnnnnnnnnnnnnnnnnnnnnnnnnnnnnnnnnnnnnnnnnnnnnnnnnnnnnnnnnnnnnnnnnnnnnnnnnnnnnnnnnnnnnnnnnnnnnnnnnnnnnnnnnnnnnnnnnnnnnnnnnnnnnnnnnnnnnnnnnnnnnnnnnnnnnnnnnnnnnnnnnnnnnnnnnnnnnnnnnnnnnnnnnnnnnnnnnnnnnnnnnnnnnnnnnnnnnnnnnnnnnnnnnnnnnnnnnnnnnnnnnnnnnnnnnnnnnnnnnnnnnnnnnnnnnnnnnnnnnnnnnnnnnnnnnnnnnnnnnnnnnnnnnnnnnnnnnnnnnnnnnnnnnnnnnnnnnnnnnnnnnnnnnnnnnnnnnnnnnnnnnnnnnnnnnnnnnnnnnnnnnnnnnnnnnnnnnnnnnnnnnnnnnnnnnnnnnnnnnnnnnnnnnnnnnnnnnnnnnnnnnnnnnnnnnnnnnnnnnnnnnnnnnnnnnnnnnnnnnnnnnnnnnnnnnnnnnnnnnnnnnnnnnnnnnnnnnnnnnnnnnnnnnnnnnnnnnnnnnnnnnnnnnnnnnnnnnnnnnnnnnnnnnnnnnnnnnnnnnnnnnnnnnnnnnnnnnnnnnnnnnnnnnnnnnnnnnnngagcatacaatactgatggtatcacagaaaccaggatctcagaccagactgacaacaatcattgcaatgatcatttacaagtaaagatgtgtgggaaaagggatagactgtgggacacactgcgacacactacagcttccataaagagatgtttttatgctttattttgttgttgtttgtttatctgtgttagtttgattaggggtaggttgcaagggtggatacgaggggacggggagatgagccggactagggtgcgtgatgggaaactcacaaggaatcaataaaaagttaaaaaaactgttgtacaaaatcaagtcaaatgacattctcccacaacccccccccccgcccgtgttctgtagtgagaacgtctactgaccatgtagtgtttagtcatttagacttctaatctgtgttcacattctttttttttttccttttttttttaaaaattagatacagcctttattgactactatatgtgaccagttatcttacctcacagaatattttggagttaatatataaagatttagtttttatattcagtttttttttttttggttgattgatgattcaataatgcattcaaggagtcaaaattcttaaggtggtaagcaggatggcttcccatgggaaggtgccttgcctgttactcctaacacacagtcttctctctgggggcaactgctgccagttaccttctagacggaatgcatctagccatgcacctcagcacagaagcgagctatatatagcatcactgagcctgtaggaggaggagatcccagttacccagtctctgtcctcttacaacaacgaccccagcaaaggagcctctagctagtgactctgtgtctactccaaactgagagattcatcatcctagaggagtatatcatacctaagtctgcccgttttggtgcnnnnnnnnnnnnnnnnnnnnnnnnnnnnnnnnnnnnnnnnnnnnnnnnnnnnnnnnnnnnnnnnnnnnnnnnnnnnnnnnnnnnnnnnnnnnnnnnnnnnnnnnnnnnnnnnnnnnnnnnnnnnnnnnnnnnnnnnnnnnnnnnnnnnnnnnnnnnnnnnnnnnnnnnnnnnnnnnnnnnnnnnnnnnnnnnnnnnnnnnnnnnnnnnnnatcccaccttcgtggcgggctctgagcttgtttatttttctccctctagctttggagtctactttaattttgtctcagcctccccacctctcagttgtgcttatgaatctgtatgagaagatggtgacagtaccttccctctgcgttccgttctgggtgggatcctaaattctggattcccctctgccctggaagcggctctctgatgccttcagactgcttggttttctagctctctagtttcccttagtgtggtagctggtgttcataagctagtctgtcctaaccagaaataaaaataacatggaaatggaaagctagtcttctgtcagagcaccatggtcttctcagaggataataagtccacactaagcccatgtctctgggaggagcaaaggaccttgaatcctcaaagtcctcttgctgggatgccactagaaagcgtccttcctcaattgctttgtgccttaggccagatccttccttctggggtacccagtcactcgtgacaggaaatgaggaactctgttcacagcttctctgcctgttctcacattagagcccatcggtcactgaatcacgccttttgtagttccctgtggtttcgttctgttttgtttcaataaatttgttcactttgtctcagtcccaccgccttaccgtgggcccaactgtggtagctgtttgtgttattgaaaagactccactcccactccctgtgaaaacaaggaaaggtctttcaaaactgtgaacaggacccaagccttcagcattgtgtttaaatccaagagcagctctctgtggccctctgtctagcactgcctatattgtacacatggccttgcagcatctactgcagccaggctttttgtgctatgggtactgagagatctctctgcctctgctcaggggctgtccccttctggcctgtgactagaacaaaggatgaccttctaggtttgtttcctccacattaagaggaaattaggtttgtttcctccacattaagaggaagttgagttagaagatttccagttcagaggactttgtgattctgagccattggcttaaactgtagtatgtatcattgtaagaaccaggcttatgtctacagcaatctctgtactggtcgtaagcattgcatagcgtgagctgctctggtttgacttttgttgctgtgacaagaacaactctgaccaaaagtagctcagggatttacttacactcacagttcagattagggtccattccgtgggaagtccaggcaggaacttcacagcgagtgttttggtagcccatagagctttatctccaactgagaaattcatttcacaggcaaagaagcagacagaatgaagccagctcccaccccgctagcttcctacccatgtcaggatggcctcctgggatgggcttctcnnnnnnnnnnnnnnnnnnnnnnnnnnnnnnnnnnnnnnnnnnnnnnnnnnnnnnnnnnnnnnnnnnnnnnnnnnnnnnnnnnnnnnnnnnnnnnnnnnnnnnnnnnnnnnnnnnnnnnnnnnnnnnnnnnnnnnnnnnnnnnnnnnnnnnnnnnnnnnnnnnnnnnnnnnnnnnnnnnnnnnnnnnnnnnnnnnnnnnnnnnnnnnnnnnnnnnnnnnnnnnnnnnnnnnnnnnnnnnnnnnnnnnnnnnnnnnnnnnnnnnnnnnnnnnnnnnnnnnnnnnnnnnnnnnnnnnnnnnnnnnnnnnnnnnnnnnnnnnnnnnnnnnnnnnnnnnnnnnnnnnnnnnnnnnnnnnnnnnnnnnnnnnnnnnnnnnnnnnnnnnnnnnnnnnnnnnnnnnnnnnnnnnnnnnnnnnnnnnnnnnnnnnnnnnnnnnnnnnnnnnnnnnnnnnnnnnnnnnnnnnnnnnnnnnnnnnnnnnnnnnnnnnnnnnnnnnnnnnnnnnnnnnnnnnnnnnnnnnnnnnnnnnnnnnnnnnnnnnnnnnnnnnnnnnnnnnnnnnnnnnnnnnnnnnnnnnnnnnnnnnnnnnnnnnnnnnnnnnnnnnnnnnnnnnnnnnnnnnnnnnnnnnnnnnnnnnnnnnnnnnnnnnnnnnnnnnnnnnnnnnnnnnnnnnnnnnnnnnnnnnnnnnnnnnnnnnnnnnnnnnnnnnnnnnnnnnnnnnnnnnnnnnnnnnnnnnnnnnnnnnnnnnnnnnnnnnnnnnnnnnnnnnnnnnnnnnnnnnnnnnnnnnnnnnnnnnnnnnnnnnnnnnnnnnnnnnnnnnnnnnnnnnnnnnnnnnnnnnnnnnnnnnnnnnnnnnnnnnnnnnnnnnnnnnnnnnnnnnnnnnnnnnnnnnnnnnnnnnnnnnnnnnnnnnnnnnnnnnnnnnnnnnnnnnaaaatatgcttattgtgcacatataaatattctaaaattcaaatgaatctacagaccaagatacctctagtctaatgcagtttagatcatgaaaactcaatctacataaatatttggggtatggctgactaacaaaaattatatttacacgtttcttagattccataaggaatatgtaacttctcaactatgcatagctttatccagactgatgccagtacttggttctggttagaaaatcctgtcttgattttgccatctttcttcttttgagctagcaagagctgacagctatttaaataaaaattaaaaatagtacatgtcctgtttgttcctgccagaatgttaagtgaccatgaccacagaactgaaattgtgctctgtctctccctctgtccctccatccctccctcccattgttagtttgaatttaggttgccctgtgatagacagagtgtagtacttagcagacagaggacacactctcaggagctgagctcagtgcactctccctccatcagctcaggttgatcgtccttactctccttcatctcccaataccatctgcacaagcctggatgtgcttctggccaggaatgtgcctatgtgtttttccagttgtttctatacagagaattaatgcttagaaacattcgtctatgacaaatgtatcttaaaatgtgttatttttttctgatgtaacaaccaacagtcaagtaacattttttaatattctgtagtgagaacttcaattgcctactatatacaggtagggggtaaagagaccattgagatgacatggcatatctctgccctatatctatatcatctacatctatctaatatgctgtcaaatagaggaaagtgacaataaagaaattaagggatgtcctagatttctagatgtcaccacttctgtagcaaatatgcttttcttttcattacttgggaaagattttcaaataattcagaagttaaagtgtcaccagggtacatcattcacgtgtgagaatactccttatgaggtggctttgaccctatctacctttctgtgtggtcatcaccaatggaagaatttcagctcatggaaaatgactcaggaagagaataaagtgagaggcctcaggctgggtcactcaagtcttatcatcgggcctgacagactagaaatgctctggactgatgacctgggaatcggctttaagtgagccacatttgtacctaagcttggccatgcatgtggcttaccatgtataatgtacatggcatctgtttgccacctcagaactactcgtcaccacaactaatagcaggctaagtagaatttgctttgaacctcagtgtagccttctttcccagaaattctgtagcactctagagctcctctactcagcaaacctttattatcacccacgaaggacacagtgccactttaaagcagccctgcagaaacaaactggacacagcaagggtcaactagagttgcttgttccgagtgttggctatggggtgaagagactattgagatgtcagcagaagcagagatggggctcacagaagactaagtattcttcaggcaaggaggggtgactgttggagtgcttgagagagccagagtgagggaaagaaagtcccctctttaggggaatacggggatgagtcacttctagcttttatttaagcttctttgacaatgaagctgactggttctcagcagatctctagtcagaaaattctaacttctgcttactcctctggaatattcaccctctctcctggagcccggtgtttgtggaagccatgagtggggtgtttatgaaaaagctggaagctttgtgagcacatgccacatgtctaggagcaagaatgttcagcactgccaaggacaggcactggtaagggggcaccatgcccttcccttccacggtctcttggttatttctttcctaagacccacatttatagaacagtcatgttagccagtaggtgggtcagtttgtagtttatgacaaatggcatgctttgtggatatctgtcaaaatctagcagcaaactttcataattgtgaaacatatttacagtatattgtatttctagctgtctctggagggtctgaacaatctacataggcttctgggcagtttccttgtgcagcagagcactgtgtgatgtgtactgccagcaagaatcaaaccatttctccacacagctgtccaagacactcacatgctcttcttggcttccgtgttctgacagtccaggcagttagcaaatctgtaactgtggtctgcctcatgggctgagctccccgtcggtacttagagatgtgggtaatcctggtgtttcttctgagctgaaaatgcagtgttgtgcagaagaaacaccacaccaacagaccatacaaacagtaagcttcgcacacaagcttctagtgtaaccaagcaactgacacattagacagactttgccatcggcgtgcattctcggggaacttaggtcagtgcctaaaataaccctgctaattgtgaggggcacatgtgggatgaaattccagttagcagtctgggagctgagtgactgagcatttgaaaccttactgtcattacagttcactgcaagcctctaaagcagttaggcccacagctcttggcctgtccaggtacggaaagaaagtcatgtgtgtatattatattctctgtttgtaaagctggttaaccggtgacagccggttgaaaaccaaatcgacttgagtcacccgatctgggctttctctctgctgctttttgcttgttgtatggtggagtaattgcagagtggatggcttggccaaaggacaggaaactgcagcaacctgtttagggcactgccacacaccggacttcttcattcaggtaggctggggggtggtggggaactctttaaatggacagaagtcattgaaccattcattgaaccagagtcccaagtgtctctcccacacacagcataactgttttgatgggctctgtgttacactcccctagctaggcaatatgcttttttttaaaaaaaaaagtctccatagtgttgtcaagaacctacatctacatcctaggaggtaagggaggctgaggaatttgttcagcttgtaaaaaaatagtcttttgaagactggccttcctctcttgtgttttatttcccttattccagttgcaaaagaaaggcttggaatctgtgggagacgatggggaaaaggttaatgcccttcatttcagagcaagtggtgtttacacattaagaacagggcccagactgatgaaagtaattactgtgctttccatacacccccaccctgctgttggtcccatcagtgtaacatgcacactgctctgcttaccctaactgtgctgacctggcttatacattcaggttcgctttaactctcaagtgtctggcatgaaaacaggtatataaatactgtcaaagatacttcgaaacttttgatcaatgtgtgtgtgtatatatatcacattacatatatcgttttgtaactggtgtaatttagcatgtacttggacagctgatcacttttctagaatccactcaaagtgaatagcagtcaacacttagcttgatggaactttgttttgagaatttcatgcagtccaagcgggcttcaaactgtgtctgaagatgatggtgactttcaactacttgatccacttgtgtgtctccacnnnnnnnnnnnnnnnnnnnnnnnnnnnnnnnnnnnnnnnnnnnnnnnnnnnnnnnnnnnnnnnnnnnnnnnnnnnnnnnnnnnnnnnnnnnnnnnnnnnnnnnnnnnnnnnnnnnnnnnnnnnnnnnnnnnnnnnnnnnnnnnnnnnnnnnnnnnnnnnnnnnnnnnnnnnnnnnnnnnnnnnnnnnnnnnnnnnnnnnnnnnnnnnnnnnnnnnnnnnnnnnnnnnnnnnnnnnnnnnnnnnnnnnnnnnnnnnnnnnnnnnnnnnnnnnnnnnnnnnnnnnnnnnnnnnnnnnnnnnnnnnnnnnnnnnnnnnnnnnnnnnnnnnnnnnnnnnnnnnnnnnnnnnnnnnnnnnnnnnnnnnnnnnnnnnnnnnnnnnnnnnnnnnnnnnnnnnnnnnnnnnnnnnnnnnnnnnnnnnnnnnnnnnnnnnnnnnnnnnnnnnnnnnnnnnnnnnnnnnnnnnnnnnnnnnnnnnnnnnnnnnnnnnnnnnnnnnnnnnnnnnnnnnnnnnnnnnnnnnnnnnnnnnnnnnnnnnnnnnnnnnnnnnnnnnnnnnnnnnnnnnnnnnnnnnnnnnnnnnnnnnnnnnnnnnnnnnnnnnnnnnnnnnnnnnnnnnnnnnnnnnnnnnnnnnnnnnnnnnnnnnnnnnnnnnnnnnnnnnnnnnnnnnnnnnnnnnnnnnnnnnnnnnnnnnnnnnnnnnnnnnnnnnnnnnnnnnnnnnnnnnnnnnnnnnnnnnnnnnnnnnnnnnnnnnnnnnnnnnnnnnnnnnnnnnnnnnnnnnnnnnnnnnnnnnnnnnnnnnnnnnnnnnnnnnnnnnnnnnnnnnnnnnnnnnnnnnnnnnnnnnnnnnnnnnnnnnnnnnnnnnnnnnnnnnnnnnnnnnnnnnnnnnnnnnnnnnnnnnnnnnnnnnnnnnnnnnnnnnnnnnnnnnnnnnnnnnnnnnnnnnnnnnnnnnnnnnnnnnnnnnnnnnnnnnnnnnnnnnnnnnnnnnnnnnnnnnnnnnnnnnnnnnnnnnnnnnnnnnnnnnnnnnnnnnnnnnnnnnnnnnnnnnnnnnnnnnnnnnnnnnnnnnnnnnnnnnnnnnnnnnnnnnnnnnnnnnnnnnnnnnnnnnnnnnnnnnnnnnnnnnnnnnnnnnnnnnnnnnnnnnnnnnnnnnnnnnnnnnnnnnnnnnnnnnnnnnnnnnnnnnnnnnnnnnnnnnnnnnnnnnnnnnnnnnnnnnnnnnnnnnnnnnnnnnnnnnnnnnnnnnnnnnnnnnnnnnnnnnnnnnnnnnnnnnnnnnnnnnnnnnnnnnnnnnnnnnnnnnnnnnnnnnnnnnnnnnnnnnnnnnnnnnnnnnnnnnnnnnnnnnnnnnnnnnnnnnnnnnnnnnnnnnnnnnnnnnnnnnnnnnnnnnnnnnnnnnnnnnnnnnnnnnnnnnnnnnnnnnnnnnnnnnnnnnnnnnnnnnnnnnnnnnnnnnnnnnnnnnnnnnnnnnnnnnnnnnnnnnnnnnnnnnnnnnnnnnnnnnnnnnnnnnnnnnnnnnnnnnnnnnnnnnnnnnnnnnnnnnnnnnnnnnnnnnnnnnnnnnnnnnnnnnnnnnnnnnnnnnnnnnnnnnnnnnnnnnnnnnnnnnnnnnnnnnnnnnnnnnnnnnnnnnnnnnnnnnnnnnnnnnnnnnnnnnnnnnnnnnnnnnnnnnnnnnnnnnnnnnnnnnnnnnnnnnnnnnnnnnnnnnnnnnnnnnnnnnnnnnnnnnnnnnnnnnnnnnnnnnnnnnnnnnnnnnnnnnnnnnnnnnnnnnnnnnnnnnnnnnnnnnnnnnnnnnnnnnnnnnnnnnnnnnnnnnnnnnnnnnnnnnnnnnnnnnnnnnnnnnnnnnnnnnnnnnnnnnnnnnnnnnnnnnnnnnnnnnnnnnnnnnnnnnnnnnnnnnnnnnnnnnnnnnnnnnnnnnnnnnnnnnnnnnnnnnnnnnnnnnnnnnnnnnnnnnnnnnnnnnnnnnnnnnnnnnnnnnnnnnnnnnnnnnnnnnnnnnnnnnnnnnnnnnnnnnnnnnnnnnnnnnnnnnnnnnnnnnnnnnnnnnnnnnnnnnnnnnnnnnnnnnnnnnnnnnnnnnnnnnnnnnnnnnnnnnnnnnnnnnnnnnnnnnnnnnnnnnnnnnnnnnnnnnnnnnnnnnnnnnnnnnnnnnnnnnnnnnnnnnnnnnnnnnnnnnnnnnnnnnnnnnnnnnnnnnnnnnnnnnnnnnnnnnnnnnnnnnnnnnnnnnnnnnnnnnnnnnnnnnnnnnnnnnnnnnnnnnnnnnnnnnnnnnnnnnnnnnnnnnnnnnnnnnnnnnnnnnnnnnnnnnnnnnnnnnnnnnnnnnnnnnnnnnnnnnnnnnnnnnnnnnnnnnnnnnnnnnnnnnnnnnnnnnnnnnnnnnnnnnnnnnnnnnnnnnnnnnnnnnnnnnnnnnnnnnnnnnnnnnnnnnnnnnnnnnnnnnnnnnnnnnnnnnnnnnnnnnnnnnnnnnnnnnnnnnnnnnnnnnnnnnnnnnnnnnnnnnnnnnnnnnnnnnnnnnnnnnnnnnnnnnnnnnnnnnnnnnnnnnnnnnnnnnnnnnnnnnnnnnnnnnnnnnnnnnnnnnnnnnnnnnnnnnnnnnnnnnnnnnnnnnnnnnnnnnnnnnnnnnnnnnnnnnnnnnnnnnnnnnnnnnnnnnnnnnnnnnnnnnnnnnnnnnnnnnnnnnnnnnnnnnnnnnnnnnnnnnnnnnnnnnnnnnnnnnnnnnnnnnnnnnnnnnnnnnnnnnnnnnnnnnnnnnnnnnnnnnnnnnnnnnnnnnnnnnnnnnnnnnnnnnnnnnnnnnnnnnnnnnnnnnnnnnnnnnnnnnnnnnnnnnnnnnnnnnnnnnnnnnnnnnnnnnnnnnnnnnnnnnnnnnnnnnnnnnnnnnnnnnnnnnnnnnnnnnnnnnnnnnnnnnnnnnnnnnnnnnnnnnnnnnnnnnnnnnnnnnnnnnnnnnnnnnnnnnnnnnnnnnnnnnnnnnnnnnnnnnnnnnnnnnnnnnnnnnnnnnnnnnnnnnnnnnnnnnnnnnnnnnnnnnnnnnnnnnnnnnnnnnnnnnnnnnnnnnnnnnnnnnnnnnnnnnnnnnnnnnnnnnnnnnnnnnnnnnnnnnnnnnnnnnnnnnnnnnnnnnnnnnnnnnnnnnnnnnnnnnnnnnnnnnnnnnnnnnnnnnnnnnnnnnnnnnnnnnnnnnnnnnnnnnnnnnnnnnnnnnnnnnnnnnnnnnnnnnnnnnnnnnnnnnnnnnnnnnnnnnnnnnnnnnnnnnnnnnnnnnnnnnnnnnnnnnnnnnnnnnnnnnnnnnnnnnnnnnnnnnnnnnnnnnnnnnnnnnnnnnnnnnnnnnnnnnnnnnnnnnnnnnnnnnnnnnnnnnnnnnnnnnnnnnnnnnnnnnnnnnnnnnnnnnnnnnnnnnnnnnnnnnnnnnnnnnnnnnnnnnnnnnnnnnnnnnnnnnnnnnnnnnnnnnnnnnnnnnnnnnnnnnnnnnnnnnnnnnnnnnnnnnnnnnnnnnnnnnnnnnnnnnnnnnnnnnnnnnnnnnnnnnnnnnnnnnnnnnnnnnnnnnnnnnnnnnnnnnnnnnnnnnnnnnnnnnnnnnnnnnnnnnnnnnnnnnnnnnnnnnnnnnnnnnnnnnnnnnnnnnnnnnnnnnnnnnnnnnnnnnnnnnnnnnnnnnnnnnnnnnnnnnnnnnnnnnnnnnnnnnnnnnnnnnnnnnnnnnnnnnnnnnnnnnnnnnnnnnnnnnnnnnnnnnnnnnnnnnnnnnnnnnnnnnnnnnnnnnnnnnnnnnnnnnnnnnnnnnnnnnnnnnnnnnnnnnnnnnnnnnnnnnnnnnnnnnnnnnnnnnnnnnnnnnnnnnnnnnnnnnnnnnnnnnnnnnnnnnnnnnnnnnnnnnnnnnnnnnnnnnnnnnnnnnnnnnnnnnnnnnnnnnnnnnnnnnnnnnnnnnnnnnnnnnnnnnnnnnnnnnnnnnnnnnnnnnnnnnnnnnnnnnnnnnnnnnnnnnnnnnnnnnnnnnnnnnnnnnnnnnnnnnnnnnnnnnnnnnnnnnnnnnnnnnnnnnnnnnnnnnnnnnnnnnnnnnnnnnnnnnnnnnnnnnnnnnnnnnnnnnnnnnnnnnnnnnnnnnnnnnnnnnnnnnnnnncattggaaatgtcattgaggaaaatacgtaataaagaaaaaaaaaagaaaaaaaagacgttagttagtaggagtctaaggccatataggaagtaactagtagggattttaatgccatttaggagggagttgttggttaaataattttatacatcttccttcttttttgcctttctcttgtcaaagtattttggaatatcttaagtcaacatagtttggaaaggtaagagtcttctaaaactgctcactttattattccgaatagtctatgtgtagattgtgtattcatctgtatgttaaagcataggtctatttgggcttggtggcatttcctatattaccaacatttagaaggctgaggcagaaagattgctgcaaattcaagaccaactgggttctatatccagttcctcataagtctgaatacagaacaacccaggatgggaagattcttcaggaataatatttggtggaaaatcaatacaaaggggtctattctgtatgcttatatttccattaagaccaaacaggaaagcttgtattgtttgatttaggagtggataccaagtagctgaaatgactaccaagaaggaaagaaggaatggttataataattaatagtcttgctcttttccagccagaggggcttgtgggagggttcacattcttcatcagagtggtagtccacattgttcattgtacaattatgtgttgtgattggatttttggtttatgaacttctagatgggtaatccgtattttaaaacacaaagtctagcactcatgagaaaaaaagaacaacaaaaggaaagaaggaagtctgactgcattcacttgcttgtcttgttactgtttgacttacgttggtttgtttattttttcatgatggagatcacctaagcctcatgaatgcatggctagccctgcaccactgttctcctgttccctaggacctcatgcatgcacggctagccttgcaccactgttctcctgtcctctaggacctcatgcatgcacggctagccctgcaccattgagctcctgttccatttcttgcttcaatgtttagatgactaaatttttatttgatttttttttacctttacatagacagtttctataaatttctcctgttcagaagatgaatatatatggtggataataaaagctttgatactgatgttcacagaagcatttattaacaaaattgacatgccattaataatatgaatgagatatatctattaactttgtcatttttgacaacctctatatttgagatactattagttgttatttattgtcatttatcatatcatatttaattatcattataaatactaaaaataacattgactattaccaggtctcatgtttaatttttttaagcattaatcacttcttaactgaaacagagattggatgcaatattcatgttacatggtctttaatgtgtgatgtttcaccatagtagctggctcagaccaaatatctataattaaaggtaacttggcttagtaagtactcgtgtacctgagtaagaaacataaacctttttatttattttttatttttttacaaaacataatctatttagtgtttttgtttttgttgttgttaggttttgtttgttttctagacaagatttctctgtttaacagagccctggttgtcttagactttgtagaccaggctggcctcaaactaagagatcctccttcttctgcctcctgagtgctgagattaaaggtgtgcatcaccaagcctgcttactcattatttttaaaagtttagttaatatgtacaaaatgtatctgaggctcatgctttgtttcctttttcttccttttctaaagattatcattatgtttcactcacttagactaagcctttattttcaataaaagagataagaagagggaagaaaaactgacatgtttgaacattagcttgaaccatggaactgttaacaagaaatagaagcaattgttagcagtgatcttgttagcaaaagatgccaatgagcttcgtggagaagtaggctcccacaatcccatgcacgacttgttcatttggcagactgctatacagaaaatagttagtacgatgctatttatatgaaaatgaatattgtaatgtatctgcaggatttttattgcaaagacagagggaaatacaacagtcagactgaactcaccaactgctccttacaccactctaacactaagcctgtgtccccagagttcagcatttgcctctggatgtacagtgccagaggggacagatgtgtccacacaacacatctggtcagggttggtgtggtattgttggaacatgtactaggtagaatgatgaagattctggcatctatctcccctgagcaggactttaggggattttggaagaatactccatcaggaagacccagcactctcagctggcgtcattttaccttttctccttttccttgctggttttgtcaatggtttccatactctacaggcataatgaatgtagccacagtcctgtgataacacactctcccctcaactcctttaccaaagtttaggattgacaaatcccttttctttatcttaaagagcagatgtgtactcaggattttgagtggactcctgaaggagcaaagattgagtcaacagcctggtcctgcaagggtctattgctgtggcactctgtagcaccgaacgagctctgttttacacgctgattcaaagacttagatttccatgcttggcagagctacccaattaaaatataataatgagctccaaatgcaaacccaatatgtgattttaaatttccaagtagcaacattttaaaagcaaaaataaataggtaaaattaattttaacagttttttaaaatctttttttttccaaaatactgtcattttaatatgtaattaaggggagggagaaaaaatggctcagaggtcatgagaactggctgcttttctagaagatctgggcttaattcctaatgcccacatgatgtctcataaccatgtataactatagttctatgggacctgatgccctcttctggctccacaggcaccaggtacacagacatatatgcaggcaaaacactcatacgcataagataacataaaagtaaaaattaatataatggatttaaaatgaccattaagctattttaagcatatttgttcatgtgaaatattaagtacagtatgtgttttacatgtatactctacacaccctggtctaggtaccggtgaagtgcgcccatattggatagcgccaatctggaggctcatttctaagcccttaggattctttttgtttttctggattttctgagtgtaggcagcacaccaggaaggcaggtcattgagcaccccagaatgatgttcagggattaggtctgatattgaagtgtatcatcccgcacacattctgctggccactactcacgcagacatagtgagtgccccgcctagggcactaggggaatgcagatgagcccagcagaaagtaggtttgttgaatgcataggaaagtcttcaccgcagcagttcccatattttacaatccaggaaactatgtcctagcagagtacatgatgggctagttaatgggataatgtgagcagactgcgcaccctccctctctcgggtgatgtttcttccgtgaggccggctcctctcttcctttgtttcttccttatccctccctttattctacccatgcagatgcagttcctgcagtaagtccaatgtcttcaatatttcattgcattggctcttgcttaatgactgtatcctattactgccgttttagcggatgacagacagcctaggataaggcagcaaatgtgctccgtccgtaagtggtccaactatcagaagcatggtaagccactgcattgtcatcttgagtggacctccttctccgtgcggaaactcctcattcacaggatgaggactattaaggttgccatcaagcatctcaatcaatgaataaattgcatcttacgttctaatgatcggtctgttcgattgaaggctttgctttttaaaagtgcttggaagactaactaacaagggtgctttcagccgtgacattattgaagtgcttaggtagactgctctgtttcataggttgaagatgcttcagtcagagaaatgaagtagtgttccttaaaggaagtgcatggcaaaaggtgctggcgcctcgccgatttctaattagaacactagaaaccaccaagttgctttcactgaggaaaatggagttatagtatgactattcagctgtaatttggccacatcaaaattggtttggtgttttgttgttgcttaatatttttagatttaaaatatattcataagtgtgaaataaaaaaagaaatgatacagggaatttttaatcttccagtgtgccagtcggacctttggctagtttcttttcccagtaaacgcctataaggtggtacttagccctgttgcttatgagtccttctagagtttgtattgccatatagtaacacggattattgtttttctctcattttattttgtatgtactgctttaaaactgacttccctttccccacttaaacaggttttattaaacgtcaaagccaaagtgcaacactgtcttaacacaaaaaggttgcaaagtgttcgcagtattgattgttatatatccatacagctaaaaccattcctttgatcatataataatgtatgtaatttccatgattaaaagtaccctatacataataaccataagttatattattttaaactattatattatactttttatctctttctatttcacactagtttattataattttaaaatatgaccttgtattataaaaatcaaagtttaaaatatttctagaaagacatatatttccaaaattaagcctctagttttgtgctttctgtggaatgctattttacaaatttaggtggggaagcatcctttagtatctccttgtaggatagtagttctcaaccttcccagcactgccactcttcacacagtttctcatgctgtggtgactctcaactataaaattattctattattacttcaaaagtgtaattgtgctactgttttgaattgtaacataaatgtctaatatgtgacccacaaaggggtcacaacccacaggttgagaaacacttttctaagcgttattaaaagtaatattatataaaatagaaatattttgtaaaacacaaataaatacacaaaggaaaatttaaagtatgaaacacatattagggaagagagctcctagatagttattttttaatttttgtgattataattacaccccttcctcctccaaaatcctgccatgtacccttctttattctttttctcattcatggcctctttttaattaactgttcttgcagatggacatatatacatatatattcctagatataacacactctgctttctaaacttatcatgaagaagttgctaatttttaaaaaagaattatttatttttttatgtatatgagtgcactgtcactgtcttcagacacaccagaagagggtatcggaccccattacagatggttgtgagccaccatgtggttgctggaaattgaactcaggacctctggaagagcagtcagtgctcttaaccactgagccatctttccagcccaagagattgctatttcatagcataaaaagttttcttaccatcattatttttatctatatgctattcaaataaatatatcatgttaatgtacatttagtatattaccaatatttgaacattataaactannnnnnnnnnnnnnnnnnnncataaaaagttttcttaccatcattatttttatctatatgctattcaaataaatatatcatgttaatgtacatttagtatattaccaatatttgaacattataaactatgttcccacaatagacttgcatataagaaaattcacaaaaagtataaatatattgaacccttaaagtctcagaagtagaattgctattcagtacatatatgcatttgaaacttaacagaagcagccaaattgtattcaatctgttaaactaatttgctatctgatgtggactggactcagttgatctctcaactcacaggagaatcagggtcccagtactcaggtgggcaaggagtcagcagaaaaatgacaaacagacaatgacacagagagagtgctgtatctgaatgtaatttctcaaagtgagcatcagacttataatacagaagaaaaacaaggaagttaggtgatacatcagccaaggtacattgagatgcataatggctctttacacaaaacagagaaaatgcatacgtaaaagctgacaggaaccaggcagtgtttacaactgagattagatcagctctatctaaaattagctattcacaggagccaggcaaaagggctaatacgcccaggtgcaattctggtctattgtttgacccaccactaggggtcccttagtaaatacctaattatgctattcctctgggcctcgagaaagccatgcaccagagaagttccattctactaacccttacatgaactatacaatattctagttcctccttaaaccacaacccatgttctttctactattatgtaatgtaggctttctattattatgtaatgtgttatgtatgcaatgtctgtaatgagaattttaagttactttgttgaactagccctgagatttctagctcctgtccggcaaataggaatgcctgatttctaactatcaacactggaggcattttgactgaatgagtagcattacctataatataacactgactatcacaaggacaaatctggagcattcgtgctattgggatgccaaaactccaggagaaaagtttccgtgaaactttttgccttggggctgcgtccaagcttcactggagtgggtgtggcagctatccaactgtaagtgttgatctatccccatttcctgtacctttggcaataatttccatgatagccaaatctctttcttttaatggctctagattttgagtctagtctagtctttcctatgtagtttttctaaatcatattcacatatcttttattttttatttaaaatttttttggtccattgggactttataaggtgtatattaaatccaacttaatttatcagttgccatgtttcccccattgacttgagatgtcacattgcaaatccccacatgtgtttgaatacacttctagattcaccctgtattctgtattagcatcagtctggattcccgaagcttattctaacatttgctaagctgccttactggcctccttgctaactggactcttctctttcagatttccctggcaattctttattgttcattttatattaaaattgaacaatttcctattcttacctttactgtctacctaaaagaaaaactgctattatctgagttgaagtttatgacattgcttagggaaaaatagtttctgccctgacttccttcagtgatgaactatcactgtagttaagccagataaccctttccttcccaagttgttttattcatggtgtctcatcacagcagtagtgatcctgactaggatgcctggcacaggaggtcaggtgtactgggaaaaagaagccagctcaggttttgttgctcttccagatgggagcagggtgactggagttaaatgggacagacactcacagtaagtttttgttaattctttattgaccatcagcaattattctaggttctaggatctaatagaaatcaagacaggcagaaaaggctatttttagagaacatatattctaacaaaggaaaaggtagaatttgatttgccaacagtatatttgtgcctttaagagaatggaaaggggagggaggaggctcggttggtaaagtgcctgcctcatgaacagaatgacccggatgttaatctctagaacccagtaaaaaaaagttgatatgatagcatacacttgtattcctagtgcagaggaggtagaggcgggcagggtccctaaggcttgcacttaagaggtatagacttatacaccttcacacacacacacacacacacagagagagagagagagagagagagagagagagagagagagagacagagagagacagagagagacagagacagagagacagagagagagagagagacagacagacagacagagacagagagagagtgacagagagacagagacagaaagatagagagagacagagacagaaacagacacagagagatatgaaaagacaataaagagaaccagcaagatggctcagtgggtaaagaggtttgatttgcaagcctgatgacctgagttcagctcctggaacccacgtgaggtaggagagaactgactccacaaggctgtcctctgaccctgcacacatgttgctgtgtgtgccaccccctccccatacatgcacaatagtagtaacaaagtcttacaaattctcaagaagagaatgaaaggtcaattatccagcaacaaggaattggctaataaatagtgtatgttactctgccctaggaattatgaatgatgttaattgacacaaaggaatattcatgatatgctatcgaataaaagcagcacaattctggaatacagtatagtgtatacagaatgtggaatacatctgtacgaaggggcaaatgattagagacttacctagcttctccttattcagtgactaccgggagcttttctataccaggcagttttgtttggtggtaggtagacatgatccctgattcatttttttaaattttattttacccatattagcattttatcttcatgtaatgtctgtacaacacacatgtgcctggtatatgtcagatatggaatctggaggccttgggactagagtcactgacgcctgctagcttccctgtcagagctggggactgaatcttgtgccactgctcctaaccactgactcttctctgccccctgattaaattttgtctgaccttttcaaactttttttttacaatgatcttgatgttatttttgttgaaaaacaattaaatttagaattccatccgccctgggccatttatgtgatataaatttgttttctgaatcatcattgactatacaaatggaatgagagacacacagttaaaaatggcagtcctttcctatgcccagtccagatcttatgcaagggaggaggtggcccaggacaccagtttccaaagtggccagaactggattctgcttggcacagaagcaagtagcatcctgttgctgggactttgtatctttggctgtttatagctagcggttcaaggaggccggccattctagcctggtgtcagtttacatctgctgtatgttacttgannnnnnnnnnnnnnnnnnnnttattttttaatttttgtgattataattacaccccttcctcctccaaaatcctgccatgtacccctctttgttctttttctcattcatggcctctttttaattaactgttcttgcagatggacatatatacatatatattcctagatataacacactctgctttctaaacttatcatgaagaagttgctaatttttaaaaaagaattatttatttttttatgtatatgagtgcactgtcactgtcttcagacacaccagaagagggtatcggaccccattacagatggttgtgagccaccatgtggttgctggaaattgaactcaggacctctggaagagcagtcagtgctcttaaccactgagccatctttccagcccaagagattgctatttcatagcataaaaagttttcttaccatcattatttttatctatatgctattcaaataaatatatcatgttaatgtacatttagtatattaccaatatttgaacattataaactatgttcccataatagacttgcatgtaagaaatttcacaaaaagtataaatatattgaacccttaaagtctcagaagtagaattgctattcagtacatatatgcatttgaaacttaacagaagcagccaaattgtatccaatttgttaaactaatttgctatctgctgtggactggactcagttgatctctcaactcgcaggagaatcagggtcccggtactcaggtgggcaaggagtcagcagaaaaatgacaaacagacactgacacagagtagtcagtatctgacacagagtagtgctgtatcagaatgtaatttctcaaagcgagcatcagacttataatacagaagaaaaacaaggaatctaggtgatacatcagccaaggtacactgagatgcataattgctctttacacaaaacatagaaaatgcatacgtaaaagctgacaggaaccaggcagtgtttacaactgagattagatcagctctatctaaaattagcaattcacaggagccaggtgaaaggtctaatacacccaggtgcaattctggtctattgtttgacccaccaccaggggtcccttagtaaatactctaattatgctattcctctgggcctagagaaagccatgcaccagagaagttccattctactaacccttacatgaactatacaatattctagttcctccttaaaccacaacccacgttctttctactattatgtaatgtaggctttctattattatgtattgtattatgtatgtaatgtctgtaatgagaattttaagttactttgttgaactagccctgaggtttctagctcctatccagcaaacagcaatgcctgatttctatcaacactggaggcattttgtctgaatgagtagcattacctataatataacaccgactatcacaaggacaaatctggagcattcgtgctatgggatgccaaaggtccaggagaaaagtttccgtgaaactttttgccttggggctgcgtccaagcttcactgaggtgggtgtggcagctatccaactgtaagtgttgatctatccccatttcctgtacctttggcaataatttccatgatagccaaatctctttcttttaatggctctagattttgagtctagtctagtctttcctatgtagcttttctaaatcatattcacacatcagagagagagagagtgacatacagagacagaaagatagagaaagacaggcagagacagacagagatagatatgaaaagataataaagagaaccagaaagatggctcagtgagtaaagaggtttaatttgcaagcctgatgacctgagttcagctcctggaacccacgtgaggtaggagagaactgactccacaaggctgtcctctgaccctgcacatatgttgttgtgtgtgccaccccctccccatacatgcacaatagtagtaacaaagtcttacaaattctcaagaagagaatgaaaggtcaattatccagcaacaaggaattggctaataaatagtatatgttactctgccctaggaattatgaatgatgttaattgacacgaaggaatatccatgatatgctatcaaataaaagcagcacaattctggaatacagtatagtgtatacagaatgtggaatacatctgtacgaagaggcaaatgattagagacttacccagctactccttattcagtgactaccgggggcttttctataccaggcagttttgtttggtggtagatagacaagatccctgattcattttttaaaattttattttacctatattagcattttacctttatgtctgtacaacacacaggtgcctggtatatgtcagatatggaatctggatgccttgggactagagtcactgacgcctgctagcttccctgtcagagctggggactgaaccttgtgccactgctcctaaccactgactcttctctgccccctgattaaattttgtctgaccttttcaaacttttttttttaaacaatgatcttgatgttatttttgttgaaaaacaattaaatttagaattccatgtgccctgggccatttatgtgatataaatttgttttctgaatcatcattaactatacaaatggaatgagagacacacagttaaaaatggcagtcctttcctatgcccagtccagatcttatgcaagggaggaggtggcccaggacaccagtttctaaagtggccagaactggattctgcttggcacagaagcaagtagcatcctgttgctgggactttgtatctttggctgtttatagctagcggttcaaggaggccggccattctagcctggtgtcagtttacatctgctgtatgttacttgaccctttttatgttcctgttgaagttgcctctccccggaaatctctgtcattccattaaccccgctgccgcctctgcacgcagctgacctcctgcgttggaaaacagaatgtattctggttacattttaaagtaagttttgggatgagttcctggccaaggatttgactctagttatctgttcccacagactaaaggggaggggcttaacaaagcctctgtgttgttctctgtctctgtgcttccgacctcctgaactgggtcagcctttcctgtaatgtattcatgatcctctcctggtctttcaatgctggatctttgtatatatgctgaagaacaaacaagcaagcaaaatccatcattttctattttttttttaaaatactccatgcttcttataaatcataatataaaaataaatgcatactgatacaaaagccaaaccggaacaacagaaaatggcccacatacaatccctttccctgtgaataaacgagtgtattttctttatctttttggctcatgggattgcctcagcttttgttctaacatttatatagcctgtttaataaatctcaaactctatctggaccaatctttttaagctatgaagaatggatactatcaaaaaaactttaccttttctcatatcatgaaatgtcacaatgccagtttcaggaaagcactggtcagcctcagttcaaggaaactgctgatcaagtggccaataaaatcaattatcagtggacgaatcccaggaggcattttagtactgagagctcctagggtcattgatggctctgacattagtgacctatgggaggaagaagggaaaaggtccctctgggccacatcactctgagctgttctctcccagcctgggagggagatggcctgtgacctttgtgtgatcttcatggaagccctcctcccggatgcactgtaagcagacagacaggcaagaaacacagacacatggggtcctctttcaccagcaacacctaggttttctgtaggtttcttcttgtcatcactgctctctctggttagctgatccttttcagcctagatctccccacacttaaggtttctctcagcctttgcctctgccttctaggtagtctggattatttgcacaaagacataaggcagttctgaagatgtgatcttttctggaccatcttctatgttttccttggtatgcagaaattatttaagcgctatatccttatgtctactgatgtccctggtgtctaattcctctaccaaacctttctttcaactttcacaattccaagggcgtgcttctagtgccaggactgtcacctttctgttctttgcccccatgttccctccgccttaaaaaacattagttgtgctctctatctggaagtcagctggcatatcccactttgcttcagaagtagctaaagtctaacttacagataaataatggaagttgttttgccttgtgaccctctcgacagggcttttcttacccatgttcccagcatcccctgctaagttgcccttttcattttgtgtccttaattttattatgtctgtttcctgtcagtacacttgcacacatctgaattttcaccagaccatcacaaaatggtttctgtctacagtgaattaagagtgggctgagcacatggtttagggcacaagggggcagagtgtattaatcatgaatgaaatattgaatgaatctaggttcagatgttgtccgagctagctcagacctcatttatcgatcctgccacttcttttgtatgtattctgaaaccccacccatggtttgaaaggaacagaattctctgtgtataattagggagaagaaagctcttcactaggtttatagtcaatctaaataagcaatgggttttcaaatgacattttagataaaattaacctagatatataaaaagtacattgcaactgactttgtcacttagcttgtaacagatttcaaaagcaaagaataagatcctttgaggaggttgaatcgctgttacaggattatttgaatagacctcatcctccattttggcgggtcattggagtattaataatggatggctgctgtgcttggcagtcagatatgttattcttatccatttttatttcccaaaggagcctctggaaaagggcaaagagggtagatttaaaaccacattattggaattcaatacctttcatcttgttttgtatgtctagggtttgttgaagagtggtactaatatggagagtcagccaagcatggggcaggcggaataccaaaatggattttcttaagtaaaatataagttggattctgtgttttaatttaggtctcaatgaccaacactaacatttccagaaaagattccaaatgtgtgtttgtgtattttgatcattttgattttcatcgggtaaaggaatggacaaaaatctaccaaggcagattatttaggctaatgaaaataaataaaaaattacataggtaaattacaaaaataaaaacaaataaaaattatgtaagtcaattataaagtataaatgtgctaattcttaaaaaaagctatgacaaactgaagttttagtcatgtaaagtgaaccactgaaggaatactaagttctcacatgcctttgtccttcctgtgatcacacaaaagcccaagaggggatgaattcgaatcctagaatgctagagtgtcatgatcactctgtcaagccttggaatccatcctcagaaaagtgttctctcttggggttttatctgaaaacagaaaagaagctggctccctatccagccacacccaaaggggacaagtggggcttccattatgcactccttttatagagctcttgcaacttacttttttttctcagttaaaatatatcttgaccatcagatggcattaaatgtactttggcacattgtctatatatttagtggttctcaagctgggccccaagccctttgggtcctgcatatcagatatttacattatgattcgcaacactagcaaaattacagctatgaagtagcaatgaagtagttttatggttggggatcaccacgatgtgagaaaccatattaaacgatcgcagcattaggaaggttgagaattgatgctctacggcaatattgtatttatcaacttggatgttatcatggtttatagtgatagagaaaaaattaacaactcaaggaccaaaagagaggtgtactggacctgttgatagatccacaggttgagaactgctgtcctagaggaaattcctaggaatgaattactacatcactagagataatggaaaatttccaaaaggctaactgaggcttactttctaaccattcctatgtgaaagagagactgacattatagagtctggagtgactattttctcacatataaggtcctaaccatggcctctaaaattagctcctcatagatctctgatccttcaagggttcatttcctgttctaggctctcaaaaaaaatctcttaaaagcctgtgtccattgtatcagttcccagtaggcatgtcgtgggtgtatagaaaccaaccgcacagctagttgctgtagatatctgtgtggaggaggaagacacagaaacacatctttagaagttgtgccacggccttagtggtctaaatatataaagcacatctaaaacaaggctggcttggccaaggttatgacttgagtcagcaaagacatcccaaagagaattttcatcttttttatttctttttttagacagaagaatttatgcataagtctagagcttgcatttataaatgaatctttataactagaaacactactaagggccttttaagagagttgacaggaactttccaagtcaagtaagacaaatataaataattaataggtattgataacctccctccccacaagagaaatctgaaatgcttgcagtgagggtgagtgacacagtcagatagacaggggcctcctaagaataggtgtatttgtgttgctaatgcagagaacttgagggtggagtaatgtctctgaactcaccaggccagccaaaggcaaacaacccaaatgggacattaactccagggtggtgcactgcacttttggcccttattctgaatggactgtagatccttcccctccaactgctgctctgaacctacattgttaacctaccaagtgagctgttgaaggggccatcacagtgtgtcccctacagagatgacccatgttcattattggatggctctaagctgtaaacagtcacagccccatggccttgcattgctgagaataaacgatcacctctcaaacctcgggtgccaggtcttctgtgttgctgattactgccttcgtcctattgcttattctatgagagtctatgaaggctcagtggctacagaggcaggaaacttctcagggtacgcctatgaccaagtgacttctttcctggatggttgttgatcatgtggttcttgtcacatttcattgaaggattttgaggggctggagagatggctcagcagttaagagcactgactgctcttccagaggccttcagttcaattcccagcaactacatggtggcttacaaccatctgtaatggggtctggtgccctcttctggtgtgtctggagacagtgacaatgtacttacatacataaaataaaaaaataaaaaaataaatctttaaaaagagaaggattttgaaggtaataatgaaacttatgaaacctgaaagttttattaagttatgtagattgtgactctacagtgcaagttatttaatctcaaagcctcgatgaaattgcctaatgacacattgcttagcatcaacatctctgttgttgaatggtgcatgtaaaaacagaggagaaaaatagaggtatatcagaaaaagttacaagttctcctagaaattatctcctagaaatttcagtactgacaaataaaattgcaacaaattgttttctggggcatgaaaacaaaggatgagagttctctgggtacctctgggtgatgttagtagtgggttatctttcccaattctaggtgtctttgtttctatagctgtagcagcaggtgtatacaaggtgtctgcttcagcgtcagtcagcccagacgggtgacatatggctctatgctttcttgcgagcggcatggagaacaccagcttcgtggctgccagtgtgtaagaaaatgtacggccttcctcttgcttctcagccctcttctcataaacacaaaagaggattcatcagcccaagcctatcaatgtggatgcacctcaaagagtaacaaactagcccttatttttaagggtggtccctcgggtttgtgaagtatcatatcttcttcaggtgatttggactctgcaaacatcttttggacattgttcatctgtgtggcagggtcctgttggtgtgaacagacccaaagacacatagagcaggtttcctgcctctgggaagacaggctggtcagggaactgtgtgagttggagctaattataacagtaacatcctttccaggggcgattttattgctgtcatcatattcatgtaattctaccagtaaaaatgataatcattgtatgcagatttataccctgttagtcataaatgccacctaccatccttcctccctatgtccgttatagttgttctcagtgacgaagaaaaaagtagacactagaaagagtgtttggtagaaaaaaagaaggctccagccacatatgtagcagaggatggccttattggacatcaatgggaggagaggcccttggtcctgtgaaggttctatgcctcagtataggggaatgccagggtgtggaagctggagtgggtgggttggtgagcagtgggaagaggaacgggatagggggttttcggaggggaaaccaggaaaggggataacatttgaaatgtaaataaagaacacatctttaaaaaagaaagaaagaaaaaggaaagtgatttatattcctggtttggaagacttttttttttttttaaagatggctgcgtctctaaggtcactagctacatggaagactaagtcgagtgagtactgggcaacataaacgtaatgtcgtccacgtctttttgtcctgccagtgatcctgaaggtcacagggatggctgtatggtgagaggagagtatcactttcctgtgttagtacaaccagctctgaggggaaatatcgtatgtgtcaatacgtttgaagattcactgtccgcttccgctcacttctgaggccgccctctttatcctctgtactctccagaacacagtgtaggagctctgaaccagttagccaaagaagtcgctgctggtactcacgttgtcatgaccttaagggctctgctttctctttctgcctaggcctgaaaggattgtgtgaccaaaaaaacccaaacttctatgtttattttttgctgtgacgatggacttttactatttttaactgattagatagcagaagttacttccttggttcattgtcctgcaagttttgaactgtctttttataattatgggttgaactggggacagtttgagtatctttttaaaacattgttgttcaaagggtatttttaaaccatccccagtttgttatttttagagacatctgttaatctaatcatctgagcgagcctgctggacaacaacttctctcatagggaaaggtttaaatgaatgaaatccacataggaccaagggagattttaaaccaagaaagcaatgggtaatattgaaaagtaaacctgaattgttttatctatgagaattacttttttagttgtcagtttgtgaaagtgaagttgataatgttttcagtcacaagttaattggtagccactaactataaagagaactatgagatgtgcctaccatttagttaagaagaacatgcacagaaagaaacgagtcttctgggattgaagctagcttgctacattctgttagtgataaaaattgtcaagacgtaggaaagagtgtcctgttgtgaaatgatatcataagaagtgaggtgcagcagctcatttatctctagatacacgatagtggcacatgataactttccaggcaaacgtctaaaggcttgtcttgatcacgtcaacaaattttctgtattcttctacctttacaatcccaaggtcctctctgttcctagacatggctaccaagggataggaggtgtattaaaggcaacgtctgaatctgaagccttgaacctgtgtaggttagtagatcttttattatcttatccttctaggggatcattcatgtcaaggtcccattgttccaaggtgaaatacttggaaatataagagcggaatctggaagtcagataacaaaggtctacaccagggaagaggctgaaacaagcagaaatgcaagtaagactccgctgcaagtagggaccacagggctatgtcagcctaagggcatgaggatgcccagactcagccttccctgctgaagaatgtcatgctggtgtgctctatggtatcctgtgtgggtgggatggaatctgtcttttacacatattttcttcagtatcttcatccatcttctaacctttccacctctaaattcagtttcctgccaaccagcacttttctctctctcaaaacagaaaatagcttgaaattaaacagtatttgttgggttactataattccctatgaatctttgctcctatctgagcttaattaatcattgtcatgctaagtgtttaaaaattctacctgtggcatgaaatattgtgtctcccattaatactctcagtggcaaataaaaatattttgtgtgtttgttcttaagatggatgagtgcatagataaaaagctgatcgagaaaggattgtttgtatcctaaaaaaggattttcttatttcttatttagttttctctgggtagcaaatgtgtatctaccaagcggtttagtcatgagagttgaaaccagtttctagttgccatctgcttcagtcacatgggcagttgagtctagactcatttcctacatgcatcagttaggctggccaagcgccccagactgtgcttccaattcaccttgttaaagacattcctacagggcctccaacaggtcagttctcctggagcttttaaaatacaaacagttcctgcagggaggcagtcattcagctaattactttttgaagtctctaatcccctagattcgactgcattaaattagcaggctacccacaaccttcagcttcttttatataaatttccagcaaacaggcaattgctaagaagctaagtattagatctctagactaattattctgtaaatagttgtttaatatctgtgcagaatgacagaggaaagcacatttttctattactagagagcacatagttcagaattacttattttttcttcaatcaaatctttgattaggtgctcaaaacaaagtccaagtttggaaaagtgggtacatacacatacatgcacacacacagacaaatgcacacatacacacacacacacacacttgcatgtgcaaacacatacacatagctttttattctacagtttgtgtgctcatatggttttggtcaggttaagcaactggtggtaaaataaaaggcatgaaataacttatagattctagaaagttgcatcttactatgcattatttagttttagaattttaaataagggtttcatgtgcacattgccagaatattgatcaggggaggtgatttcttttcccttcagagctcgtctgcttctttgggaactgtaccaactccctttccttttctagacaggcaggaggatggctgactggcaccagcaatacttggtgcccctttaagaattgtttctcctagatagttgcctgggaatcttgacccatcgcctggctgactacattcctacattcactatgaaggagtcaagtcatgtgtcagaggaatgggtggcatggattttggcatgtggtgccatagctatatataacctattgtgctgggtgctgcggatgggtgagaaattccttctagtctattctgagcaagtggcacaagggttattccagctattgctgattgagtctgtaggttccttttatttctattcgatactatttgcaaataaccaaacactgtgggaaagtcaggagactgttctctggccagcacattaaaaggggagctagaagtttaaaaacttcttattctggagcaagagtggggtttggacttttctaaaagtgagttatgagttacgaagtgtgatacgtgtgctgacattagtgctctcatgaagggaggagggttgcggaagccaggatgccctcttcttttcttacctaatttggacttggtcagatctgtcacaggactggtgcattattggtgcactgtatcagaaactatagacagacatgtctgtgtgtctctgtcagaattcactcagtaatagcaaattggctacaccatttcattggctgaaatttgccaagtagtcctcgtttttttggatagctggccattggcaagcataggctcttttgtcacaatcttaattacagatactcacttttagatcacatggtttatgtgacatagtataaacccaagtgtagttgcagaatgcctacaaagagcttgcagaagctgcaacagagttcaagtcctccggaggaggaaggcagaggaagaaagtaggaggagtcatgaaaagagtcactgtgcaggcagatgtggggcaaccacaaaggcaagccagcattgcagcgttaagccaggcctctggatcaagtcaaggtgtggtacaggctgccagacaagacaagatgaagtacatgcatcccacagaggtgctgccatgaaaccaaaaaaacagatgggctgatggtggccctttgagttggtcatcagcagtagggaaggagctaaactgaagccctgggtgctcaggaggctgtcggccctttcgtgctcacagtgaggagtcagaaaacaggtcagtggagaccaaagccacagcagtgttaggagctcctctgtaggggctacagagaaaggtggtgtaatcttcgttagtctgttttgtttgatatgattttaatacacctacgtactgttatgatcccagtatacattgctaaagtttatagttggtatcttcttgcttttaggagttggcctgtgctttgtgggacacgctggatgggcggcatggtgttcatgtgcacaaggtgcagagtcatcctgcgttttcactcagaacagagccaaatgttgattgcacattggagtcacctagggcaaagcacagtctaaaagtgctattttacatagttttggagtaatagagcgggatatcagcatgatgggtgttctttcaatgattataatggtattgtaatgaaaccaaaatcctttggcatgtgtcttagtcaggatttgtattcctgcacaaaacatcatgaccaagaagcaagttggggagaaaagggtttattcagcttccacttccacattgctgctcatcaccaaaggaagtcaggactggaactcacacagggcaggaacctgaagcagaggccagggaagatgttacttactggattgcttcccctggcttgctcagcttgctttcttatagaagtcaggactaccagcccagggatggcaccacccaccatgggccttcctacctttgatgactaattgagaaaatgccttacagctggatctcatggaggtatttcctcaaggaaggctcttttctctgtgataactctagctgtgtcaagttgacacactaaatcagccagtacagtatgtcaacacggttgcttgtctggattagagatcccctcagcaggtgataacgggacagtaggcaagtgttcattggcacccatttaactttacatagataatcaacagtacttgagatgacaatggtgggacattgataagacaataattgtattgtctagactggtaacaaagtcattttctcttctagatatttgaagtgttctgcatctgtaggctcaaggagacagagagaggctaatatataaaaaccaggagtatgagagtttgggaacactgtcaagagaggggctggaatgttagccacagatgctgggctaggagagaagtggaggaggggccagagcttgggggtgtggaagaatatctgaaatgggaataaaaaaatctggaaaaagaggaggcggtggcctgagagacctactgatgttgcacagatggcgtgatgacagggttgagaacagagccgtggcagagagacgcgtcaaaggaataggctggaggcctagatgttacaaaataaagggagtctgaggtgcgtcagcatggacgtgagcatgacttaagatgggggtatgtttggtatggagtggggaaaacatgaaccagacacatctgtcagtgtaccgtggcttaagttcttttgaaaaattcaactggaattcaacacatacatgaaatcagaaggttatcttcgtggcgtagaaagctatgacactgatagcagtgctcagaactcaaatgtttctctgaaagctttcccttaattaggctccccaattttaataatcagtgatagaacaaagcctgacggacagaacacttgtatgacacatatctactattttgattaacaacttcttaaacgatcattcatgggcttcatgtgtctgtcctgacagccacggacaccgagaacttgtgaatcaactgtcacatcagatatagaatctgcgctcctaatgtgtgagggtgactgacattttgagttagtgattttcttttttttttttttttaaagatttttggttcttttttcgcctttgcatctcagaagtaattctgcttgacatcgagggttggaaatttagattctcactgtgattttgagtattaaatagtgtcgattggagagtgaccattgccccttactctgacagttccatagctcatttagaatggccggggattcctgtgaaatacattctagcctttctcagtcctagactaatgtgtctatgctgaaatgtgtgctcagtatagcttaccgctgtcagatagagcagccggtccttctctagaacccaaacgaatgaaaaacaagagtcagaatggacccctcagctgagcctttagttagaatacctcaaggaagaggaacatttttgtgtgtgtaaacgggccagtattcaggactatggctgcaacgctgtaatagaacaaacgaggccagatgtctaaaacgtgctgtggctgcccttgtgcttggcgagtgacctttcgtaacccttcctccccagcataaagctaaggtgccccgacatgtgttctcacacacttgctttccttcgctgcaggatatttgcgaggatatttccgaccacgtggagcagatccatgccctccttgagacggagttctccctgaagctgctgtcctactcggtcaatgtcatcgtagacatccacgcagtgcagctgctctggcaccagctccgcgtatccgtgctggtcctccgggagcgcatcctacaaggtctgcaggacgccaatggcaactacaccaggcagactgacattctgcaagcattctctgaagaaacaacagaggtgagtggcctttggcagcaagtcatgctttgtcaggtgtttccattcaaagatggaaactaaaatttcagtttagagatgagagggtgaggtttgtgtagggaagtaagcaggtctttatctaggatctcggcggagtgagtaaaagctaaacgcttgttgtatgaagcaggcttttgacataagtttgtatagatgtcatccatggatgttagcacttcctgatttcgtgtctcttcctcaatcatttaaaacacagttgtttaatactatgttcaggtactaggaatatgatcaaacccgcatttctatagggtggagggcagaaagacggctcgctcagcaattaagagcactgagtgctcttccagagggaggttaaatttccaaccctctcatgggagctgacgactacctggaaccccagtgcctggacccctcttctggccccagtgggtaccagctaagcatgtagtgtgcagacatccacacaggcaaaacactcatacacataaaatacccactacctttgaaaacccatcatttcattgtgaggagatttaaatctagtaggggatagaaagaaatgaagagatgctaaggccaaactctgataagtcttcaaaatgtagtaggatgtcaggaaaagaaaccatgggctgataatatggtatttgtcttcttggttctatagctctttatacttagttcaattctttgttattactttttttgggaactcatgttcttcaaatttataaagctcttgtatgtgtgagattaagaagcttctaaacaagtgttgaagaattcattaatttattagtgttccaatgactgtttaactatcagcactgtgaaacaaatctgtgcctatttttatagatgatatacacttactgatgtttttgtttattcaaaataaagatgccattgtagaaagtccatgtggggtttagaagacagtgggaatcaagatctgccttgttctcctctactaagcttgccagtttctgcttgcagctagcactccttgctgttgtgactgggactgtggggtgagactgggggcagtgttggctttcagatgccatagctccccatgcccccagagtgtgtggcgttcacggttactggaggctacaggttccagatgaccaccgttcctatctaccacctctgaacatacaggctgatggaaatcagaaacttgtctacattctaaaggggtctttcttcagacctgcccttgtcagctgctggaagggacatgaaaattaagttagtcgattgccagttctttcttataggaatctgaagatacagcagtgtcctgggacttattcttgatattgtatggattatattttgcatttgaacttattacatacataaagtagaaacaaaaaaatggcgaaaggctattgactaattgctaatagctatttttttctctgacgtcataaatttatatcatgtcgtatctgttctgattcttacaagaagagctaaaaatttatttataaatttagtctgaagcagttccgcacctttttatatttgaggctagttttagaattgttgcagagagacaaaaacccgccttgtgaggaagggcagaggcacagtggccatctagcgctgctttgtgatgtcttctgtgagtcaggttctgcttgctctgagcctttgcaaaccctttctgttcccaattgtttgtgactctagtgctcctcggggagggctgacgggagcttagctttatttgtttttgcctgcacaccagaactgagaaagggcaggaaagtcagataaaagtcccagaatacatttggtgatggaaggtttgcagaaaggaaatgaaatggaaaaaactttacaaactaagatgaaatactgatagcgaacaggaaagcatgacggagaagaggcttgctctatatcgctaacagccctcaggactaacagtcatgtgtgtacctctgcgatctaaaagtgggaaaaccaacacatacttaccccttggtctcatagctgtgtgagacttatgacttcagagagcgtgtttgtttttcttaaaattgcccctgcaaggtcagcagtgtatagcattacaccgagcaatgagctaacgtgtaccaggccattggtttaatctccaacatgacccttcttctcccacctaaaacccactgcatagtgaagaccttcattggttttattgttattcaatttccctcacctctgcctccagcagggattaaatccaaggtgttggacactctgggcttgcactgcactactggactatacttcctatcccaagactatactgtttctgcttggtgaatctattttttccccaaagggatagagtttttccatatttaaaaatccagtggttacaatgtgaatgtttttgagtatggattttttaaaaatcaaaacaataactagagatcccaagagttttacaaagatctgttgtgctctatgctccgagatgcagtcatctatttatctaacatatagctttaacaaatatgtccaacatttattgcgcatccacttttcaagagtttgaaggctaaatatgctcctggtcctccctgtttgtgcaaaggcaggtagctgactctttcagcatctagctatctcctgagctctgaaattaattcattacaacacctttctttagtacttttaaacctcatggaagtaggacagtaattatgatgagaacaatagaaatattgtaaatttctactagttgctaatttaaaaggtcttaggggtggcttaggaatataaccatcatttataatagcttttaaattagctattaattgtattaattctttgataattccatacaatacattttgatcatatttaactcccatttctcccctaattcctaccagagtcacattccctaccgtattcccctcaacttcttgtcctctctttaaaaaaaaaaaaatccaccaagtccaacttgtgctgcataaatccttctggatgtggggccatctgcttgagcatgctcaatctgagggccatgccattaaagaaaagtgatttttttttctcttccggacaccatcgcctgtcaatagcttcccagccagatgtgagccttgctggatagcgcctgaccttgcacagacgctgtgttgcctccacagctgctctgagctcatgagtgtagtgttcctgtcatctccctaagatgatactttccttcagtcttccctgactgctggctcttacaatctttctgcccttctctccagcaactgtctctgaacctcagaaaggtagagatatagatctcccatttgtcttgtgttggggtcgccaggactcctctaaccgtcaacttgggtagaggcatcccatacctagcactagacctgttatttagcatcctatagttcctgggagaaacattgttctctgtatagggcaactccattttaaactcttttatatgactatataaatagtatctttatagaagagaaactcctaagtaatgaccaactaaatcaaacactttaaaaaaacacctccttttagattgggaatcactattattctcttaaaaattgcaagcttgtctcactcatgcctggatggtttggggttctgactttgtcatttaatgagacttttccaggcatgaagccttgaagtcacacaactatacttagctcagtttccactgaggttagaggttaatcttcctctctgctcagggcacattggtgctagaggctgctatgccttcctcctcagcatacatcattgccagaaggtaatgcagcaagcaccaagggtgagcatccactgagtaggtatccatgtaccagactctctgtcttggtattttattccctccaagcctttcaatatctttttggcatggcttatcacttcttttcctttaaacttttgtgtgtgtgtgtgtgtgtgtgtgtgtgtgtgtgtgtgtgtgtgtgtgtttgcatatgtgctgtaacatgcatgtggagatcagaggactagtttcaggatttggctttcttcttcttccatgtgtgttctcgggttcatactcgaatcgtcagccttggtggcaaacatacttagacactgagctgtcttgctacacatcatttccagtttgtagatggaagaaacaaaggttaacaacatcaagctgctgacctgtaatcatagagctgattagtgttagagcaagggcttgactctgaaactcagtgagtctcatcgtttgtgtcaagtcaaagtacatactcagaggaggaaatgacacacaggcagagagaaagagagagagagagagagagagagagagagagagagagagagagagagagagagagagaaaacagatatcaccattcattcattcattcattcattcaataaatgtatctttgagtgtcagcaggtcagcaggcttgtccaaggccttagtcacgaggccacagtgacttattttcttcctactgctgtaatttaaatgaggacaatagagcggatctcagaagagagtggtgaggattaaatggagaagtgtaagaatcagacacccccctcccccatcttgagacaaggaagccaggcttaggaaaagttagttatcacaattatttgtacaatatcatctgggtattgtagaataagagtgttggggttggaaatagatacaagaggagaaggaatagctgaagggagagagcattccagagacaggatgaatacacgaataataaaatctcatgtaagacatggggaggtccagtctcaggataacctggctgaagagatgtgtgggtctagcaattggaatggggggctggggcttgggggctgtggtcagtgccttcactcccaacctcttgcgaagaaaacgagggtcacttttgcctcctttccttcatgtgccaagggccttgaccaggctatcatccagcttggttagaagaatccggtttttatcctacatcatcaattagaaatctccctgtttgtcatgtgatatacgaactaaattagtaatgagacaaaagcctcaattacacaattaaagagtaaaaacaaaaccttataatgtgacaaagaaaactgggagtgcttttgaaactattaacgtactctgttttaaaagaaaagatagaaccggaattttggggttgatctcgaccatctctaaggcgctatggccaagttaaagtttgaatacttaaaaggtgaatggtgtatataaagcaatgtagtaattggttatgtgccttttcacaggtcaggccagagcgactgaaatgggttcagatttcacatggaatgcagttaggttcgtgtactcaaatgttacactcactgaaaccattaccattgtgtgtttcagggccggcttgactccctcacagaagtggacgactctgggcagttaactatcaaatgctctcagaattatttgtctctggattgtggtattactgcctttgaactttctgactacagtccaagtgaggatctgcttggtggcctgggcgacatgaccactagccaggccaaaactaaatcttttgactcttggagttacagcgagatggaaaaggaatttcccgagctcatccgaagcgttgggctgcttacagtggccactgagcctgtcccttccagctgtggagcagccaatgaggactcatctcaagtgatcctttcagaggaccacagaggtggacatgaggaagatggcgctcttgaacctggagagcagctgggctcaacactggagacgtcttccttaggggacacactgacaaacgctgctgaacaccctccggagacagcaaaccaagactctacttcctctccgcagcttggtgcgaaaaaatcccagcctggtccttgtgaaatgatgactcccaagagatccatccgcgattgctttaattataacgaggactctcccacgcagcccacattgcccaaaagagggctatttctaaaagaaactcttaagaacgagcggagaggcagtgatgggaaggggagggtggttgacctgaagcctgagctgagcagaagcaccccgtccctggtggaaccccctgacagatcgaagctctgcctagtgttgcagtcttcctaccccagcagcccttctgccgccagccagtcctatgagtgtttgcacaaggtggggatcggcaatcttgaaaacatagtcagaagtcacattaaagaaatttcttccagtttgggaaggcttactgactgccataaagagaaaccgcgactgaaaaagcctcacaagaccttggccgaggtgtccctgtgcaaaatacctaaacagggaactggttcaggaaagcaatccgagaataccaggagctcagtcgtgccgaccatggtgtctcctggagctccgaaagccacggcgagaccagcaacagattctgcgtctacaacctcaggtgacgcgtgccatcagagaaatcggggtggaaaattgccagcgcagtcgaaggcctccagctcatccccttgtagtcacagcagtgagtcctctcttggctcagacaacatcaaatccccacttcctctcctttcaaaaagccaaaaaggctccccacccgctccatgtcacgccacacagaacggtcaggtggtggaggcctggtacggctctgatgaatacctagcgctgccatctcacctcaaacaaacggaggtgttagctctgaaactggagaacctaaccaagcttctaccccagaaacccagaggagagactatccaggatattgatgactgggaactgtctgagatgaattcagactctgaaatctatccaacgtaccatatcaagaaaaaacacacaaggctaggcaccgtctctccgagctcatccagcgacatagcctcatctctcggggagagcattgaatctgggcccctgagtgacattctttctgatgaggacttatgtatgcccctctccggcatgaaaaagttcactgatgagaaatcagagagaccttcatcctctgagaagaatgagagccattctgctacaaaatcagccttaattcagaaactaatgaaagatattcagcaccaagataactatgaagccatctgggaaagaattgaggtaaggttagttttaacctagtgatttcttgtctgggttttaaaaataattccagggaagtagtcacctccttcccattctttatcaaatatgttaagttttcaattaaactttaaattcttcaaaggaagagatggaaaaacaattctatccatcccaggagccttgactgctgtagaattctgttgatcctactcaagctgaacagggtacctgacaaacgggcggttgctgggaaacagcttacagcagtcacggcacacacatgggatgcgcatccaatgcagacacccagtggggcatcacagtgaccttccacacctctaaatctccttccttagccctagagtgactctcgctctctagcaccttctgttggaaagaccactcatgtccaacttactaaccatccctgttttctcccctcctcttccttttggggacctgtggcttatttctaaaccatctctcacatgcactacgtgggggattttgggagaagagatttgatttggggcaaatctgtacttttggaaggaattattggatgtgataggacctttgaagacagacatcaggactccataatatagcttatggttttattctccaagaggcatctagacaaagattgactttctctagaactctgttggaaataggtctagataattttatcattatttctttccattggaataaaattgtccataccttgcataatgtgtatagctctttactatgtataaaaatcttccagatgcacgtttaagcctaattctgccactatgcaaggaggttatctacaaaatgaattattcttctatactgatagaaacagaggtttggtaagcctaagttagttttataagctaactaactaggttgacagacatatcaactggatgatacttttgcttggaaagctaagatgcaaatctgtgtcttttgattcttcatcatttttactgttgcagtgttagaaagatttctcctgcagggaaattttaatgggagaggaaaacaagatttggtagagaatatcactgtaaccctgggtctgcccaggtacttctcttgtcttttatatgttcattgatgaacattatcaggctaggcactgctacagtacagtgcatatggacagaataacctttttaaatgaaaagtcaagtctataaaaataaaattagcataaatatataatagttatgtttcaaataattgtcaccatacatcaagtatttaggtatctggtcctcaccacaatcctggcattaatttcaaatggggttaattaattggggataaaaatatagatgaggagacagaggctgagagacaccaggtaatctctggagataacaccgctgacttgatcaaattctcagagctgtaagtccaaagtcaggacttgaatgcagagccagccttacctgagcagtgtgcaccacggctcccggactggctagagaaactatggcggccttggtgagaaccagtgtggagtcaattttaggggcttctgtgaagcagagcaggaagtggggtagtgtcaaagagggaatgcaatcaagcaaaggagtctaggccttgctcggccaccaagggctctgaggccgttttcccattgtcactccctggtgttccctctggtccctctgaacctcacaaagcagaagatagacgacatgctaatggctggttcacaggaaggactagtagaccgtgatggaactccccaggacaatacctgcatatggtacccagcatctcagctcccaagaatcctcagatgccctgtcactcacctttgtgtctttacactgatattgataggaaggatttctttgtagtgtacttttatttttgctcctttgaaacccgtttttgtttattttttgagattataacttaattacacttctccctttctgtgattccctccaaaccctcccagaaaacctcttcccactctccttcaaatcaatggcctcttttttgcatgcgcgcatatgtgtgtgtgtgtatacatatatattcctaaatataacccattgattgagtccatgtattgtttcttgtatcaatgcttgcaggactgactggtactgggcaactacttggtctgctcatcctcccggaggagcttccacccccagtattactcagctgcctgtagctctttgtgtagggttgaggcctcatgggctccccgcccccacctccaccccatttggaaacccatccttttaatagacagcatatttacatagtttaggaactttattatccattagctctccctccacctctggaccctgtcttgggttcggacctcaggtacctgttgttacttacaggcttatgtcttttaacaagttcttattcatttgtaagcaagagcagacatttttgttaggtaatattttaaaaaccaagagtcaagttgcaacccgtccttcataaatagaagctcctttctgtttgttattattattatttcttgacgtctctaggatgtttggggggaggggtttattaactctctatgacttaccaagaatttatggtataggtaaattgatggaggatttcaggttagagtgcccatgactctgcaccatgaactttcaacataaagttaagaggaaacaattaaatcaagtcactgaagcagtttatttttttctgataaacgcatgaaatggaataaaaataatgaggagagttagagaagggagtgcctaaagcaaatggactttaacctaggttaaaaagtgacatggtggccgggcgtgatggcgcatgcctttaatcccagcactcgggaggcagaggcaggcagatttctgagttcgaggccagcctggtctacaaagcgagttccaggacagccagggctatacagagaaaccctgtctcgaaaaaccaaaaaaaaaaaaaagtgacgtggtgtctggacccataccttacatgagtgcacgagctatatcacaaaaggcaagtctagcctgagcccgtgtattcctagtgctgctctgtttgttggctaactttattttgttctatttcttcttagaattaccgagcaattaaacccaggagctcttacatgctaggctaggctgagcagtcgaacccagggcctcttacatagcaagctaacaccccaccactcagttacatgcctagtctgtttgtaaagtaatctattatcggaacacagtcatgcttttttccccctgtggatgtttctgctttgtgatgatagacttgaagagttatgacagaaaatatgtagcctgcaaagaatgaannnnnnnnnnnnnnnnnnnnnnnnnnnnnnnnnnnnnnnnnnnnnnnnnnnnnnnnnnnnnnnnnnnnnnnnnnnnnnnnnnnnnnnnnnnnnnnnnnnnnnnnnnnnnnnnnnnnnnnnnnnnnnnnnnnnnnnnnnnnnnnnnnnnnnnnnnnnnnnnnnnnnnnnnnnnnnnnnnnnnnnnnnnnnnnnnnnnnnnnnnnnnnnnnnnnnnnnnnnnnnnnnnnnnnnnnnnnnnnnnnnnnnnnnnnnnnnnnnnnnnnnnnnnnnnnnnnnnnnnnnnnnnnnnnnnnnnnnnnnnnnnnnnnnnnnnnnnnnnnnnnnnnnnnnnnnnnnnnnnnnnnnnnnnnnnnnnnnnnnnnnnnnnnnnnnnnnnnnncccccccccccacccagagctgtgcctctagttgcatatgtagtagaggatggcctaagcggccatcaatgggaggagaggcccttggtcttgcggagatcatatgccccagtacaggggaatgccagggccaggaagcagaagtgggtgggttggagagcagggtaaagggagggtataggggactttcgggagagcatttgaaatgtaaatgaagaaaatatctaataaaaaataaatatttagaaaaaacagtacagaccactaggggtgggggggaaagacctgtcccattttgcagatgatgaatctgaggatcaaatgagctgaaggtcatgtgactgctaactctagagaggacttgatctgtgagagagtgtaaaatgccaaggaattaagacagtaatcatacgaatagataaaaatccatttaccaaactcacaaaagcgcttctgggttagtaaatggacagtgggaacttttcgtaatgactgtgtggggaaacagccacttgtctaaagtgggaaattctcggatctactgagcagtagatccaaactcttggaacagttgagcagtgcccaggagggaatgcagccctggtgtgtgtgtgtgtgtgtgtgtgtgtgtgtgtgtgagagagagagagagggggggggggagagacctcagtgaagacactcagataagctttgatacagttcaaggccttcttttcacactctgggtttctggagaacattgtcctgagagatgacactagtcacttggagtcagtggcactaaattgataggtgcatgacacaggtaggcccatttctctacagagatgcaaatgtcttcaaacgccagattacggtatcttggccgtagtcaactggcccagctgttgctgtatttcgttctcagagacatagacacacagcttttgagagctcgctgccagctggagatgtcaccgcttgtaaattattttggatttagtgcagcacaggcttagcccatcccttgctctttgtaactgggttggataaaactgtcctcatgtctgcacagaggcagctgtccttgtgctcagagatgaagctgggaaggtgtgggtggagtgtgttgtaaaagtaggagaatgaattaaagtgacactggttttaacaatgattttccccacagttagataggtacagacgggccccgtccttacagacttcattttggttatgtgcctacacatccgtgaccacaccccgactgtggcaatcatcacacgaccccttcgctttcttccttttccgtttttccttcattgtggttaccaagactcacactcgctgtgttaaccatgtgaggtgtgcagttcaggagtgctgggttttcacattcctgtgaaacagctcgtgagaatattctcctcttgtaagcctgaaacttgccagtgggtctcgacctccctaaggctatggccctttaatgcagttcctcgacttcggatgacctccaatcatacaactatttttgttgctactgttatgaatcataatgtaaatacctacgtgttccagtggccataggcaacctctggtgcacaggctgagaactgctgctctatgccattaaacggcccccttcattctcagctccttgtctctaacttttagggctctgccagcagcatctgcatggaatgacacgatgtctttcctgtgactgagttatttcactagcacaagtcaaatccaagttctgttcattttgtctacccactgtttgcaacacggttgcatctcctattcaaagcaagaataagtcataatataataaaatgcatagtgatatgtatagtaattcactatgagctacacatctagattttcctctgccttgaattggcatctctcattgtctttgtgaccagatacctgaccaagcagcttaagggaggggattcatttggcatgcagttagaagggacacagggaaggcgtgacctcaggcaacttcatgacagggtcacatggctgggcctcttcacttctcagcagaactggaagcagaggccagactggaagctggatgtggaaagctatgtcaacctcggggccagccccagaaactcatttcctgcagcaagtctccacctccttaatgttccatgaccacagcagcaaatagctggggagcacgtgttcaagtatgtgggcctatgggggccattccccatgcaaagggtgaagcaaccccactgtcctgttagggagaacctgagaactccccttctgcccacagccccacccccaccccactcccgcctccgagtcttctctccttccatcttttctctcatccctgcctctttactcttctggaccttgtcttcactccagctcccgagaaagaaagagagaaaggcagccagctttcttctgtggacgtgaatgtttgacatatttcttctgttcacacaccattggtccaggtcaccagggagcttcagaaatgaaccagcgtgttattgctacagatatgtcttgctgtaactgctgcttagaacaacttggtgaaaggaggggactgtgaagttagaaggaaaggggccagagagggaatcgaatgccaaatatctgcacagcaaagttacgaaatgaatctgtttaatgaatgtatgactacatgaatgaatgactgtaagaagctaagtgtaagcttcttctagactagggtcataaaccaatgatccaagggaccaggtggattgtggaaatgagtcgtataggatgcataaatgagggacagtgggctgattcaactggagcctacacaacatgtctaaaggacaatacctctcagctgcagatgccatttgtgtgggaatgtgactttgtacggcaagagattttttttttttaagtaggaaacctacattttatgtgacatctctcagttttaaaattttaatctgagccgtttttaaatagatccaataaacacattcatggcaaagatttggcttcaagtcaccaagctgccatctttgatgggaaactacttaaggtttttaagcatataagattggtagcttctatacattaatctgaccctcgtttggggacatgcctctaagccatggcgattttcagctgtggctgctcgttacaactgctggaggttatcccaaacaccccaacctcaaaccttaccccagagcgattaaatcaggccctattgctttacaaactcttccaggaggtctggcaggatggctctgtgcatgaaggcgctggcgtgcaagcccggagctctgagtttgatccctgggacccactaaaggagaatggagaggatcagtcccacaaactgtccccttactgctctgcacgtggtatggcacatacatatgcacacactaataacaattgttaaagttcttcaagcagtcgcaatgttcaattaaattgcacagtaatcctttagggccaattttaaagggttttgcagtaggctgtttatgttactacataactgtggatccataaagatgatttgttacgtttttgggtctgtcttaaaataagaaaatgactgggcgtggtggcacacgcctttaatcccagcactctggaggcagaggcaggcagatttctgagttcaaggccagcctggtctacagagtgagttccaggacagccagggctatacagagaaaccctgtctcgaaaaaaacaaaacaaaacaaacaaacaaaaaaagcggagaaaaagctaattttcagatttcaagttgaaaattgggggctaggagaagtaaagatttaataaacggttctcagggagcacatcaagttaggttacgcagtaaatgttatcttaaatgccaacactatggccgtaatccaagttgagaattctaaatcaacacaatggttttaaagataagcccacaaaattctctttagggataaaataataagtcttcagagtaatgtgttgtggcaacgccaggagagaaacgcagccttgcattaaccctgctgatagatttgttgagcgtgccaaggtcattgttcaaggttggttgagaagaaccacagcttagaaacaaatcccttcttgttttcccaggaggaatgctgcagtgccttctgtggtttctacaaagcttgccatgggccttgacagaatattagtgatgatttaccaccaccgtgaggctatgctaggcactgcatctggttctcttggaaaaaaaaaaaagttctgttcacaaatataaatgtgaaaatgaaaatctcaaaaaaattgtagggtggtgtgtgtgtgtgtgtgtgtgtgtgtgtgtgtgtgtgtgtgtatgtgtgtgtggtgtgtgctgtggtgtggtgtgtgtgtctgtgtgtgtgtgtgtgtggtgtggtgtgtgtggtgtgtgtgtgtggtgtggtgtgtgctgtagtgtggtgtgtgtgtgtgtgtggtgtgtgtgtggtgtgtggtgtggtgtggtgtgtgtgtactgtgtgtgtgtgtgtgtgtgctgtggtgtgtgtgtcctgtggtatggtgtgtgtnnnnnnnnnnnnnnnnnnnnnnnnnnnnnnnnnnnnnnnnnnnnnnnnnnnnnnnnnnnnnnnnnnnnnnnnnnnnnnnnnnnnnnnnnnnnnnnnnnnnnnnnnnnnnnnnnnnnnnnnnnnnnnnnnnnnnnnnnnnnnnnnnnnnnnnnnnnnnnnnnnnnnnnnnnnnnnnnnnnnnnnnnnnnnnnnnnnnnnnnnnnnnnnnnnnnnnnnnnnnnnnnnnnnnnnnnnnnnnnnnnnnnnnnnnnnnnnnnnnnnnnnnnnnnnnnnnnnnnnnnnnnnnnnnnnnnnnnnnnnnnnnnnnnnnnnnnnnnnnnnnnnnnnnnnnnnnnnnnnnnnnnnnnnnnnnnnnnnnnnnnnnnnnnnnnnnnnnnnnnnnnnnnnnnnnnnnnnnnnnnnnnnnnnnnnnnnnnnnnnnnnnnnnnnnnnnnnnnnnnnnnnnnnnnnnnnnnnnnnnnnnnnnnnnnnnnnnnnnnnnnnnnnnnnnnnnnnnnnnnnnnnnnnnnnnnnnnnnnnnnnnnnnnnnnnnnnnnnnnnnnnnnnnnnnnnnnnnnnnnnnnnnnnnnnnnnnnnnnnnnnnnnnnnnnnnnnnnnnnnnnnnnnnnnnnnnnnnnnnnnnnnnnnnnnnnnnnnnnnnnnnnnnnnnnnnnnnnnnnnnnnnnnnnnnnnnnnnnnnnnnnnnnnnnnnnnnnnnnnnnnnnnnnnnnnnnnnnnnnnnnnnnnnnnnnnnnnnnnnnnnnnnnnnnnnnnnnnnnnnnnnnnnnnnnnnnnnnnnnnnnnnnnnnnnnnnnnnnnnnnnnnnnnnnnnnnnnnnnnnnnnnnnnnnnnnnnnnnnnnnnnnnnnnnnnnnnnnnnnnnnnnnnnnnnnnnnnnnnnnnnnnnnnnnnnnnnnnnnnnnnnnnnnnnnnnnnnnnnnnnnnnnnnnnnnnnnnnnnnnnnnnnnnnnnnnnnnnnnnnnnnnnnnnnnnnnnnnnnnnnnnnnnnnnnnnnnnnnnnnnnnnnnnnnnnnnnnnnnnnnnnnnnnnnnnnnnnnnnnnnnnnnnnnnnnnnnnnnnnnnnnnnnnnnnnnnnnnnnnnnnnnnnnnnnnnnnnnnnnnnnnnnnnnnnnnnnnnnnnnnnnnnnnnnnnnnnnnnnnnnnnnnnnnnnnnnnnnnnnnnnnnnnnnnnnnnnnnnnnnnnnnnnnnnnnnnnnnnnnnnnnnnnnnnnnnnnnnnnnnnnnnnnnnnnnnnnnnnnnnnnnnnnnnnnnnnnnnnnnnnnnnnnnnnnnnnnnnnnnnnnnnnnnnnnnnnnnnnnnnnnnnnnnnnnnnnnnnnnnnnnnnnnnnnnnnnnnnnnnnnnnnnnnnnnnnnnnnnnnnnnnnnnnnnnnnnnnnnnnnnnnnnnnnnnnnnnnnnnnnnnnnnnnnnnnnnnnnnnnnnnnnnnnnnnnnnnnnnnnnnnnnnnnnnnnnnnnnnnnnnnnnnnnnnnnnnnnnnnnnnnnnnnnnnnnnnnnnnnnnnnnnnnnnnnnnnnnnnnnnnnnnnnnnnnnnnnnnnnnnnnnnnnnnnnnnnnnnnnnnnnnnnnnnnnnnnnnnnnnnnnnnnnnnnnnnnnnnnnnnnnnnnnnnnnnnnnnnnnnnnnnnnnnnnnnnnnnnnnnnnnnnnnnnnnnnnnnnnnnnnnnnnnnnnnnnnnnnnnnnnnnnnnnnnnnnnnnnnnnnnnnnnnnnnnnnnnnnnnnnnnnnnnnnnnnnnnnnnnnnnnnnnnnnnnnnnnnnnnnnnnnnnnnnnnnnnnnnnnnnnnnnnnnnnnnnnnnnnnnnnnnnnnnnnnnnnnnnnnnnnnnnnnnnnnnnnnnnnnnnnnnnnnnnnnnnnnnnnnnnnnnnnnnnnnnnnnnnnnnnnnnnnnnnnnnnnnnnnnnnnnnnnnnnnnnnnnnnnnnnnnnnnnnnnnnnnnnnnnnnnnnnnnnnnnnnnnnnnnnnnnnnnnnnnnnnnnnnnnnnnnnnnnnnnnnnnnnnnnnnnnnnnnnnnnnnnnnnnnnnnnnnnnnnnnnnnnnnnnnnnnnnnnnnnnnnnnnnnnnnnnnnnnnnnnnnnnnnnnnnnnnnnnnnnnnnnnnnnnnnnnnnnnnnnnnnnnnnnnnnnnnnnnnnnnnnnnnnnnnnnnnnnnnnnnnnnnnnnnnnnnnnnnnnnnnnnnnnnnnnnnnnnnnnnnnnnnnnnnnnnnnnnnnnnnnnnnnnnnnnnnnnnnnnnnnnnnnnnnnnnnnnnnnnnnnnnnnnnnnnnnnnnnnnnnnnnnnnnnnnnnnnnnnnnnnnnnnnnnnnnnnnnnnnnnnnnnnnnnnnnnnnnnnnnnnnnnnnnnnnnnnnnnnnnnnnnnnnnnnnnnnnnnnnnnnnnnnnnnnnnnnnnnnnnnnnnnnnnnnnnnnnnnnnnnnnnnnnnnnnnnnnnnnnnnnnnnnnnnnnnnnnnnnnnnnnnnnnnnnnnnnnnnnnnnnnnnnnnnnnnnnnnnnnnnnnnnnnnnnnnnnnnnnnnnnnnnnnnnnnnnnnnnnnnnnnnnnnnnnnnnnnnnnnnnnnnnnnnnnnnnnnnnnnnnnnnnnnnnnnnnnnnnnnnnnnnnnnnnnnnnnnnnnnnnnnnnnnnnnnnnnnnnnnnnnnnnnnnnnnnnnnnnnnnnnnnnnnnnnnnnnnnnnnnnnnnnnnnnnnnnnnnnnnnnnnnnnnnnnnnnnnnnnnnnnnnnnnnnnnnnnnnnnnnnnnnnnnnnnnnnnnnnnnnnnnnnnnnnnnnnnnnnnnnnnnnnnnnnnnnnnnnnnnnnnnnnnnnnnnnnnnnnnnnnnnnnnnnnnnnnnnnnnnnnnnnnnnnnnnnnnnnnnnnnnnnnnnnnnnnnnnnnnnnnnnnnnnnnnnnnnnnnnnnnnnnnnnnnnnnnnnnnnnnnnnnnnnnnnnnnnnnnnnnnnnnnnnnnnnnnnnnnnnnnnnnnnnnnnnnnnnnnnnnnnnnnnnnnnnnnnnnnnnnnnnnnnnnnnnnnnnnnnnnnnnnnnnnnnnnnnnnnnnnnnnnnnnnnnnnnnnnnnnnnnnnnnnnnnnnnnnnnnnnnnnnnnnnnnnnnnnnnnnnnnnnnnnnnnnnnnnnnnnnnnnnnnnnnnnnnnnnnnnnnnnnnnnnnnnnnnnnnnnnnnnnnnnnnnnnnnnnnnnnnnnnnnnnnnnnnnnnnnnnnnnnnnnnnnnnnnnnnnnnnnnnnnnnnnnnnnnnnnnnnnnnnnnnnnnnnnnnnnnnnnnnnnnnnnnnnnnnnnnnnnnnnnnnnnnnnnnnnnnnnnnnnnnnnnnnnnnnnnnnnnnnnnnnnnnnnnnnnnnnnnnnnnnnnnnnnnnnnnnnnnnnnnnnnnnnnnnnnnnnnnnnnnnnnnnnnnnnnnnnnnnnnnnnnnnnnnnnnnnnnnnnnnnnnnnnnnnnnnnnnnnnnnnnnnnnnnnnnnnnnnnnnnnnnnnnnnnnnnnnnnnnnnnnnnnnnnnnnnnnnnnnnnnnnnnnnnnnnnnnnnnnnnnnnnnnnnnnnnnnnnnnnnnnnnnnnnnnnnnnnnnnnnnnnnnnnnnnnnnnnnnnnnnnnnnnnnnnnnnnnnnnnnnnnnnnnnnnnnnnnnnnnnnnnnnnnnnnnnnnnnnnnnnnnnnnnnnnnnnnnnnnnnnnnnnnnnnnnnnnnnnnnnnnnnnnnnnnnnnnnnnnnnnnnnnnnnnnnnnnnnnnnnnnnnnnnnnnnnnnnnnnnnnnnnnnnnnnnnnnnnnnnnnnnnnnnnnnnnnnnnnnnnnnnnnnnnnnnnnnnnnnnnnnnnnnnnnnnnnnnnnnnnnnnnnnnnnnnnnnnnnnnnnnnnnnnnnnnnnnnnnnnnnnnnnnnnnnnnnnnnnnnnnnnnnnnnnnnnnnnnnnnnnnnnnnnnnnnnnnnnnnnnnnnnnnnnnnnnnnnnnnnnnnnnnnnnnnnnnnnnnnnnnnnnnnnnnnnnnnnnnnnnnnnnnnnnnnnnnnnnnnnnnnnnnnnnnnnnnnnnnnnnnnnnnnnnnnnnnnnnnnnnnnnnnnnnnnnnnnnnnnnnnnnnnnnnnnnnnnnnnnnnnnnnnnnnnnnnnnnnnnnnnnnnnnnnnnnnnnnnnnnnnnnnnnnnnnnnnnnnnnnnnnnnnnnnnnnnnnnnnnnnnnnnnnnnnnnnnnnnnnnnnnnnnnnnnnnnnnnnnnnnnnnnnnnnnnnnnnnnnnnnnnnnnnnnnnnnnnnnnnnnnnnnnnnnnnnnnnnnnnnnnnnnnnnnnnnnnnnnnnnnnnnnnnnnnnnnnnnnnnnnnnnnnnnnnnnnnnnnnnnnnnnnnnnnnnnnnnnnnnnnnnnnnnnnnnnnnnnnnnnnnnnnnnnnnnnnnnnnnnnnnnnnnnnnnnnnnnnnnnnnnnnnnnnnnnnnnnnnnnnnnnnnnnnnnnnnnnnnnnnnnnnnnnnnnnnnnnnnnnnnnnnnnnnnnnnnnnnnnnnnnnnnnnnnnnnnnnnnnnnnnnnnnnnnnnnnnnnnnnnnnnnnnnnnnnnnnnnnnnnnnnnnnnnnnnnnnnnnnnnnnnnnnnnnnnnnnnnnnnnnnnnnnnnnnnnnnnnnnnnnnnnnnnnnnnnnnnnnnnnnnnnnnnnnnnnnnnnnnnnnnnnnnnnnnnnnnnnnnnnnnnnnnnnnnnnnnnnnnnnnnnnnnnnnnnnnnnnnnnnnnnnnnnnnnnnnnnnnnnnnnnnnnnnnnnnnnnnnnnnnnnnnnnnnnnnnnnnnnnnnnnnnnnnnnnnnnnnnnnnnnnnnnnnnnnnnnnnnnnnnnnnnnnnnnnnnnnnnnnnnnnnnnnnnnnnnnnnnnnnnnnnnnnnnnnnnnnnnnnnnnnnnnnnnnnnnnnnnnnnnnnnnnnnnnnnnnnnnnnnnnnnnnnnnnnnnnnnnnnnnnnnnnnnnnnnnnnnnnnnnnnnnnnnnnnnnnnnnnnnnnnnnnnnnnnnnnnnnnnnnnnnnnnnnnnnnnnnnnnnnnnnnnnnnnnnnnnnnnnnnnnnnnnnnnnnnnnnnnnnnnnnnnnnnnnnnnnnnnnnnnnnnnnnnnnnnnnnnnnnnnnnnnnnnnnnnnnnnnnnnnnnnnnnnnnnnnnnnnnnnnnnnnnnnnnnnnnnnnnnnnnnnnnnnnnnnnnnnnnnnnnnnnnnnnnnnnnnnnnnnnnnnnnnnnnnnnnnnnnnnnnnnnnnnnnnnnnnnnnnnnnnnnnnnnnnnnnnnnnnnnnnnnnnnnnnnnnnnnnnnnnnnnnnnnnnnnnnnnnnnnnnnnnnnnnnnnnnnnnnnnnnnnnnnnnnnnnnnnnnnnnnnnnnnnnnnnnnnnnnnnnnnnnnnnnnnnnnnnnnnnnnnnnnnnnnnnnnnnnnnnnnnnnnnnnnnnnnnnnnnnnnnnnnnnnnnnnnnnnnnnnnnnnnnnnnnnnnnnnnnnnnnnnnnnnnnnnnnnnnnnnnnnnnnnnnnnnnnnnnnnnnnnnnnnnnnnnnnnnnnnnnnnnnnnnnnnnnnnnnnnnnnnnnnnnnnnnnnnnnnnnnnnnnnnnnnnnnnnnnnnnnnnnnnnnnnnnnnnnnnnnnnnnnnnnnnnnnnnnnnnnnnnnnnnnnnnnnnnnnnnnnnnnnnnnnnnnnnnnnnnnnnnnnnnnnnnnnnnnnnnnnnnnnnnnnnnnnnnnnnnnnnnnnnnnnnnnnnnnnnnnnnnnnnnnnnnnnnnntcctccacaccatcctgctcttacacagtgctcctccccaccatcctgctcttgcacagtgctcctccacaccatcctgctcttacacagtgctcctccccaccatcctgctcttacacagtgctcctccacaccatcctgctcttacacagtgctcctctcatcatcctgctcttacaagtgctcctcccaccatcctgctcttacacagtgctcctccccaccatcctgctcttacaagtgctcctccacaccatcctgctcttacacagtgctcctccacaccatcctgctcttacacagtgctcctccacaccatcctgctcttgcacagtgctcctcccatcatcctgctcttacacagtgctcctcccatcatcctgctcttacacagtgctcctcccatcatcctgctcttacacagtgctcctcccatcatcctgctcttacacagtgctcctcccatcatcctgctcttacacagtgctcctcccatcatccggctcttacaggctcttcacctcctcttctgtgatgttctccaagtgttggtggtggcagtgggtgttgagaaagaggtctcatttatggatgagtagcctttaatgtactttctctggcaattatcatggaatcccccaaatgaatattattgcatgaattttacaggtgaaggaactgatttcaaaggcaggaaacaactcctgtagtaactgctggaaccaaagtcagttctgagtggctctaccactgttccctaatgtctaccctggctcacggttaatgtgtctctcttttaatataccatcttctgttatccttacataatctttatttattttcaactttcaatttctgggaagaaaaacctatcagtcaagtcagccagctggtcttccgtgatgtcatgtggaccagtgagaccctgtttgtgtactgagtccatcaccttccagctccaggtttgggtactgagtccatcaccttccagctccaggtttgggtactgagtccatcaccttccagctccaggtttgggtactgagtccatcaccttccagctccaggtttgggtactgagttcatcactttccagctccaggtttgggtactgagtccatcgcctttcagcttcagggcacggacaagacacttgctcttctcatctgcataccgagagtgacaagagtccccacctcctgtgatcattacaggtcctaagtgttttattttacacaacagatcctagctgtagtgagggtgcttattacttcagctagaattatccggatgaattcgctgggcctttaactgtggaatacggagaaagtagcaattaggttttaacgacttaaaataccaatagaagttggccattttttttttctccataaagttgttgttcacggttccggggttcatctgcatggccctgcttgttggcagcttatttgatctagtctggcccagaattcacatctggggtctctaacaggagacagaatccttttgaggtgaagacacacagatacacaaggttcacatccagatgccagacaccacagggcaactgaccatccaggacgtggctaacgctgcctgctgaccacttcctctgtcagtcaacggagtcattcagcctgttacggcaatggtcgtgaatggtcacatttaacttccttcaagtctgccttccgtacgttaggagggaactctttagtgatctttcttgcagagctcctctcaaaagacggggcagaaagagatcagtgcgaagggagaggagctgaggagctgaggagtccaggaaccgaggagccaggctcccacctcagcctttgtgcgctggggttgggggaggtgcgttctccacacagtgcagggcagcaccaggcaggaggaacctgacttctatagttatccagaacactagagaaacacactcatgtacctagtaccaaccataggaaggaacaaattaatgtacagataagagtgctgtgtataacagaatacgtccttcattctttcttaggagctgtttttcttacaaaatcatttgaatccaatatatcagagtttagacatgctttgcattctgccatctttttaaatatcgatatttacctttctgtgcccattcatgtctaccagttgcttcatacacagcaggatcttactaaatatttcaatgaatgaatgaatgatcagtttttgtcatattatagtttgatccctatttcaaaatagttgcattttctagatttaccctatttttctgcctgttgtcatccacaccggcctgctttcctttattcacaccacaaagatgtcagtgggccctctgaaagcaagcatcagctgtgtgtgggtctaagtgtgaatgcacctgtgtgcaccactttcttggtctttctgagagagagaggacatgtcccgtgactcacaggaagtgcccttggtagtacacggaggtgctggaacactggacaaagccaggagatcaatacatcaagagctgactgaacgccagggaaactgatttccattcaaccgtttgcatccgcactcttaaggccacacacagcaacagtgcccccactggggtgtagagagccaagatttccctaagagaaagtacaacctggtttttgttacaaacaggaacagcgagacttctcatgtttctgtctcgatggatgaaacttggcatcggcaaaagaggaggcaggagatcacccggcaaagaaaaccggtgagggtgggctgcagttgagaagacatttgcagagaaaggtccttgttgtctctgatgtccaccctgttgtgttgactgcctgagctgtacagacactcgttcaaggaaggtttcccagggccctcggtttactaattgcatctcagaaatctcagctaaccctgcactcgtggttctgctaggaaatctgacatgcatgacttaaaactttttgactaacaacatctatgaccctgaacacgctcctaagctttcatggttgtttttagagggggagggtgataattaatcatctagtattgattatatttaaaatagcatacttaactatttacccttcagattcaacttgtttccaaatagcttgcgccctgacttaattttaatccacacaccagtttatatacaacaactcaagtcacacttaacagcaagtggtggatgacctgtgcactaaaattatgatttccattttagttgctatcatctacactctcctgtaggtgacagataacgcgtctatatgtttctatgctcgcccaagggtctcttaactcttccacaaaaattccactatgagggtactgtctgacgacttgagttccacagggctctgccgtgcttgcggaagtgacaggaacatccgaggacatttgtcttaaatatgacatgtgaagtattgacagccccctaggaaagcccgggaaaacatggacgcaccactccacgggtgccagacggagatccacccaggtcgggaggggcgcgctctagtagagactgtgggcctctgtacctgatctctccctttggaacaggagcgtgtctctgggctttatccgtctgcttttgtcttttctaacatcctaccccatttctttttcttataatccactaggggaaaactgttcacatttcaggttatgaattttttaaaaaatctaggatgtactaaataataaaattcaacttctgagaagcatgacaacgaaagtgaacgtctacatattggtcttatttttgtcttaggatgtcctcattaaagcattaaaataatgatcaaaataaatcaaaggtaaaaagagaaagaaggaaggaaggaaagggaaagggaaaggaaaaggaaaaggaaaaggaaaggaaaaaagaaagaggatggatttcctgtaaaatagggaaacagcataccaaaccaaacgaacatggaggcccgcccttgcaccgcatgacctccaggtggcgctgttgacctacacatggaaagcagacgccaggttcagtttatagctggattttcactttttcaaaaatattttctgtctccacagatgtgttcttttaaatggtcaataaaattttataaccactatttgaaaaatcgcaagattattgtgatttgtgcttcccgggcaagaatatttcttcccgtccagacatactcagccagtcaggtgtctgtctgcatttgttccgtggtgtctcttttctgcccttctctactcccaagcacccacaggctcagccacagaaacttgggctgatgatgggacacaaccggtgtcttcatcattcggctctagtaactcagctccgtacactctgaatgggcggggtcatctgtactcaatgccccccgccccccgcgtccccaagccaggcagtggtttgggtgtgggcaagcagaagtttgtcacgcactagagatgttttgaggtaacttacgcagtgccccccacggtctaatcgttctctaagaagctgcctctaggtaaaatccaggagagaacttgatttcctgtttggaaggatttcaggccaggagcagtggtcatcaccaaaatccaacccaacccaaaccaaaccaaatcaaaccaaaccaaccaaccaaccaatcaaacatcaaagcagaacagtaggaagaattgccatagtttgaggcaaagtttgggattttaaagattatctttaaaaataatcaactaaccttccttttgtgcccttcttttccttctctcacaggggtttgtgaacaagctggacgaattcattcagtggctaaacgaagccatggagaccacggagaactggactccgcctaaagccgagaccgacagcctccggctgtacctggagacacacttggtaggcaagatcatgttgtggcttctctttctgtcaaggatttcaatgttgcgatttgtttaggtccaatatcaattttagttatcaaacgtcattatatgctaatgaacccaagctctaatggggttaagcctcaagctgaccattttcaggcatttcaagtaataatatgacccctaaggcctccgtacttcaaacagatgcttcaaagctttctccagaagggacgctattttaaaacaccttagaaaatcttattagacccgtgttctctaaagtgatgattgaagatttccctcttcttggggggaaaaaaaataaatgaataaaagagaaaattttgatgaccattctgaagctttctggagttcttgtaaaattaatgagcccctcattatcaagaaggtctatttaatctgttctacacttggctattttaataaaatatttaaaatgatgatctccatcatttctgctgctacgtggatttttcagtagataattaatacaactgtcattttgccgggccctctgcttagggaaaaccagggagtcattgtggataacacttgggtgactatgttttgagtctgtttaaagcaggaattatagaccaggatacacttgatgaacctcgggaggtttgtagtgaatgcttcaaatggccgatatcaattatgaaggggtgggacccccgtaccggagtgtgagaaagcgtgacaaaaaagcacattgtcataggaaatgaaaactcgggctttgaggatctcatctttattcctttcactgatagcataaaattgacaaaggcaacgaacaggaatccttgggtgcccaagtgtggggttgatttctgcccctcttacacgcttagaatttggaatagaatatgcaccacggacagtctcatgcacgaggtttcatgggaaagactgcagaaggaagaaagacggacacaaaaaagagagaactttagtttatttagtgttgtgctttgaacatgttttatgtgactgcaagttaaacagccccgggaaccagttaatgctgcaggtaggctccagataaacatagcctgggttgacagtccggtccgtagaaacgccagtggccataagtgcctctcttgtactgggtttggaaagactgccctgaacactcaattccccgtagaacacacttttcagggttttcttcttcttcttcttcttcttttttttttttggagggcatttcataatagcaagataaagatattcagtgctttatgatgtaaattatattaattagaatgtcaacgttgccctggcactgttctgacagaaattctaatctgtgtttaaacaggactatatgaactttatttcacatcaagtgtgctgtcttaattttcttgatttaatattttatggaaaacacacatccagcttttgaggttccagagggcacgagggcataaggtgccctagctgtggggtgctcaccgaaagccaggaggagtggctggatggcctggcaagggcctttcctctctgcgtagcatgtccctgtgtcaccattgcatatccctgtctcagctatcttacagaaatcttgcttgacatccctgtgccagcctcacctcatgctagcccaaagctagaagtttcttttatgaaggggcattttgtattgttatgtagttgcaactaactctatatatctaatgttaacttagaatgttgctaatacaatgtcagaagtaaagtcttatattatcattcagtttaaattgctaccgtgtctatgaccttactctatgtagccttagcaattgcagaactttttattggtggctattaagaagctcaggcagctctcattccaaacatggagtcactgcccactgctgtgggtcaccaaagagtccttcctgatgtctctctctgtttctgccacaggattaccatcttaggggggaactctctctctctctctctctctctctctctctctctctctctctctgactattctggctagcatagagatgatataggtaaagtttgcttatctctgcttttcaaatggcgagaaactatggtttgcaggccggttcaccgactgttaagtcagtctcccattgaacttctgagaatagcagtgtgcaatagccacattagacttctgtgcatggtttgctgtggaatgctacagaaatcactgggagtccctggactctaccaggccagttaccataggacaaggcttctctgtccaccttaccctctgtccctgattgtcacctttatcttattgtattatcattgtgctgaactaatattcttttagtctcaaaaggaggcaaagcctacctttctatgaaaactattcaagtgagcttagagattcatatcttagcttagtctatacaaaccattattgttccctgatgtgggagcagagggtttttacagtgtcacacagtagtggaggttgtcacacagtagtggaggttgtcagatacactcgctaaatcatgtttttctagatcctaagatttagtcttcagtctttaggaatgtgggacctgagagcgattgtcttctctgatataatacattggaataggtggtctcttctagtatttactcgtaaagataaacaaataccaaaacaacagctgtacatctatatcttcatacttaattcaattattttccatgatggcagccaagggtttttcaccaacactaatcaattaaagctttacaatgtctctctgagcgagagtcaggaattttattttagctgtaggaaacagtgtgaaattgtcatggtacatcagcgattttccatgataattaatcatctgcttgcaacctggctgctccttcaaaaatacaattcccatctttctggaaactggcactttcaggaaatgtcatttggaggtggtggatggcgggtgctggtcttttctgaaagcaatgttagaagtagcattgtacgaatgtactacggggaagactcctctttctctctttccttcactgttgtctgtttcctcttcaaaaacagctccactggagtgtttggcctgcgagatcgcgtatcttagagtatgaacgttcacgagctttgacaatctgaaagatacatacactccaccaacatcacgatagtgagcacattcatcacgccaaacctcctcatgacactttgagattccttccttcagcccttcccagactgcactgcagccctaagcaactgctgatttggtttctgtactatccagtttgctctgtctctaacttcataggggtaaggccggccagcatgctctccactggggcacaggcctgatctctctccttcagcatgtttcttgttagctataatgacatcgcatctaccgatgttccttctgtgttgttcacatgtgcatgggccacgcctgatgccttgagttcctgataaacgtttaatgtttcctccacagtctttcaaattatgtatacctgagaagaagcacaatacatgcaaacattgtgaatagccaccgcatgccagaggacgtagctctgggatagaccgtgtgcttaggaaatagccatcgagagtgtttagatttcgttcctttaaggaaatgttcagcagtaaggccacagaggaagccatcctggctagatccacagtttgtccatgtgcttctggaaggagatctctcatctccagagtccttggaagacatacctaattcaccaaatgagcaccactccatagacatcggagccaggaaaacaaaccagatcttaactcatttatagccagtcagactatctagggtgaactactgtagtccagccagaccaaagagttgggcaagagcaatgactaaacctagggtagggccagtcttaaaacttggagaggaaatttgggtaggcgtcccatactctatggcacaaggattgatcaatttcatgttgtctggcagttttaagtttgttataagaactctctgactatgtagcccaggatgtcagggaactcactacgtagctcaggctggccaccagctcagagtaccagaatagcagataccaccatgcttgtcttaagaagcaacatttgtaattttcaatttgatatgtgagagctgtgtaacacaatggcgactatgggttcaagattttagttcatatatctgaagcacccgtgcaaccaggcagatcctgaggtgctagagcaatgattctcagccttcccaacactgcctccttttaatgcagttcatgttgtggtgaccctaaaccagaaaagaattttcattgctatttcctaattgcaactttgttactgttatgaactgtaatgtaaacctctgggttttgaccctcccaaatctcctaaggggtctcgacccacaggatgagaccacccaccccgcccccgtgtggagcacgctgcttgaacctgccttctcttggggttttctattgaacagagacgaccatagagtatacgatatagtcctgaccaggaaaattatataagataaatgaaggagttcagagaaaaggtttaatgttttcctagagataattagatgaaggccttgaagggcatagattactctgttggatcaaatgagaggagagagctggggtagggacatcacggtgagggtcatggaggaaaagagtggaaggggactgtcaggtgaggtcgagcctccacttgagccttgaagggcgctactggacagtaagggacactaagtgacgatttaaatcgccaaatgtttctcaggggtactgaaacttttggctttgtgtcaagcagaagagtgacaggagtcagtcacaagtcccatgggggtaaggccaggctggcatagtttagctgaatgatcacagtagaggactggcttgaatagagtatttgatgttctactacggacaagcagttatcattcttcaaaaatgatggatttttgcctggctgtgtgcagacatggcagaaactactcgaagtgggtggcagtataaaggtctgaggagaggcctccctcctgtcctctcagacaccagctctctgctctttcttgatatcatcacacgattatcccaagtatttaaaaacagctacacatatgtgcggtgctttgtgcccagcttaaactagcaacagatcaaaagcagtaactataacacaactttatcctctttggatggctttaacagtatttccatctggggtactctgtgattttctttaagcaatcctttatgctagacccttaggttatgtgtagtcttctatctccaacgatgcttctgtgcacatgctcagaccttaatcatcttgtttggtatgagcatgtccttacattcagactttctggctaaaaaggctatacacgttcaaaactttcatctattactagattgtctttggagacgatgcggtgtgtgctccgtgctgagcacgcccactgccgtctgctgttgaagcttgttgcacactgcttagccttgtccatgcggtggttagcagggatgaccactgtgcttccagcatttggggtggggttgtcaccttctccatgtttgggggcatcgtttgcatttctttccttgggtctgtctgctcattatctgtgtctggtcttctgttgggtcattactattctacttctggatttacatgcatttcttaaataccaaaggaagcagtcccttgtctgtgccgtgaatggaaaatatctcgaaaggaaaccatcaagaagtctcttccaaacgtacagggacatctcaacaatttgtgcctgtacttaggcagacttgggaagccatgctggacctctgcacctggcaaaaccaggcatgaaaatcaaagctaaaaccttagatatagagggtcgagtttaagatcaaagagtttgtaggtggattcggagattaagaacatcagagcaagccgggcggtagtggcacacgcctttaatcccagcactcaggaggcagaggcaggcggatttctgagttcgaggccagcctggtctacagagtgagttccaggacagccagggatacacagagaaaccctgtctctaacaaaacaaaacaaaacaaaacaaaacaaaacaaaacaaaaacccaagaacatcagagcagtgggaatggaatactgggtgagtgggagtgggttgggggagggggacaggagcagattacagggcgaatcaggggttcacaccaagagctgcttttgagactcgctcatgttcagtcagaaatgtcagacaacatctttttgtctgccctgttctggtctatggcaccctgaactacacccaactgagtgtgggaaagactcagatgcagggaggtgtgtagatggatgaatgcttctccgcatgagccgggcctccaggcactgccaggtgtgtgtgtgtgtgtgtgtgtgtgtgtgtgtgcgcgcgcacaccaagctactgggacatcatcactccacagatgtagcagtgtgtagtgtggactgaggaagcgcgattcagcccctgcctttcactcaatgtctagttaaagagaaacatcacgctacactcagtgagaaaagcaaacaacgtgagacagcataaagcgaaaagcacagacctccaccctgccgactaaccagcccaggcagtctgctctgtgttctgtggagcccttttatgtgagacgagcacacttgcaagtccgtgttggatataagtcagtaaagtgcttccacagacctgtttccatctgtatacaaaagaactccggtacattctcacagctccttagtgtttgatcacgtggacatgccccggcttatttaattaaatcttgtcatgatgggcactttagcttcttccttatttctgctttcttttttcaaaccgtgctccacgaatattcagtctaacactggcagacaaccttcttgtccttttccaggcagcctgcagcagcagctcagggaccccatgtaataaaaaaaacctctatcatcctctaggaacagctttcactgtaggtaataagaaccgaggcagatccgtgtttgtgcgtgggaaatctgagtccccatttacaggtggactttaaaagcacagccttttgaccctctttgttcatcctagtattagtgcctgcaatttgtgttggctgccacaaggtggcagaggagcaccagactccacttgttctcgaggtcccatctttattgtgccctcgcccggatcttcataaacacaattggatttaactagaggaccggacgtgtctggttaggagaatgatcagaaaatgcagacgcacacgtctcccatcaccatctagatctctgtgcttcatttctgattcaatcgcctttatttctaccccaagaaaaaccagcgttcccaaacacttctgactgctggtcttttgctggccctcctgtgtctacctctgctccatttttcattgcttgaagttaagagatcacaagagtttgtttttcacctgccgctcacctttcctgcttccccttctctgctgagatgacggacagccatggcctaagcaagttgagcttccttcacaagaacaggagctgcctgccgtggggctgtgctcctcaggaacagggctcagtcagccagacttcaaagcccagagcgtgcgttgggcccagttgcccaccacccccttcagcctcaggagcaaggctacagctttctgagtgctctgacgttccatttgcttgtcccttggctcccatcagtttaaagtgtggctgagtgtttagcaggatatggtaccatttctcctgtttatctgaaatactcagcacccagcctgagtcgtttgctgtggtggtggtggtggggtctgtcaggaactacagcattcgggcattttgcctttgcttgtgacatggagggggcataggcagagagggaggctcattttggccatgtgacggtcataaccacattccagtgctctcatggttcattctgtgtgtctaggagactcgtgttacttttcccagtcaggaagaactgcacttccttcctgcttggtttaagggctcttaggccataatatgtaacaattctcatgattttgaatatcgttagtgcccagtttactaacttatagcttacttttttctcagacagtaatggctgcttttaactagatgatcagagaagtggtgagcttattgagcacagcacatccagagctatggtgtactgagcactgaagaaaagtttgcagacaggccttgcgttctgtgggccatgcacaggactggctgagggcattgattaaggaccagggactcacatcttatcacatggaattttgggaacttgaatcagtttatctggtatatatagtaaaaacttcagatttttatattaaccaggagaacatttacctatgggatgacttttgggaaggtgacattagcagtggtaggcgaggaagactctcctatttgggcgacttttgcacatcttccttgagtacttaagagtgtatggtaggaatggctcacatcttcttaaagaagttgaaattctgtgttttggctagtgaatctgtgacaagaagggggaacccgaaggtttccttttgtttgtaggggtgtgattcatctcctttggcaagataaagcaattaaaaaaaaccacaatggaaataaaaatgataattcagctattagaagggttaacatctctgcagctttaatattacttcttaaaaatatgaacattgtatgactagacaggatgttaataacttgacattacaaaaatttattaaatttatttttaaagtggtttggttcccccttttgaatgcataaagcgtgtgggagttggaatggatctgccccaggctgccaaaacaagattttaatggaaccggagtccttcagggattgtcctaaatccacataatattcttaagtcctggtgtttgcactgggacctgtgtattagcagatgtacgtgtgaataatatacgtatatccatccatcaccctggtgactccacatccttaagggctgccgcacatcaattattccacctcagggggtagagagatatttgggctagcattgaccttcttttcaatcagggcctccaaacagtatgttctggaagtcaaatagtcccttcagacagaacctctgtttgagcacgcgtttggcctgatgtctccatgctgaggagctgaggagtcaatgtgattacctgtgtcaggtgtggaggcagcgtccgggcagcgaatgaaaatcccgtcactcagagtcacggtcagcattcagagtctcacccatctatctccatcttgcataagttattagccagtctatcagggaagagcgtcaacctcactgagctgctctctctctctctctctctctctctctctctctctctcacacacacacacacacacagtctttgaaataaattatagattgaggagctagactcactttcaaaggcttggagccatttttatgaactgagatcttgggagcagcgtctctttaggaggaacaaggtttttgcctttttaaaaaaatttttttgtctgttttcaagaaaaagacttttcaaacacgtggttttaattttttaaaaacacttggaaattatttcttaaatgcacaaagttctctccttcagcttctgatagttgaaggtgtgttctagattgttgtgaccgaggaaccaatgacaaagccacttcattctgttgggaaaatgtacagtgactggccgtttatttaattgtgtgctaagtaccatatgatgagagggtaaagttaaattgatgattcaggttaccccagccagtgtacagtttatatggcaattatgctgggtcatctaagtgtaattggcaagtaattttgtaagcgaaggaacatgacagctcatttacatggtgttcaccgagtaaaatttggggacattcatcaaccactctcgagtgcagagtgatcgcattgatatcccttggcgctgcaggctgttggatgctggtgtgcgggatgagtcgtgaggtgtgcactcccctctatggtggttagatgtgtgccaggcactcttgttccaaagtgggtgagacctcagcccctttctcaaggagctcaagggtgggaaacagacctctcaataatttagaacaggggtcggtaagtggaggcttgaagcttgctgtggttataagcgtctagggtggaagatcagggaaatcttgctagtgagcacactgaattggattttaaaggatgttgcggctttgctgaaatagcacttgccagacagaggcacggcaagaacagagtcctagaggagcaagtagacaagggcgtggagaacccttggagttgagctgatagcacctgcagccagataaaggctgagcctgaatacatatgcctggccagccattcaaggacttaagaagaggtgggcctccatctgagctcttctgaagacgttgttttgtgtagtaacaattaactgtgctattatggtggactaggttttgttctatgtgtaccaagggatttttatctttattaccacctaggaaataggcactaaaattcttttcaaaaatgagaaaactaaatagacaggggttgcccagacttaaacagagagtgacaagggagctgggctttgaccttaactgtccaggtctgaagcccttgcctgccgctagcagtaacccacatgatgcttctggcttccttggcacactctgctggaattctagactaatcgtactcactaggctccgagagcggtgagtgtggccattctgctcatagtcctatttgtaagtttgagatgaaagtgcctgtagcatactaacacacaaccaatgtgcagtgtggagggaggcctaagaagggaaacgacgaggcttggagctagggcagtgtccgtgtgcagaggcgtggatggggacactggtctgggcttggtaagtgacctggcatgtggatcttgtcgcattcttgtatgacttctgatttccaaccgagatactggagaggtgacttgacaggagaatccgaggaacagggcagttcacagtgcttgtcacagagctcttgagttcctgggaagaactatgtgggctcaggataaaagttaaaagagacttcctcagagatggctaaaattagaagggacagtctggggacagaactgccctggggtagatgagtagctggatagcctttgagactcttctctctttgaaaattctctagtttaaagtaaataaaacttctcctgtttcccttcctaaactgcctggatggaaaaaaaaagataaaaatcaaagtattcaaggactggaaaatattgagtccaaatgccttgactatagataaaggaacggaagcccggagggttacatgactcatctgaggacacaccctcgagggaaaagaagacagggtcattggtttctcctccttaggtctcagtaacatttttgggggtttggtgtccatgtaggcaagcccctggtagaaagtgagacaaaagcaacagaagtgtttgtctctagggaagagattattaacaataaggggttcctgtcacatgacaacctaggccatttatcaacccgagagtgtgaatttaaacatttatgagtggttagggagatggctttatgggtaagaccattttatctgcaagcaggaggagctgagttcaaatatttagtacctacataacaagccggtcatggctatacatggctgtagacccagcactgggggacannnnnnnnnnnnnnnnnnnnnnnnnnnnnnnnnnnnnnnnnnnnnnnnnnnnnnnnnnnnnnnnnnnnnnnnnnnnnnnnnnnnnnnnnnnnnnnnnnnnnnnnnnnnnnnnnnnnnnnnnnnnnnnnnnnnnnnnnnnnnnnnnnnnnnnnnnnnnnnnnnnnnnnnnnnnnnnnnnnnnnnnnnnnnnnnccgttctaacttctgactccactgtcctccagaaacgttgatgttccgtgtgttttcttgaagtcgtctttgtctttgcaatgagattatgtacacattgacatctataattttattgatataattttgtcttcattgtttgtttgtatccgctatatatttgcatgtatcgcccagtcattaaattgtgatatatcttaccagctttttgtttatttatttttattagatattttctttatttacatttcaaatgttatcccctttcctagtttcccttctgaaaatcccctattcccttccccctccccctgatccccaacccacccactcctgcttcctgaccctggcattcccctatactggagcatagaaccttcacaggacctagggcctctcctcctattgatgactgactaggccaacctctgctacatatgcagctagagccacgagtccaaccatgtgttttctttgattggtggtttagtcccagggagctctagggttactggttagttcatattgctgttcctcctagaaggctgcaaatcccttcagctccttgggtcctttctctagctccttcattgggaaccctgtgctccatccaatggatggctgtgagcatccacttctgtatttgtcaggcactggcagagcctctcaggagacagctatatcaggctcctgtcagcaggctcttgttagcatctgcaatagtgtctgggtttggtggttgtttatgggatggatccccaggtggggcagtctctggatggtcttttcttcagtccctgctctgaactttgtatctgtaactccttctatgggtattttgtttccccttcaaagaaggacagcagtatccacactttggtctcccttcttcttgagtttcatgtgttttgcaaattgtatcgacaaagtcatctttgtctttgcaatgagattatgtacacattgacaactataattttatcttcatcttttgtttgtgtcctctatatatttgcatgcattgcttagtcattaagattgtgatatatcttaccagcttttaagaggtacttaaacacttactgaaagagctctcgttcgtcactttatccgtggcattttgaaaggtgcattctatactgggagaaccagcatctgacttgtgtggatgcagtgtggagcggagtaggagctcctggactcctcctgattgatgatgacttgtttgcttgcccgggccctctgacagagcaaatcgctcttgtttggcccattgcagagtggctcctaagcagagacggtctgaggcagacagcaatgacttcaagctttggcttttctaactaaacagttatttccactcccccaccccccgaaaagccttgttcttattttctgagggaatgaaaatctttgtgtgaagaagtgtcaccaagtgtcttactcatcggcatgtaagccatctctttaagtgacagtgggagtaagggttcatcagttcaacatgcctttcacatttggagactcctgactaataaataacctctggcattcagcattagaacagccaaaagaactagaatctggcacatgctgctctcacgcacagagaaaaacttagaaagacagaagattcactccaactttctttcttctattcatttagaagaaaaagcgtacctttttctaattaaagattatgaacacacagaaacatctggcctatatcaccacagcaacctcctaaaacggcccgcttgtctccagcgtgtcctttaaaaacgaagtctgtatgcagcaggcagcgagctcttcctagcttgtaggtcggcaccagccgctcacgtcactgacatgtcaccatgggtctttcatgattcttggggtcaagtcctgtgcagtcacagttgctgtgctcctgcctgtagtctcccctggcatcacagagcactcagagctccttgcctctgcgtctctgaagggactctctcgacctgcgtagaagtccattcattcttcatgagctctctgcaggccctgctaagactggatctcgttggcttccacagccgttatccaggtctggccttttaatacttggctatattttaatttagacaaactggaatcccattgggcgaggctattactgctccattttgctcgaggcaaaaggccctaccaattggtatcgcacataaaattccaattacacatgtattctatgctaggtcatacaactacacttgtacctacctctatgacccaatggattagaacataagctgccccaagactgcggttatgtagtgcttctttttacatatgtaaatctggtaggaactgctcaatgtatgtgttctatacacatataaaaacacacctagaagatatactaatatataggcatatataatatacacttagaaaaaagtaaaattcactcaagaaagaacctggggcactttttggtactcatgatgtctcccaaacatcccaggactcacagtgctcagggacctggtagacacacacagtgctcagggacctggtagacacacacagtgctcaggggacctggtagacacacacagtgctcagggacctggtagacacacacagtgctcaggggacctggtagacacacacagtgctcagaggacgtggtagacacacacagtgctcaggggacctggtagacacacacagtgctcagaggacctggtagacacacacagtgctcaggggacctggtagatacacacagtgctcaggggacctggtagacacacatagtgctcaggggacctggtagacacacacagtgctcaggggacctggtagacacacacagtgctcaggggacctggtagacacacacagtgcttagggtcctggtagacacacacagtgcccagggacctggtagacacacacagtgctcaggggacctggtagacacacacagtgctcagggacctggtagacacacacagtgctcagggacctggtagacacacacagtgctcaggggacctggtagacacacagtgctgaggggatctggtagacacacacagtgctcaggggacctggtagatacacacagtgcccacagaatagctgggcctctggcctcaccatgagatgccagaaggatggcaccactgtggacatttgagccattaaaagtggtcattctcacgtttccaatcctgggagatccttcagaagtgaccatttccacatttatttcctgtattcattccacacacactatctactttgtcagtcttatggctagttgtagtcatggtacctgagttttctgaatttacaacacatacagatctataagagctgttcatgccagatgttgtaataacccattgcccattggttaacttagaataattgggaattttttttctgctttctttttctggttgtcttaaaactctttttttttaattggctattttatttatttatttttcaaatgttgtcccccttcctggtttcccttctgcagctcacccattccatccctcctcccctttgcctctgtgagggtgctcccccacccacccactcattcctccctcaaccttctagcattcccctacactggggcatcaagtctccacaggaccaagggcctctcctcccattgatgtctgacaaggtcatcctctgctacatatgtggccggagccatgggtccctccatgcatactctttggttgatagtttattgtctgggagctctgaggagtcccgttagttgatattgtttttcttcctatgggattacaatccccttcagctccttcagagtctgatacccatttcagaggatgaagacttcatctctgaaccacagagaaagaggatgaaataagagtctctgaatccagagcatccagatgcctgcatcctttaaggaaatgaagagactgcatgggacccagggcaggtcactctgtcaaaatctgcaggtgttctgtgttctagagacctagatctgtttcctttaaaaggacaaagaggtggtttatctatttattttgtgagcatatgtgagggtgggagagtctgtgtgggtcagggtgatgctcaggactttttagtggggggtgggggtgatggctggttctctccttatcctagagatcacgttttcaagatggaagtcagggttttgggtttggtggcaggcaccttaaccttcacagctatcttgctggcccagacactttatttgtttgtttgtttgtttgtttatttataattaactactttcctcttgtgtgtgtatgactgtgagtgtgcaagacaaaggaggagctgcatgactcaggtctctcctaccacatgggtcctcagaactgaagtgaaggtgtccggnnnnnnnnnnnnnnnnnnnnnnnnnnnnnnnnnnnnnnnnnnnnnnnnnnnnnnnnnnnnnnnnnnnnnnnnnnnnnnnnnnnnnnnnnnnnnnnnnnnnnnnnnnnnnnnnnnnnnnnnnnnnnnnnnnnnnnnnnnnnnnnnnnnnnnnnnnnnnnnnnnnnnnnnnnnnnnnnnnnnnnnnnnnnnnnnnnnnnnnnnnnnnnnnnnnnnnnnnnnnnnnnnnnnnnnnnnnnnnnnnnnnnnnnnnnnnnnnnnnnnnnnnnnnnnnnnnatccagggctgtaatgccaatgctcttggcataaattcagtctcgagagttctctgtaccgtcagggagtggtgtgggtgttgcagagggctgtacacactccaggcattttggagaaaataccctaacagctaaggatggagaaatggtcagctatcaggttaatgaaaagaacaaactcacaaaagaaataaatcccttctttagggagaagtggaggcaacacaaggagagtgtattgaagaatcctttaacagcctgagatctcactaacaattctgttaatgcgcctgcttggctgccatctcgggggcctgttgcgaattctttacttgatattattaatggttaatgggtgcacctgaaatcaagcaataatgcaccatttgggtaatagttatattaaatggctcttttatacaacatcgagcttatcagattatctcattcctaataatgagcacctcgtcttttccaatttcctaatccaatgtttcctcatcatcctgaaacaccgccatttccagacgcatctgttctatactctcagcttctgtgatgtcacactgccgtgctcctgggtccctccattctcgcaggcactgagacagaggcccctgtgcctctttgaaaactggtgatcagcagacattcagtacagggaaatcgtgagcaaaagacaccaccaggctgaatttatagtgatgtagaaatgtttatacaacaggtttctccctaaagtttggcgaattcatcttagatgtttctcttctttctgcttccatttctgaaacctgcgtaacctagtctaaatggcattgcttcagtacagaggcaacccacagcagggaccgaaagcaaaggatgtagtaaacaattagatatccataggtgctgccttaattggactgatcagaagtattgagggatctgacgtgatggctcagaagttaggagcatttactgttcttgcagaggactcgggttctgttcccagcattcacacagtgactcacagccatccacactttcatttccaggggacctaactccctcttctggcctccacaggtactgcatgcacacagtgaacatatatgcaagcaggtaaaaatacccatacagatttttaaataatcatgtttaaaaggaaggatcaagatttctgagcatcacatagttttttgtttttgtttttgttttttgtttttgatttgactgaatacttgtagcagacggaacaatgtaagaaatgctgaatagcacacagggagacaaatattttctctttctggaatattgagctgaaatgttaccgtatctactgagaaggatggatgacacaactcatcattttgaattgcgtcagttcaaatccttatctctatgttacattgctatctctcttagtttcatactatctctctcttcagtctatctctgtctatggtactttaaaaagtcccctttctcctggaagaaaagaacaaagcagactcacccctgggcatccacaacccagactgcattccccaggttcagttatccactaacaccagagcccatgggctttggtcctcaagcctccattgcctggcttgatgtcatagaccacagacagtacgagagtcatggaaggaagtcccgatcttacaatgtatgattacccaacttctttaattaaaatgaaacccagtgtggagtcacctgatcctgtttcctgatgcttaataccaaacacaggacagagtattcatgtattgtcccacgacgtttaacagaagaaaacacattgcatattttggaaccttatcatgagaagccaatatttagcacactgtatttccaattagtgaagtgaggaatgaattcttgccccaaagactaatgaatgatttggttgctggtgggtaatgtgatttttccttctctggactcctgtggttggaatgcctttaaacatttcagagctggaaaaggtttttggaaaacatttgaatttcttaaaatatctagacttcccagtagagagcatcactgaacacactcagcaaatgttgactgtgaccacaaactagtgaaccctagcacgtgatatatctggaaagtagcaatcattaacctgcttataatttgcaagctaaagatggagatatagcagcagatgcctgataaattcaatagtagtagcacatgtaaggaggaggaggaggaggaagaggagaggaatggccaccaccaagtgtatctggggaggcttcctggaagcagtgactaaatttgatatgaaccttgaaagaagtcagtgactgtcatgagggtaaatctcttgctgtacttggtgtgtttatttgtaagacaacatcacaccataagaaataagcttttaaagagcaaaaaagtctggaaagagttggaatctagactgtagcagccagctgcccttctctgtaccatggctcctgcagagtcaaggaacagagaggaatcaaacgaccctgcatttgtggatgcatctaggcgacataaggctactgcgtttcttggctgccaacttctgtggctttgtaaagacttgcattactaatgatccttagacacgaaggaaagcgcacgtgtgcggtgggaattcgccgtattttactgaacactgccactctccacatagcctatgggatgtgacttttcataaaatcgtaatgaatgtctgcatttgtcgagcagtttccaaacagatgcactctgctagtctaacagaaacatttaaagcccagaccccaaatatcaatagcttttagtattgcaaattagtctgtctattgggtaaatagggccgtgtggttcttgataaaaagtagcaaacaattctgcacgcgtgctttgtgtgtgaccataagcaattctgcgtgcgtgtttcgtgtgtaaccgtaagcaattctgcgtgcgtgtttcgtgtgtaaccaccttcccggagcctgagggtcctgtgcttcttttcagagctttaagttgaacgtagacagtcactgtgccctcaaggaagccgtggaggaagaaggacaccaacttcttgagctcattgcgtctcacaaagcaggtaaatccccctgaaatattgcgggtctttatgtctccagactattaagagtgaggaagcattgccgtaaattactgcatatattcacttccttatgtattattaatatttacattatcagattgaccttcaagatttataaatgtttcatatactgcatacaatgctgtggtacttataagatgaaatactgcctccaaacggtctgttcattttatttggggcttgccatccgcccgagttccaattgaaatcacactcctgaaaacttcacgttgacatgctttttgatgtaggagctctggaagtaacattaagataatgaatgagagctgttcttatagacacaatgcatacccactagggtgaacatagacatcattatgggttgaaggcaggctgcccatacacatctgattatttccctgccggttcacacatgtggacgtttggcatattctctgtaggtctttgcattagcagaagcttaggccttcaaccggttcttagaccaatgttgatgaattcatgaaaaaaaatgcattatgaacaaaaagaagttttcttgtatggttccacttatcctgatagtcaaagaccacaaaacagggtgagttgaagctcccccactcccctgcacttactatacaaacgggaaaagaaccgcattaagcagatatgttaatgccaaatagcagtctcttgattctggcctatttactgtatttccagttgaattacctgtctgttttcagatatctttctttctgatcattaggaagtctccatgcagataaacccagggcctttatactggaggtgtgaagctatagccttaatgacatttacacaccacgatccttccacttttattgttcacaccaaaccaccaagtctgcgtcagtttctgcacatgcctgccctgtttctgcattgttatgtcttagcattgccagtctcagctctgggtggcaagtgccaggcaatgggaaggtcgtttagaagcatgtgtacggcttgaaatagccacccagctttctatgtcacaacccgtagcggggtaaagatgcagccgggcccacaacttgtgctttcctctcctttggagaaggactgaaggacatgctgaagatgattgcaagtcaatggaaggagctgcagaggcaaatcaaacggcaacacagctggattctcagagccctggacaccatcaaagccgagatactggctactgatgtgtctgtggaggacgaggaggggacggggagccccaaggtaagtggcttgaagtttgccttattccctcttattcctgtcttcttttgaactaggcaccactgaagttttctttccacccctaaggctcttcttttctagtgggtaaactttgtaactcctctgtctctgtctctctcctcccatatatatatatattagtatgtatatatatcttggctgaaaacaaaacaaaaggcgacaactttcaagttttccaggaagaggtctctttgtacaaagtagcagagcagaagggggacaggattctcagggggtgggaggaagagggggggcgcataaaacatttagtaaacaaaacataaagcatctttaacatgaataatcagaatggttttaaattgttttgttgcaactataaatcactataatcagtgcaatcactcagctctgacatccattagccgcttggttacagcaaattaacaaagaagagagaaagtgattcattatctcattcctgttaatgactatcagatgcattgcctaattaggggatggtcattgtagtgggaagaaggtcatgtgctttgctacaaatctttttgctcagagtgtaacttctccataatggcgcctgcaccgaatacagcaaagtattttttaaaaacgagtattggcatgttttgattatccattttggatttacaaaatagcctgtggaacatatgccgctgaacattaaatgaggcgccttttaagtcggaacactacggtcgtaaaggtattctttggatttacaatgtcgaaaacaattttattaatctgacattttcttaacagtttctcaatttgtgaaagggactccagaaattagttgcctggtagactcaggatctgaacatattgtagcacgggggagacagattgaaaagttcatagtttctattcctggaacggacagagcgagtaacactccccaaccgcatttcttcagcacgcgtgtgcacgagcattgcgctctgagtgagctagcacccactgtgccctctgagactcagacttttaatacaggcagagcagaaacccaagccagcctcacaacattgagaccgtgcagcctgtgaaaagcccaggggattccctttatctgttggcaccagaattgaacggcaagatcagcccaactggaacctaggtcgaagaggtcacatttcaggaaacacctgaagaaagagagagaggtgcgtggcacatgagcacatattttaggaagtgacctgatgggaggttcaaagctgcagctagcaccagggacctgactgtagtcagcagacatctgcttgcagaggaagcagttgattggcaacggcttcactgtggaagtggagccgaaatgacaagaaagcacagaactaaaagctgggttgtgttttatttatttaacagaaagaggggctgagaagtagactcatggtagagtacttgcctagcatacatgaggacataagcaagattgccaacaccacaaaaccaaaccaaaagctctgtcatgtccaattcccattcactggctgccctgtattcagccatcacagcaaacactaaacacagtcaagagaccccagagaggttaaccagtttgcctaagggcagacagccactaaatctcagagctagggctccaggctgcacttccaggcttagatcccctgttctccctctccaccgtctgctccctgctgcctgggctcagtgtgcatgtagagctgttagagaggtggggcttgtggggatggagggttaggatgcttttgagactgtactattaaaacgatgaagggaaacaggtcgcaggacagaagagactcagaaaagttgagggagggttgccatgagggagtgacatgccacagagtagtggtctgagaagggtaagcatcgaggaggaagctgttgacttgtgtgtgtgtgtgtgtctgtgtgtgtgtgtgtgtgtgtgtgtgtgtgtgtgtgtgtgtctgtgtgtgtgtctgtgtgtgtgtctgtgtgtgtgtctgtgtgtgtctgtgtgtgtgtgtgtctgtgactaagtgggaaataaccctggatttctgtgtagatacattctccactgtctataagtcacgaggcaggggtggatgacttacatgaggaagggaggacatgatataccacagggatctccagagacgtgcacctcagactgatgggagagctgtggtgtggtgtggtgtggtaaagctggtcaacaggactgggtttcagtcagcttgtttcctgagccagagcaaaagagacaacatctgccttctcagaaaacctcctctgagcacaggtcactcctcacgttctaacaggaactcctgtaagaggcgtactgccccccacacacacagaatcaatgaatgggaagatgtctgagacattgacacttaaatagcagacagtaccagctaaagtgtttcaacaaggattgtatgattaaactgagctacattttattctggcaaaatgttccatggccattagagagcagtgttttagagggctttgtaaaaagtagatgatacctctatttagctatgtatttcaaaataactttgacttttctaagtctctaccttgaccaagaactactctaagaagggaaaaaagagtaagtataaagtgtaagagttaaaaattatttaaaaggtcaaatgagggacacggtgcactgggaaggggagtctgaagttaaggatgagaaggggacatgaataccctggcccgtgatgatccctgtccctgtcctggaaaacagaaggcaaaccacaaacacctgcgtttgggtcattgcagaagagacagtgtcccgagtttcgtcagcttacagagaacagacttgttcttagtaaggcatttctgctctgtggtaccttcaggtcaccacacaaatgtcacaaatgaaaatactgacaggaagagattgtgtgtgttgtctgcacacggggaacccaggagctgcagagccaggtgatcttccctgacaaacccagccatactcaaggacagatgtaaaataaacttaaggataaggatgcaatgggggaaagatcaggtttctttttcctatttgtttaatgtttatgaattgtttctcttagacttgggacaaactaaatttcaaggagagagacttagagtgcttgaattaaatggctgtcacttactaccaggtgtctttgggaccattacccaacttctctgtgtctcctatttctcatttgtaaaatggaggtgatggggccaccgagaagctcagagtgtggaggcatccagcctgttggcctgggtttaatctctgagagacacacgtggtggggttcaaaaagctaactgcccctaaattgttttctgccctccacatgtgaactctaacatgcctaagtcatcccccaaccctcatagaacataataacattttaaaaaatttttgaaggggtaaagataagttcttcctcaaatatctgtcatcttagtttaaagaatgcttacaatgagtgggtgttttgtggaatacccacagtcccagcactgaagaggcagagcactaagatcactgaagactggggccggcccgtccactaaatgagcttcaagccagcaaggacataaatgcagtatgcaggacagagccttgcgcagagccattcctaagcaggcaaatggaatgcagaagcctttgccgtctaatgacacaagagacaaacgatcacaatggatttgataaaattccaataggaactggaacaagatgctccaagtagaggagggagaaacatcaaggaaacacacggaaggagcggactctttaaagtaaagacgggaagaaatttgccagtgtgaaaatgatgggcagagagattagcatgttaaagactcagaagtgtgagatggttggtgggtctggaacccataaccactgcataggttatgcttgcttaccaggatctgcactgtggctcccggtatgaaaaattgatcctgactaattagcgattggagcaataagactccaagtctgaaggacacacatacatattgcttaagaaatgtctgccatgtagcatcaagtagcgcgagctgaaataggccacactagagctccccttgactgagagatagcctctgctgcttcctgtcccttccaggagtcttcttcctatgacgtgaccttgctcgggtcgctcacaaggtgtgccatgaaatgcagccccaaacatggcagttacggttttctgtttcatctgagacctaagagagggatgaaaattaaaacatgataaaaataactccagaactcatcttaggtttacttcagaagcaactgggagcctgagaagcgtaataggaaatctaaggaatatatctagggggtatttttcttttttaccttgtttgagagactgcgggaaagggcttggtcttagaaatcttgtaaaggcggaggagaggaggcaattcaaagactgtgggaaacgtctcccccaggacttggcagcatgcgttatttgttggatttcattttttttttaaagtgttttcccaggactgcgagatcttttatacctggaaatagagaatgtaacccatcagttttagaaatacaactttagcatatgcatccaagaatttgaaatatgcttgtaattgtgtattttcagaaagactgataaaagtttatcaacttaaactagaggtttagtattttaattgttttagcgattcgcagttggatgatttcaaaatatagtgactacctaacgttttaacatggttttgacctttcaaggtaaaagccagaatatcctaaggaagagaaaattagtcgacattgtctcctttaaaatattctcatctgccctctctttattttcctgaagcttggcatccatcaggatgtagaatcaggggccaggatctcccccatgagacttacccagctttgtctcactgaaaatatgcaacaactgcctctctgtccttttaaaggaaacagatctaggtttctagaacacagaaaacctgcagattttgacagagtgacctgccctggatcccatgcagtctcttcatttccttaaaggatgcaggcatctggatgctctggacttggggactcttatttcatcctctttctctgtgggtcagagatgaagtcctcatcctctgaaatgggaatcagactctgaagcttgtcaagaccatcagctcaacgctagctggagagcaagctcacaggggcctttacatatgcttgcgagggcctacagataagagttttaggtctgactgggattgggagttgtgtagcttttgacttaggtagtcagtggaaagttgagtattaataggcactctggcatgtttgcttacccgaagtccaagtgctaacctagtgcttaggcaaatgagttgtgtaactctgcttaattaaagaatatgaactagggggcatgttaagaagatgctctctgcatgagatgacacctttggggtaatagtgcaacacgatgctgcggttctgggttctggaatatgggtcgatcctgaatttttcaaagcaccactgagactaagattatctctgcactaagctctgttctagctaagggacataggtcatcagtgtgttctttactataagttcttcataaagagcattgaggtcatagcgggaatcacatttatatattatcagttcctctactgctatacactcatattaaattctacttgagacccctcctttttttaacctaaagcaaagaaaggcataggcacataatatcaaaaggaactagaagtgagatagtaggattaaattgcatccaacaaggacagagagacaccaggcaatggcctagctgtttatttattgagtgctgacaggaaactctgcccggtgctgagctgtacatgagagaggacacgctttcctgctcagcggtcttatcattcatgtaagcacagagtgtaatggcttgccgaacgggcttcgggctatcttagatctagaataatagatcacctaagattcagatcatcttaattaggatgttggcagactgaaatggaatggtgctcttgatgaaagcaaacgaggaggaagtgcattcgcacatctgcagcctctacacagcatctagccggctcacagcccttccaacagcccttccctgctccagcggagtcatgatcctgctttgaggacctagggagagcttccttctcttatggatttgtcaccagctcctcttgtgttcccagaagaggcaattctgtttcgaaaatgctttatggtttttgaaagtcaacaacaaaaatgagttacttcgttgaagaccagtgtggttactaaatattgattcaatccagttttacaaaaggtttctctaatttcctattttgcatattatcaacctgtggctttgatgagttgactggggaaaaggattatgaaaataaacacagctaatggtaggtcaaaggtcaaatagtggccatctctatacatgaatagaggtgagtatatgtgagtatagtatagtgcagtgtagagtagtgcagtatagtgcagtgtagtgcagtgcagtgcagtgtagagtagtgcagcatagtgcagtgttgtgtagttcagtgcagtgcagtgcagtggagtgtggtatagctgataagactacagcttaaggtctgtcttcccactgtagttccgtcactggtgaccatgactagagaatagaaacgtttgcctcagcaagaatttgagtgaaattctttggtgtctgatcaacacctagaaattttactgaagtaagtaggcatttgacttttccctatctgtttactggtacccagaagttaaaaagattcatgctgttggctactaacttagagtccatagaacgcagtcttctactaccacacccaaacctcccctttctattcattataaagacaatatacaataaacacaatagagagattttttctttaatgcacagtggaggtcaccatctgttgaaactgtcatatataaatacatacacaaaaagtcaagatacaaaatcgcttctaaagatgctttcaaattaatgagtagattctttgaaagagtgagacaatggcctcagtgtgtcacttactcttctttcttggaatgtgttgtttctgtcaggggagcgcttggccagcgagagccttgcctgctgaggagatcaccctgcattgtgttggctcttgtgtttatcgagtcacacaggactgcatataaaacagcgctttacaagtacccacccttaacacttcacactcctgtttagctgctttcactcttctacccagggatgtcacttctatccagggatgtcaaggggtattgagatggccaccttctgctcatctctctcagatacggttgagagnnnnnnnnnnnnnnnnnnnnccagcatatgaaacacaaccacctaagtttctcaggtgtctgcctacagtctcatcatttccccctgggcttctctacaaagctcactgcttccacaggatgcagctctgagtgcatccaccctgctggtcctccctgtcctgtttgcaacaccattccctcagaatccttttctgtaccccattgcttcgcaacagacgttctttaggtcttccttcaccatagctctctacaaatacctctcattttccagactgcccagttgccctttgagctcattcagctccctgcatctttgtgcatgtttcctccctaactctctcctcactggcgagtgccagtgctgggttcttgttcagctcacatctatggcaatgtgatccagtttattttcagtgtccctgttacatttatacctcagttctacacatcacatctgctctctgaatgttatattagagatgcactacgagctgcatagtccctgaacatgaggaccatttctggttctccattctatatactgcaatgcagtgctcagcgtaatatatctctcagggagtatattaaaaaaatgcttgtttgaataaacaaagatttcataacaggaatcaaaatagtaacccatattggaagatggtgctgagtagaacgtgggcttacttagctaactggggacgcattcggggaaatcggtatggttgtctcctactgattcttctccctctttgttctggctgctctgagctgagcagaccccataggtgacatgtgccccaccactgtgacagtcttcctcactttaggcccctagatgaaggggccaatagtacttggacctttgaaaccatgagtcagaataattctttcctttaaggtatatatggtattttgttccaccaatgaaaaattataaacctaatggccatttgtctctttaaatagctgggatgagaaggaaaaggtgatttttgtaagctaatatttcataaaacaacaataaagtatnnnnnnnnnnnnnnnnnnnntgacttttcccctatctgtttactggtacccagtaagttaaaaagattcatgctgttggctactaacttagagtccatagaacgcagtcttttaactaccacacccaaaacctccccttctattcattataaagacaatatacaataaacacaatagagagattttttctttaatgcacagtggaggtcaccatctgttgaaactgtcatatataaatacatacacaaaaagtcaagatacaaaatcgcttctaaagatgctttcaaattaatgagtagattctttgaaagagtgagacaatggcctcagtgtgtcacttactcttctttcttggaatgtgttgtttctgtcaggggagcgcttggccagcgagagccttgcctgctgaggagatcaccctgcattgtgttggctcttgtgtttatcgagtcacacaggactgcatataaaacagcgctttacaagtacccacccttaacacttcacactcctgtttagctgctttcactcttctacccagggatgtcacttctatccagggatgtcaaggggtattgagatggccaccttctgctcatctctctcagatacggttgagagatggccactgagttgtgatggcgccagaactctttcagtcttatttcccactatccttaaatgaaaggtaacacttctcaaaaaatgctatatgtagaggtttactaacatatcacacagacagacagacagacagacaggcacacatgtccgcacgcaggcacgcatgcacacacacacacacacacatacacatttatagggagacgttaactggattggaggcattctagtcccaacctcaaggcccagttccacacaacttttaggccactcttcactgaacttgggcaacagattctcatatttatacttggttgagcattgtctcctggactacgtaaatttgtggacctcagtaagtgagaaagagcagaagaggaaaaaaacaaaaacaaaaaccaagcccaaagaaaagactcagataaatgtaacaagagaagaagaagaagggtgaaagcaggagccattaattcagggacatgccacagtccctgaaagtcattgtctgagcttggctgtggatgagtcctacctagcctgcccatgctctcctgtggacacggccggcctcccataggctgcccacatgaggcatgcgggcatctctggtttcttgcctctcttgagtgtaacctctctcacacttactccttcactctggacaccaaagtcaaaaaaccatctttatatttgacatcacagatatcattgtttgaccaccatgtgctttattacatgtgtgttagtatttatagaagccttattatactctaggttcatgttcagccctttacccatttccctcgcataattgagatgcataccaatattccattccctataccttcttgtttttctttacttaaaatgtgttcccctctcttttctctgcctcattcatggctctcacagaccctctctctataatgctcttattcatctgtaaaatcaatgagtattgactgcagtcttttaaactccatgaatataattctaaagggagtgagcctaatttcaatctgattatatatgagaagacatttaccccacttacagaatatgggttttatagtagtatctaatattcagctaagttagaagtcaggagatattggaggacagacatcctaggtaaaaacaaacaaacaaaacacaaaaaaagggaaaatttgaaggaccgttaggaaaggactgctaggaaaggacaagcaagaagagtttcactcttttgaaactggaaagcccctgtgttcatgtgaagggagagaggccttatggaggttaaagctgagatgcattgtagagagctttaagtaataggctgaagagttgctatactcacatgaatgcttctgatgattcagtatgtccatagaaaacagatggctaaggccaggtggaagagaacggctgtaaagtcattacagaggcttaggagcacactcttgttgtcctgggagttgggagaccaaggtaggagaatcacaagttcaatgccaactggggctacatggcaagacccaatcttattggttatcagactattaccattccagggaacttgaatttagatatgcaaaagaacaaccttaaagtgttcttgctatcacctcttaccatctcaagaaggcatgagcacagcacaataaaaatttgagactacattcagaaacttttatgttatgcaattataaatgatatatccttataaatgccttactgtattgatggctattgataatcttttactgcctttagttttaaaattaagctttattattatatgtgtataagagaaaacataggatatatagaatttggtaataaatgtgcatttttaaaaagcccctgtggggtcttgaaatatatccaccatgtttaaagaagactgccatacagtgaatcagtgcaggagaggaagttacttaggggtggggatctgcgaagttcaagaaggaatatgtcttctccaatcaaagagatagaatagatgaatgttgatgataaagtaaagacaaagacaatggatttaggatgatgtcagacactgtgactagtctctggagaaatgcttgccatagagagcgggcagagggagagaggcaggtctgggagagcagagtaggatctgaatccccttctgagagttcgtaccatgtctatcctggctaaggtgaactgcatttactgtttatgctgcagtttaatggttaatcatacgcagccttgtgacatcaccttcatcttgacattccacttatctcttttatagtcggctttgagggtgaggccaccaagactgaaaattccttggaagagcaagttcatcttaaagtttgtttgcctcagtttgcataatgctccagtgtacaatatagtttatttacatttatcggcttactatgcattttctccttaatgctgatgatggaactccactgtatcttcgcatctgtcacaatgcaatgtttatcctaactttgtaaacaatggcccactctttgattttctctgcttctcccgtatttccatttcctgttggttttcattccaaacaaaacaatcttaagtgaaccttaagtggtcattttacctattttcccaataatttatactataaaagagaaaatgtccacaattttactactaccactgagcttacttaaggcaagtccctttggttaattattggagttggtcactcagatttcacatctactttatttttaagttgttttaaaatgcttgctcaaatggtatattctgtgtaacttccttaaaataaaaacctaaaagcatctaaaaggaattagtaactggccagctcactagttgatgaaatttgtggtctttgctttaaagctctgtaacaaagttaggtacgattgaccctgaaaaggtagaggtctctaaattgacataaattcaaagggcagaactagatcataccagtatttgaatgtctaacaaagtctaatctctgacatattatatttggttcactacagtctgtgttcataaatatatccttctagtaaatgacaaatgtgaggtttagctaacataataaagtgtgtatgcttctagacctttatagactgcacacagctggagagctctgccctgtataatgactgcagggttcctctgtatatcgtttctctggaacacactccacagagcagcacatgcccacacataagcactcatgtgttttcccagctttgttggactcacttccttgctgccctccatttgctatctcttgtagatgcccggacttcattctaccaataggattccaggtgagggatactaaatttcactggataggtgcatgtggataaagtccgaaatcattcattcatagcaagaacttctgacccaattctgaggccagaaaggagtgttgtttcttcaatatattcaaacctatagtgtttatttgagccatccaaattaaagggctatgcattttttaattatgaggaattttgaaacacttcttcatttcaactcttctcgttttgttttcagtctcagtcccaatgcatggctccctccnnnnnnnnnnnnnnnnnnnnnnnnnnnnnnnnnnnnnnnnnnnnnnnnnnnnnnnnnnnnnnnnnnnnnnnnnnnnnnnnnnnnnnnnnnnnnnnnnnnnnnnnnnnnnnnnnnnnnnnnnnnnnnnnnnnnnnnnnnnnnnnnnnnnnnnnnnnnnnnnnnnnnnnnnnnnnnnnnnnnnnnnnnnntccttcctctccccctctttccctttccccctccctgacccactgcccctttctccctttctttttcctttgcaacatgaaaatatcagatcatagtgtgttataccgctgattttttttttattgatacattctatgacatcgctgatcatgactgttttagggatgtgccagcctgcttggcacatttcaatttccccattatccaagacttaggatattctataccttggcctaccgtgcactttgcaagtgatttttcagcgacactctttttaaaaaaacactccttattactttccttgacacaatattctaagaactgtatatgcttttaaaagggagctttctggctctcattgctcattctcaatcatgctcttatattactgtctttttttctttaaactgaagttgacaagaataatatgaacagaaaacaaatgtagttttcaaagtcttcattgtatagtatcgttatattttatgtattttagaatgaaatgaaatcatttttattccctaataagtgggcttcgtgactattactgtaattcagtcattggaaattgcctttcttttttatttgaacgctaagaatcattaactgttcaatataggacaaagagaacaacaatgtgaacaaagatattctgagtaagggtagctctaatgtcctcagtgtttgtctgccttcagagttacttttgtattttgtccaagtgcagagtggtttgcagtcgtattcctaaatcagacctttgagaaatggtatattcaattgttgtatgcagattattttagttttagttgtgcacaaaaagcttaatgacaatcctccattggctcatacacaaaatggaaatgaggagcaggagtttgaagatggaatctctttggaaatcctgcattttaagcagatgttctcttacagcctcctgtcaatgaatgccttgaaatagaagctcttggtttatgtacttttccaaggcaatcaatagttctttcttcccataaatagtaaaattggttattaggaagtgtaggcacacttgtcctcataaaagggaaatgggttgagcttgttgcactaatgatttaatcagcaacagcaacagcaaataacccttattaaacttaatacagcaggccctgcagcctgcgtgacattccttcttcctgacagaaccacttgttcagccttcatagctatcttctctcatgtggtgtcattctagggaggtgaatcaccttcctccgccaggcagtgaatcatggttggtctatcaaacagacaaaaccattcctttgccatgaccaactgtaattggtttgagcccgaccagctgccatacactcatctggtcagtgaactctggagagcagtctctacgatgctctggaaagatttcctttctagtagaagacaaataagaagaaagggctccctgcaaactctaggtgctttctttggagagggtgtgaagctgctgcctgcagctgctccctgtagctgttactgtcacctgagctggattaagaagttgcactcaccccatgccaagggtggcagaagggacgggtgattctttttttttttttccattttttattaggtatttagctcatttacatttcccatgctataccaaaagtcccccatacccacccaccnnnnnnnnnnnnnnnnnnnnccactccccctttttggccctggcgttctcctgtactggggcatataaagtttgcgtgtccaatgggcctctctttccagtgatggccgactaggccatcttttgatacatatgcagctagggtcaagagctccggggtactggttagttcataatgttgttccacctatagggttgcagatccctttagctccttgggtactttctctagctcctccattgggagccctgtgatccatccattagctgactgtgagcatccacttctgtgtttgctaggccccggcatagtctcacaagagacagctacatctgggtcctttcgataaaatcttgctagtatatgcgatggtatcagcgtttggatgctgattatggggtggatccctggatatggcagtctctacatggtccatcctttcatctcagctccaaactttgtctctgtaactccttccatggatgttttgatcccaattctaaggaggggcatagtgtccacacttcagtcttcattcttcttgagtttcatgtgtttaggaaattgtatcttatatcttgggtatcctaggtttggggctagtatccacttatcagtgagtacatattgtgtgagttcctttgtgaatgtgttacctcactcaggatgatgccctccaggtccatccatttggctaggaatttcataagttcattctttttaatagctgagtagtactccattgtgtagatgtaccacattttctgtatccattcctctgttgaggggcatctgggttctttccaacttctggctattataaataaggctgctatggacatagtggagcatgtgtccttcttaccagttggggcatcttctggatatatgcccaggagaggtattgctggatcctccggtagtactatgtccaattttctgaggaactgccagactgatttccagagtggttgtacaagcctgcaatcccaccaacaatggaggagtgttcctctttctccacatccatgccagcatctgctattacctgaatttttcatcttagccattctgactggtgtgaggtggaatctcagggttgttttgatttgcatttccctgatgattaaggatgttgaacattttttcaggtgcttctctgccattcggcattcctcaggtgagaattctttgttcagttctgagccccatttttaatggggttatttgattttctgaagtccaccttcttgagttctttatatatgttggatattagtcccctatctgatttaggataggtaaagatcctttcccaatctgttggtggtctttttgtcttattgacggtgtcttttgccttgcagaaactttggagtttcattaggtcccatttgtcaattctcgatcttacagcacaagccattgctgttctgttcaggaatttttcccctgtgcccgggacgggtgattcttaatatcaccacatggctgaaccgaccaggtctggaggtagcatgcccttggcaatttcataacgtccttcttcttgagcctaccattagttggaattggagtcttcatcaagtagacctgaccctgtgaactaatctctaaataaaacatttgatcctgattgatagtttcaatgtgcaaatttagttgctattttttaagctaaactttactcctaggtccagcatatgaaacacaaccacctaaggtttctcaggtgtctgcctacagtctcatcatttccccctgggcttctctacaaagctcactgcttctacagaatgcagctctgagtgcatccaccctgctggtcctccctgtcctgtttgcaacaccattccctcagaatccttttctgtaccccattgcttcgcaacagacgttctttaggtcttccttcaccatagctctctacaaatacctctcattttccagactgctcagttgccctttgagctcgttcagctccctgcatctttgtgcatgtttcctccttaactctctcctcactggcgcgtgccagtgctgggttcttgttcagctcacatctatggcaatgtgatccagtttattttcagtgtccctgttacatttatacctcagttctacacatcacatctgctctgaatgttatattagagatgcactacgagctgcatagtccctgaacatgaggaccatttctggttttccattctatatactgcaatgcaatgctcagcgtaatatatctctcagggagtatattaaaaaaatgcttgtttgaataaacaaagatttcataacaggaatcaaaatagtaagttgtattcatgccctttccattcatctttagctatttaagtacttatatgaaatttgtaagctctctgaggttatagagaatgaaaaggactgattatacttaattaacatggtggaacatagtccagttatgtgaaaatctggagatttcagtgctgaatattctctaagatgaaatttcacatttaaaatggtacaggtaaaggaaagcaacctacaacacatatacttggaaatctgttcttctaaaaacattttaaaatggagttattttatgaattagctaattgttagctgagattctggactaattaattatgatttaatagtcagtgtggatagctagtactatcaccccattttttaatgttaattttttatctaagtaattagtactaaatgccaaaaggtaatagtaaaactatataatatcaataaagtataaagtttagtgtttattatctgttttctgagcctctgtaagattatcattccttaacagaatgtgagagttacattaagtttaataaaaatgccaaaaagttggtgaaagggagaatagagcattgtgcaactattgtttctactgtttgattggcttcttctcacttcattaactttaatatgtcaggcatgtctctcattggcacatggcagttggagacttgatttctagctggtgggctctggggagagaactagatcccgaagacctctgatctaaccagtggattaatttcctggggaacccatgtattatagcattattggaagatggtgctgagtagaacgtgggcttacttagctaactggggatgcattcggggaaatcggtatggttgtctcctattgattcttctccctctttgttctggctgctctgagctgagcagaccccataggtgacatgtgccccaccactgtgacagtcttcctcactttaggcccctagatgaaggggccaatagtacttggacctttgaaaccatgagtcagaataattctttcctttaaggtatatatggtattttgttccaccaatgaaaaattataaacctaatggccatttgtctctttaaatagctgggatgagaaggaaaaggtgattttgtaagctaatatttcataaaacaacaataaagtatatggcaatataactattattggcttgctttgtagtttaaaaagccctcaaatttaatacatttttccttaaagattaaattaaatatcagttattttcattgaggaagaaccaactttgagacgaaaaatgataggacaaatagaaaacttacagagctagccagtggggtgctaagagcaagtttatatatcttcacatctcaagtcagatggaatgtggtgacccaggaatgtcagagaatctcttcgttagctatgctatctgcacatgacaagtgatggtgttccctcccctctttccctccccgaggtgatcatgtaagagttgactatttcataggtgattgtcagtagttcagaggtattctattaataaactcctatagttactgccaatctgggagtctgattcctcgttctcctgcagagctaggtggggtggttgacatttctgggctgtatgttggacctttgagtggacataagatcataggaaaataaaaaggaaaatcataggattaggggaaagttagagatgaaaaaccaaaggaacagcctgaggtaaagacagatctgaaacaaaatatagcaggaaagagtatgaagaagaaaacaagaagtgggtcctggacagattcattaaatgaccaaaactcagagtcaaattcttcacgagtttcagtggtacctaccattggtgttaacagtagtgacagttgtacatgaggatatcagtcccggaatgggtcatggtttttacatcccatcatgtggtttttgacgttccttcttcagagcaaaaatgctggtcatgtagatcttaacaggttccactcacaacaatgtcagtcttcaagtttcagaataaatcttaaggttctagagatgtaagagataacagacccaagctcttgaagttttatatgaaagtttattgtgaatgtggttctggtaacttgttcaggattgttgatattatgattttattaacatgaatttagagatctacagtagctttctgtgggtcatttattcttgctgggtgtgttattcatagtgtaacatctgacgtatgacacttggctagtcgatttaacaggggctcagttgctgatccctcaccaccgttcacgtctccatctccttgctcctaattccacagggcttggttcaaatcaagaaaggagaatggttcacttacaataagggctgtgaggaaagggcttcgggctctcatggtcttgtctgtacaatgcctcagtaaattctttcttcctgtatttgacactttttgcttaacaaccaggatgcttctgtggggtcaatctccagagacaaagaagcatgacctgtgctgcagacatagaagactcacaggagaaccaaagaagaaagcttttattctaagtaggtttatctatgtcagcatctatggctcgagccttatactccctgtataaagctgagtaccataccttgatctcctaagaaacacagagcagtaagtgggcttcatagcctgtctgcatctgactgctctgaccatgttaatcgtcatgtgttcataaaagcatacaaggccccagggatctgtgttgggcaaagtcaataagttgtttagtttgtgcacaatttggggagaagagagtagagtgcaaacgtgaattgacagtgaccaagtaaatgaaagtgcttaaaataaatgctggtgaatggctttttatttaacggtattgttattccaaatgaaaaggtcttgataaatataacttaactttgttacttgcaaggccaataagaaggcattctgcaagtacaggaagaaaagcaagctgctgggtttatgagtccaggaccctgtacaattacacatagcatcgaagataccagtagtagttgatcacaaatgatgacaaagcatagagctaataagacagataaaaatatgctgttcaaggaaatagtctgcttttatggagcacatgacattcctgcatcctgtgtctgccatgatataatgaccctattaacagaaaagaaatggaagataaggagtcagcttgcttgctgcccaagcccaccataacactgtaaattgcctaaagtaagtttacagctcttaggaaagaaattacacttgttgaatgggcctttgggctagctggagaaatcggtaatttaagagatgtggggcttaattctgatgaaatttgattcagatttctcacataaaacaatcatggctttttataatatagaaaaatacgagacaattaaggccaggaaaaaaataggcctgagacaataaaaaatcgtaccccttttcctgttccataaaactatggtagagtgctaagtaagacaaacaaccttataattataaagcaagttataagaagttatttttacactaaaattcacattaatggcttcagccacagcacagttattaccaattgctaataacttgttgccacaaacaagcttgaaatttatttcatattctgtagtcctaataatttttttgaaaaagtatggcattcgaacggcgtaattaaaaaaagtagaataataaacctatatatttatgaagggcttgtgtgtgtatttgcttaaagtaagacagataatttctagtgattttgtgagtcacacggtgaataattaaaataaattcaaatattatcatttcaatttccagtttggtgaacataagcaaattattatgtttgttttcaattcctgcaaagcatattaaaatgaacttttcctcaatttaagtaatgtgtataactaaacttccttcccactgtgcgatggtttcatttattgctgtttgtaaactgcctgggatggatgcggagtggattggacttgggactccttgaacagtttcttctgaaataacactacatacgttaagctcaattacacatccaaacagccacggctcacttttggtaatttattcattgatttaacatagcacccagaagagccatgcctgctgtcagttttgtaatatattatgttttaaatatactcatgctcacccatgcacaccattaaggtgtgcataaacctgtgtttttctctcttgacagctataaatgtttgttattattacacaaaacatatgttcatgttgtttttgtctaaattattctatctggggctataaagttttaatgttattagttgcccttagaattttaatgtttcactgccgtaaccttcttaggatttctgtgcaattaaatagaaactatttcactgcagcctggaagaacaatatattttattcaaataaaaaaacaaaaagcaaaaaaatccaccttcttgctgcattcttccagtatgtcaaaaatgttcagttgacaacttctcctttttggttcaatggtggtcagacggggtcacatctggtgaaacgttcaacattgttcttcttcctgcctggcatgtcttggaaagacacggattaggtaccatttcagtcaagggaagacacttcaaacagctttctagggttgttcagggtactgccttgatgactgcatgtggccttgacttcagtctaaagtacatggagacctgcagggactaagctcagtctaaagcaggacagacctctaacttgcctttccctgccaccctgtgcttaggtagagagtggctttatttacataacaatggaaacagcatcatttggcagagtcatagccatcaatgaggtgtttctgccctcctctttgtattcactggacctgagtttccacaaaatttgatttatttttaataacctgactccactcattaatacacaaaatttctggctgtcagcagtacttctcagccagttgaccccttgcagtatattcaacagagtactcttaaaaaagatgctaaccctcatgaagaaataattctttttctttaaacagtgatcctgagataacttacatcacggaactagaatttttcagtgttttcagagctgatcatcaggaaaccgaattagtgactgtcggctttcttctttaacagtacccagttaaaggcattctccagaaagggaaccaggaattgaggttcttaaagcatgtgtgtgtcaggagcagtctgttggttctactttccctgtgtaatactctctgcaaagcctaattaaaaagttaaagccacattttcatccctgtgcagacttcgtttgtctcctcctcctccttttagagtattcacaaatgacagaaattaaagtatttagtagacagaagtcactgcttaaaatagtcgctttagctaacgtagaccatttttatctggagattttgccagttacatgatgaagttggcagaacagagagagggtgcgtgcagattctagctaccgtcttttttagaaatataaagaactatagtagaaaaattcagcatttgtaaaataatggagggaacagaatgggaaggaaaggtgcccagttacacaatagcttctcacccagtgctcatcgctgctaaataactaatcatgtgtggccaggttcctccgtgaggaaagggtcatgtctgtcagttacctgatggtaataaccgtagcggtcattaaaggggacagatgctattaagaatagaacctcaactttttattgaattctttatttaaatgatattaactttaattcaatgtttaattgaggtgtaaccatgcaaactctacagtcaggcaccaggaagtaatgaacataaaattacatgttcttctgataggttgacgggtctttattaaaatttcaagggtctccacagagctttgagtagacacaaactgctcttgaagtcttctgttatattagggctaggttccaggaaatcattttaacttagaccatggaaaaacagggagaaagcctttaaagagaaggaagttcttttacgttaagacagaagttaagacagaagaccccttgtaaatggcaagctgtgggtgcatctgtcatgtctccaccaagaagcatctttcttctttcttccttctcttccaactgcatgagaagagatagcatcccctagatgcctgccaaaggagcacacaaacttttcctgcatccctcgatggccagctatcagtgggcctcattttaaatgtgagagatgattgtagctttgtttctctaaggaactgagcatacaaaagcaacgtgtcacagtgcgaagagttgcacataagcatctatggagtaaggaggcaggaggacccagatttctaaacacaaagcagcacttacatgttatttgaaattatgtctttaaaaaagagtggagattctttgccataatccactgaataatcacttgacactagaggaataaaatgtttcctaatagctaggttcctatgactacttttgtgtgacacctagaaatatactattttataatattctgactatctcaattcctatatataagctgtaaagtatgcatgtaagctttatgtactgtatcaaaggtatatgtaaggtatatgtaactacctcttcctgtcaccattatatacatttgtcccaatttaatgtacaaaaaaatttaaatgaagatctcacttcattttaaatgtaagctttgaaaagattttgtttcataaacttattaaatttactctgagccatttttaaattaaaattacaagtaaagaacccattgttcatatttagaaaatcatcttctttccaatataagagctgtacaatggaaatcacctcatgttgctattgtgaaaaaggcaatataatgcactactcatagagttggatgaaaaaactgttagttcagtggatctgggcatcaccataggttttgttgtctgagacatttttgtaataatttgtacactagcatggggggggggggagacaaggtactttcataccagggagaaaagactcctatcaaagctgtcactgactgggacctaggaacaagcaacgactcacatagatgtgaaattattacctgatagctgagtctttagtattacttgaagtctgaagtagaagataagccctttccacatagcatggttacatctgcttaacaatgaacccttcttctgatataaaggagttggttaattcttttcagattgtaaaatgatttattttgtggtgtttaaaataatagatatccaaagaagacaatatggagtctgaagtaattttaaaaagtgggctgaggctccatggtagagtgcctgcctagcatgtgggagaccctgggttcaatctccagtaatgaaataagcgaagtagagagatctcgccactggaaggctaagacggctgacatgctaatgtgtaacatgtctttcccgtcccatttctactcataatggtttatgcaaagttttaaaaattcaaagattgcatagaaagattcaaattgcataaatttatatgtaatatcaagaaatatgcattctgggctagagagatggctcagcagttaagaccacttctgttcttgtagaagacctgggtttagttcccagcactgacatggtagaccacaactgtctataactccagtcccagggaattcagtactttcttctgtcccctgtgggcactgcacaatatggtgcactcattcacatgcgagaataataatatacaagttaaataaaaacaaatcatttttaaaatgatatattcacacataatttttcaaagataacattttcctgttttgagaggtttattcacatgttacttttactaaagtcctacattgtgctagaaatactcaatctactatttatttttatttttagaaaatttttccttgagcaccttatatttgctataagaataagattaccaccacttttttttagttattcaaataagctaatgatattctaatgacaggttttatatttaccaattttctcccctttcagaatgcctttttggatagcttaatgattttgtgattgaattttataattgacaatatatttttaaagatttgatttgtaagcttttaaatagttttttaaaaaaatatatagcaaaatagagttagtaaacactatatattactgttgtgtagtcatacaagaccaaggtaaaaagttttattgatcaagagcaacagtgacaacataagatgatgagaatctacatccacccctcgaatccatcgctgtggctgaacgccacactatcattccaccatagcatccaggctgtaaagccatttgagttcctctgctaaacaaccttaggttgagctattgaagttgccacataagcgagatgtataaaaatgactcagaagttcacagcaatattttgcttgtccgtttagcttagaaagctaatacaaaacgccgtgagctgccagtgttctcctaggagcatgattacatgggggccgatcattatggtaccaaggaagtccttttacatcttgagagcagtttaataatgttcttcagtagttagaagaaagcagtttagaaaatgatagacaaatttcttctcctcaggtagagctctagcattaagtccactccccctaatcttgggtaataaacatttgtttttaaaataatgaggaaagccaaggggatcagtgaagtgggaggggagtgagagcaggcagtgggtgaatgtggtcatacacatctacacgtatgtgcaacacgttgacagtcatctcggagagcagggagtacctttattactgaggaatctgtttctctatgaaccaaccttttcttacttgccccaatacttccctggatgtccacgatctgttctgagaaagcttagggctcccctttaaatggagaagtcttcaaatagtataccaggcaacaattgatcttttatggcaacgttcttgtagccactaacctttgctgggatgaaatggtaaatcctcagatacacatctacagcacacctaagaatccaagtggagaacttgatcaggagcagggaaggaggccaatgggaatgggctttgaacagagaagaacatattagaaaggtcttgggagtcacaaataactagaagggacaaggagactgaagcaaaaaaaccagacagacagtgtaaagagtattcagacttttcctcgtagagaacaaaatttagagaaaggcttggaaatgatgttctagagaacaacttgaaaggggtgttctagaaaagtcttggaagtgatattccagaaacacatcacaatactcatttgatttgaccttttttggttttgaggcgacatgttagtaagaagatgtggttacatgggttctactcatttgtatctcagggatttcacaagagacgagaattattacaagatcaacagcctcaaagaggcagagcatcaagttatcccaaacaatgtctccttggacagaaaagaggaaagtgagaacccatattcactggcttctttctgagtttacatcgtcctatctgacttcatctgaattgtgagaaactgtgtagaaagcacctgtcctttctgcgtcgatttgtgcagattgtctttgattcacatttcagacttcgtcaaattttaagtacaagacaataacactgtattcacacgtggatagtgcatggaaaatgtagaaatagaacagtggctgttctcattaggacagggttctctatttagggggaataagagaaccacttcccctatgaaatgtttgcatttcactctgttgctttaatgtgtaatgacagtatctgcaaagagcacacgttttctctggcgggttacatgatatccccaagactctctccccctcccccccagggaggaggctgccccttggactgtcagcactgtttgcggattttatttggatagtgaccggtgagcacaggccttgagaggcatcgttcatcttccgaaacttttctttctgccatgagaatggcctgtccaaacagaggctgatcctggatccaagatgaagacaacagatggagatgacctacggctcactcgtaaacatccttaccaggcatgtagcacaaccaggatgtcaaccgttactgcaacaaaacttcccaagtacatagttgccaaaagcttaagaagtattttcctaaacttaagctaaaatcaagccactcttgacttctgctgtctcctaaaatctaagtcttcctctagcattggatgcgtgctcataaaccttccgtagctcgttatttcaattttgaaaacttttgtatttccaatgtagtctgtactccaacctgtatgttcgtatgtcctactcagcctctatcaataattgggcaagttccttttctgtcatacaaactctgaaagaatttttttggccagtaaaatttaatggctacaaataacttacttctgggcttaaacagccattaaatctcagatttaccatagactcggctgaatcaacttggacaaattactcgtgctgtttcagctttgatttccttatcaacaaagtgggcatgttgagtgcccagttccccgggctgtaccactaactagtactgggcaggcagatgctcatagattatctgttgcatagtaaacgctcaaggttggctggtcttatgctcttgactccatctggaatgtttgaacttcttctgatccatcttggttttaactaaacttcaagtctgagttcaaagcccactttctctatattatcttcccatatatcaaaaaaaaaatcattatttctttttataagctaggcatttgttcttgcttctagtcttttagaaggtaaacagtaaaatgagcacattctatgtttttctataggctaataacgtcacagattttcatctaattggcagactgtattttccctcttgtggttattaattctgggagataaaattttgttttaaaaatgaccatgattttaacacaatattagttatagaccattctggaaatggttgcctgtcatctaatttaaccaatctaattgattggttggttggttgattgattggttgagtgtgtgtgtgtgctcgcacctgtgtgtgtatgggtttgtgtgtactgaatgtgtgcaggtacctgcaaaggctagaaggtgttgaatgccctggaactggagttataggaggttgtgagccacttgataatggtgttgggaaccaaacccagttactgtgcaagagcatttagtagtcttaacaaccaagccagttctgtggctcatggttttctctataaagcatcccaaacttgaatcatttagaagttaaagaagtgaggcccaggtactgggcttagttttcagcataaggcttgaatgatcacattattgctgactttaataaggagaaactcaaaagggaatatcattcctagttaaatgaagtgtgcattctgccaaggtcaagctgccttgtattatttgagactcactgctgactactttattaattgttttcagactggaaaatgaagttatagcctttccgggaaactctgggaatcaatttattttagtgaggatgggggcatgggagagcagcttgcaattctgtgcaactgtgaagagcaaggaattatgggaagtttgctgtataagtcatggtcaaagtaaaagtgcttgctttgggaattaaggcatatatgaattatgtgcaaaaaaataagaagggctctatatagttgttttattgtctatttaaatttgtatcattcactaaaaataaagaagcttcatatgacacaaagacatcaccagtcctcctgtaattattaaattgaaagtaatttcagaaagtactaccctgaacagagtattattaatttatctctggccttggaagcctcttggagctgggagctagttgaagctagattagatgaatgaattagaacaacatcatattggaaagcattagtaaaaatagacaaggcatatgtgcttggtattgctacagtaagcagtgggaaagaatgtcaaatatttttgttgaaacattataatattcaatgggcatatatttctaaacatgaatgaagaaggtaagtatagtggctaattttaaaaggtctgtgttaagtgtgaaggttgtaggaatacatatgtgaaagcaaataatagcaggaggtgctgttgttttagaagggcacgttgtgaaggcatgctcattagcttttgtgagagcaatacaccatacagtttatacattgctttatgttagccagtcctctagggagctggagtacaccactaagcgtattgatttacatgctaaccatacaagtagtgctttcctttctgagttatgtagagactagtgtttgtaaggacttcacattctgcccagcaatgattggcacttatgtttttaaattatttaaaataagagagtgccagtgtctatagatgaaaatctatgtatctttaaaaatagcagagtttgaaaggtagcaagtggtacatgtgcagaaatatctaccaagcacatataacacagtcagagtcaaacatcttgcccatcaaaacagacaaatggtatctacatcattctatattcatggacacaattctcatcttgaagactagcctatcagaatgtaagctgttatacttgggtgatgacgtaataaagtttctttaggtctatggcagatgttgaaaatgttcttttggtgcgtgagttttgaagtaacaaagttttgaactaaaaaagcattttgcttggtcactggtgggatatacaatgaacagaactggttccatattcctaatattgttctatgtaaacaaatagatgaaaatatgtgtaattgtagttattatgctagagaaaaacatgggctaaaatcagagaagaagtgttaacatatggaagtacagagtaaagagctctgctctaagatgaaacgctttatgaacttcatggtcttcatgggacctctgcttccactatttcagtaacactccctaaatttcaaaatttagttggctttgtacattagtttgtttctatcaatatgcacttcttctggtaaatgattatttttaaagttatgactcaatgactcaacacttacaaataaaatttggaggtaactagaggaacaatggatgaaccagaaacagaacctcactctctgtgtgtgtgtttgtgtgtacttaaagaatagacacatttactattgtagttttcatgtacgcatcaaattttcatggagaggatactgtagctatctccatctctctcaagactagaactaatgatcacatctgtaagatttcaatcagaatatgaaagtcgtcccagtgtttgttccttcaatccttaagttgtcaaatgtttatcgagtaccttccatatggtacaaactatataccactcttctggggaaaggaattgtaaacaaagccagacacaacttgtctacacaaagtcccaaagaagacagaatataatggaataacatcacaagtgaaataaaatcacacctttggaagattaaaaggagtatacaaactgtggttgaatagatctactcagggagattggcaagaatcgaccaaagcagcaaaatagaatactaggcaaagcctaacctttccatagatagagcggggcttgagggaggagtgaaaatcttttcatgatgggctagaactggtgctttgaaaaccagagggagacctttgtgctgaagtagagggcaaggagggcccttatgtgtggaacaacgtaaggcagggagggagcaaccagagacagcagggaccttacagttttacatcgctgtaaaagcaaaaacaagccaattcaaattttgttcatggcttttacactaatagatgcatttctcaaggcaaatgcctttcaaaaactggcaaaaacattattgtgatggaatattttaatagagtgtgcattttttttctttcctctgaagggaaggtagcatacctcttcttcagtcataaaataaataagaagaaaaataagatctctagctcctatcttgtttatcctaatcaggattagctttatcctaatcaacaatcttgtgttcaaccttaatgatatttcattagcttcccagagccacctttcctgtctaggtctaattatatctaatggaatgtatctcaactcactatattaaatcattttaaagacattttaaaatcactccagagctttgctttaggcctgagagaagactgggttctcttgcccctttttggaatccatggccttctgagttttctccttctcttgtccacccgactctcttcatagcaaatgtaagcagatgagaataaattcttttgtaacagttcataacatttacataaaacatctgctctttgttttattttcattatcttcattttttacaagcacgtgccagtggtgtaataagtcaatcgttcaatacatcttacatagggaatcttccagcctgttcagccctgctcacatcacccctaacagataagcgttagcttatttgattgattcttaccttggtggcatattttaatatcctaccgtccttcaaggaagtcaatattctaaaccttatgaaatttcagtaaatgtgactttaagatgtcctagaaattctacttgcaaggacagtagattctgggactctgttacgagtgtgcagaaacaaaaggtgcccatcaagagtatggagatggggctgtagaaacagaagcttgaagtcatgaggagccattggctgacagaattttcctgtgatggccttcggtgtcacattatcagaaacactgccactgggttgactactcagtgactcaccagattttatcaaggtgcacacatggtacgtgctgtttttaacataaaagaaagagataattgtctctactccttggaaagtccttgtcttctatgctgaaaaggtctagggaccaataaagaaaactattcccgtccccagtctgttctggccctgggtaatcatttatgcatttgattacatcaggactgaaacaaaagaaaaccaattgtgtacagggaagaagcgagatgtgcaataatatataatgaaaaagaaactcagaaaggtaggtaggattccaggtacagagaaagaggatacaccagtgcttttaagaggaagttggaggaactgtgctaattctcctgaactccagctttgggcttgggtataagagtaaagaagaatttcgagagccaactgcagaagggcacagtgtggactggttgactgcaataaggtccctatgttctactatgcaagaaacaacagagaacatcatttggagtttgagaaaaggggagcttattagagaacaaatgatcaaatttgtggatgttttcttccttaataaaattatgaattatagggtaagggttaaaattataaattttattgcaagcgctaacggacataaggtttctgtgcaagaagaatggggaatgtgctcgtcggagctcatactttcatctagagaaagaagaaaacaaataaaccaaaaccaaacagtgtccttacgctataagtgttttctttgaaaatgttcttagtaactggagattcaaagatggcaaatcagcaaataaatgaaggtatctttaagggaagaggctgttaacattatttttttccagaaatgcaatatcatttacttggaggaacagaaatgattaatatagtctttctgttcggggaagctatttcacaagataaaaggctagtaatctaataactagcatatcagtattattttatttgcttcttcctgtttgtaaaatagcttcagtgctatcttgttattgctgttatacttggctagttatacatctacgataagagaacataattaatgtgaaaaattattccgaaatgcctgtgtttattctgtgtcactttagcaatgccccttcaggagcgctcggctcattttccacttgcattcaataacaggcttgcagccagtggcattgtatttacacagtttttgtcaaaacaattttatctctaatagattttgatctacattgtctgaaaacttctgtttctgtttaaaactttaatgtaatttcttgcatctctatttcaggcaataggaaaacttttgaacttacacatacttggcagctgtacatattttttgtttctttcacaagtggattttttttttaagtagggagaaattcccttaaaaccaagcatttcatttttaagtggacttggttgggggcagggaaggggggcagtcagcaacgcatgtgaactctatcttagtcgctcaccacagtgggggcatttgaaaaacactccacttgctatggcctttagatggtcagaatagcttcaggtattagtgaatcctttgtaaatgttacatgaacctccaggaaacctattttgaatacacagagatatattttcattttgatgcacaaagatttacatgtgtatctctccattagcattactccaggtaaatcccattacctagtgcacatgctctgtgcagcttctataggaggtacagttagagtgcttcagtgctaagactgtgcctagggaataccgcatgataagaaagttggcaatacccttaaagtgttacatagtattagaatgttttcattaggatgaaaaaactttccatgaaaatataagagggcgaatcaatacttactggggcaactagaataaatctacacatttcagtataatgcttatcaaataagcataataaggaggattagtgccccagtttcttaaaaggtcctcttgccattgcattgtcttagtagacatcagaagtcttccagttctctaatggaggaattcactagaatgggagtcactcttctcttctgacttgttcatttagaagccaggacttagagctaggcaaacatcctgctattgaaacaacaacctcaccccaccagccccccacccacccacccccatacctctgattcttgttcttcctcttcctccccttatacatttcttcttcatcttattcatagattctttttatgccatacctttttgatttctgtttttattcctctcttcttcttttatgattcttaactatgctcccaatcattgagacaattaaagaaggtccatggattctccttatgtaacttatgtcatcgtggagaaatgtacacatgaaaaagagcaggccttcatttaagtggacatttgaattgtaagacacttggttggtagtctcaattctcagctcagagcaaagccctctgaaataagagttacaaacgcacacagttcttcatcattggctatcccttctttcttgggcttaagactcgggctggcggcagttaactgtctctttccccttcttttcatacgacatactcacctgagactgaaatgccgatgaatccgcaaggctcatgtgtgtacacacatatacagagcacagaagcctgacgtatggaaactgctctgcacatccctagggatgaaatggctgctggtttagaccatttcccacagatcatttggtgtcaaatggtctctttagctgggtgatcttttattagccccagtgacacaaagacatcaaaaggctctgtccacacatgcatccatctccagaaggatttaggggcaatctttaaaatttgaaaaagtattagggacgagaagtcgctactccaaaattgtctaacaatgtccagagaagtgactccttgaaggtcatctgtccccctcatcaagtgttttcaaggcaacatcagagaaatgagctgtcagtaatttctaatctggctaggttatatctggtgaccttggagcaaagaaactctcacatactgctggtttcttgagacatccgtttgatctccttgtgaatactgcccaggggggtttgtttctaggctgctcctgtgagctctgctgggctcggaagtacaaaggttttaaagtacttgaattttctcctagcttgctataaagtggaacaaagtctctggaacaggctttggctcgcctcagttctcttgattttggggatcaacattgaaaaagaaaatcccttagcctcctgcttttcccctgcttctgttcctgttactttcttttccttcttatcaactctcacatcctaaaacgcctgtgtttttttcacactaggaaattatgttttggccgtctctcaatccttcctggttcctttacctcacccagcgctctcaatagttctccacattctcacccaataaaaatcccttctgttgttgttgtgaggtctccttttggctgaaaagctatcaggacgctctggctcacaacagagtgtgtttatgtaaaccaagtcattcaaacccaaggctgacaagtcagacacacccagttatgggttgatttctgtaacccagctatgtcttgtgctatctgctcataacataggatgttgctaccacccagcaaattaaaaaaaaaaaagtactgagttacaaaagtcagatgatcttaaagcttagattctactcaatatttgactctacgcatagggaaattgcgttattaaatgaacaattatttggacagattatttacttctcaaagaaaggtatttcattctgtaaagagcacacttacaagagcaaggtggcactgaggaaattttctaccctgaatattttatttaaatgctatcaagcgatcagtaatgtttgcgcatttccttccccaccattgctgattgccaatatatttgtgggtaaacagacatctctctctctctcttctataactggcctcctctgactccacatgtttcttgatgacagtgtctatcataggtgacaggggagcttactcctgtgttgataaacttccctgacttaaacagacctgtgctggtttcagtgagtctgcggatggtaggagaggcagaggctgtttgtatgaaaatccttgggaacctgtcaggaagatcagggtgaggcaagaaggagtctgggaaaaataccacacaaggctgaataacactttttaatgggaaaaaaatgcttattttgactctaattttatgcttagatgcttttaatttgatccacgtttaatttgtcattccttggagaaggcattgattctctgaaaacctatctgctctgttgctaataagcaggattggcttcagagactgccatgacgacattgtattttaatggtgcccacctggaaacactggaccacatatctctggagtcatttctgtcacctctgggcccacttttctggttgtaattgcctaatagctttgttaaaaccacagttctgaagaaaagtgggcaaaggcttcacactgaccaaacaggtcaaaccagcaaggctggacattgagctctagcactgtcaagggtcagttaaaggtgtagtggcagttgtacatggagggcctctaataatacacaagatatatttatatgtttttagattcactaaaacccaaatactttggcactggaataaaaaatgatggtatttaacatgggtatgagaagtttcagggaggcagaaagattccgagtctaggctaactaactacacatagtagcagttaccttacttggctctctgaagctatgtatatgatctaccacaagcctgatacgagaaaacccatgtctcctatgttttaaaaattaggctgctgctatttctgaaattctaatggctgcactagcaacagtaaagatgtccaggtttcaatgaaatatatttcataaattagcttatcattgcactgatttagcatgcctagcaggtgagagacaaaaacatgtgttatcttccctagggaaccttcagtgaatgtcattctggcttcatatgtctttcttttcttcccttcttgaactgatataaaattctaatgtgtgccctctagttccatcttcattgaaatctagcaaaagcgctgaaggtaaggctgtggcaatggtgcatgagaggtggggagagggagggccacggtgattcatagcgcgccggaagaaagttgcattgctaacagcacacttttgtatgtagacaggttaaaatatgtcacatatcagtgttaaaaatgaagttattcatcttggctagttccttaaagttcataggaaaaagcaataaaactctattggtgacttggaaacatttccatctttatctgagggcatgccgtgacactagccttcaaaacaatcatcaaggaagtaagtgtatgtaattgcaatagaactattggtaattctgacaagtagctgttatttaaataccagaaacggtagatgtgacaaactgtttgcattgttatgaaaaggaaaggtgacattttcaagtaggatagtccacgctaaccatccttatctatgagtctttgttctatgcaaatttgaacctctgctataattatcattttgctaatggcctttatgaccattgagctcagtattttcacaaaggctccagccctttcttgtctgttcccatttgatagatgagaaaactaaggtatatcattgtatgtatgtctccttttcctggtttaaaaaaaaatgctgtttgtgtttttttttcccaaagaaaatatccagttcttttccacctcatttttagtaggaagactaagcaggtaagatctatttaatttatgaatgtgaatacactgttgctttcttcagacacaccagaagggggcatcagatcacattacagatcattgtgagccaccatgtggttgctgggaattgaattcaggacctctggaagagcagccagtgctcttaaccattgagccatctctctagcccccaactaagctgttttaagtagtatttccagcttttaaattcagcatcctgacacacaaccttcagccaggattttcttcccatgacaaaaacaggatacggctccatccatggttcataatagactttgaataaatttacagtattgagatgagactttcaaatgttaactaatgaatgttggctttacacgacagagatattaagaactcaaatatgtttagtaattgaaaatgagatgttgttatttgtggaccatcgggccaaggtaatactagtgtgcaaagttgtgtgaactatgccttggtttttaagcaagcacctctttaaaaaccaacccttcctgaaactcattcaaacataggttgtcagtgtcattatacccatcaacatgacaagaaaaagtatgtgtatgtaccctacaagacacttaagccctaaaaagacaaattatgatctactgaattgtacctagtaagagtttttgtagagtctttagattagccgttccccccttttccatttacagtaatacaaatgtctgctgcagggtactgaggctgcagtagtcacaatggagagagttcaacgtcttctatttctgtgacttcattaagcccacactattatgtgccagattttgctaaagggagactcagtaagtattacctttaaaatagacattttagaacagttatattgaagtctaggtggtttgagttttaaaatgagagcaaaaagtctcacaagtaagactggatttccgttgcttgcttctgaggttggactgttcttttatgtggaagttagtaacccagaactacttaaaaaatatagggatagtgatcattctcagaatagccgtttttggtgagacgcttggaagagcatgccttctgtgggggaacatacgccggagcatggcatcttctttccagtctacctcccttccctctctctccttatcaggtctggagtttccagttgctggaatgggctttgacaaacctggtggtacaaactgtatcttgacctatccgaatcagtgctgtaaaaagcatccaggcacgttgaggacagtttcgagctaaactttagtataaacactatgtagctccacacattcagaagagcattcccggcgtttgataaaatgaatgaatcactaatggcttaaaagccagaaacatagacttaaaagtcatgagcggattcggcctaatgttcaaaagtgggaatctgagtcagctcagcaattctgcttttccattcatgaggtggcaccgtccctgagaaagcaaataactaaaaagtttcttttaccaaaagaaaagggggggcatcgaatttttaaaatataagtttgaagttagtcttccacagatagccaatttaattatgctaaaaatgacatttttaattaaacaccaaggtaagcataaatggatttcaaaataattaatcaaacatcaaaaaattgaaacctttttctgcttgagcagcagaaatgaaagaggcagtcttcgggtctcacagagattcaatctaatttaattctccgtcttctctaaataaacattcctaaaacctttttttcatctgggggaataaggatgagaggggtaatcaatatttctagcattttaattaaaaccgttagtggaataaatccatttaattatcagttaatgaaatacaaggtcatttacctgacaggaactttgagggtggattaccagttggaataaagccggggagcccggtgtcacagccatttaacttctgtcaaatttaaggttaaaatccttttagactctttaacctattctgcagcatctttctatgatgtatgccaactggccagaggaatgcacgctgaaacttattttacatttaactctgttgctaagtttacagtgaatttctagaattttctttatgtttctaaggcattaactgaaagatcgcaatatattctggtatgtttttgtgttcattttgtagtcatcatttataagtctatagatatgcttcctcactatgaatcattattttgttatttttataaatatgaatcaatatgctgtaagttttatcatgctaacatagaaaaactatgtgaaaataagtaaatcactttaaataagttatggttattatatgtagctctcttcttgaggtgacccaaattttattagaatcatataaagaattcaaagctttccatcccaagttagttttaaattgggttttaccaatgaagagctatcactaaagtgtgttgccaagctcctatgaactgttcaccgtttctgtggctcattattgaaactagatccttacaaggactcttgtttcttcttaacatggacattcaattaatcatctatagattgcaggtttattacagttttgtagattgaatttgtctcgaagctagaaagtttagagattaaaagcaggcagcctacttgagccctcattctcccgtaaacagtactaactgtgttaaggtcacatgcagtgcgaacgtgtgcatccagggttcttcgtgcttcatcgactgcaggagtactaacgcatcctgagatagcgtttaaggacataaactcaccgtgatttccaaatgctagacacaattcgtttacaaaaccttatgttggctttaaaataaaagtgaatcaattatcagctgaaatgtgttttaattgaagcaggtttctctacgaaaatggagtaagatttcacccctcttaacccagactatgaataggtttctaatactttgaaaaaaataaatcaaaacttaataggaaaactggactagatagcatcaagaatgttctttttatgttttcataagtgtaatcccgtgactcttgaaaggaggttaataaaattagctttaagttatgagacatataaaggaagaaaattatcgatgatacgtagatttcacttgagctacagaggcgactcgagttggccttggtacttggcgaggtactgatttctcatgggaatttgtccaatagccctctttgccttttaccatttattttaataggtccaaccatgggtgtctagtggcctgcacttaggtgctattgagtgtctgccttatccatctctccaaccctaaccactcttcttctaacacagggctgccatgcttaatgcacgtgtcacaagactatgggcttcacacttctgaatgttttggaatggcattgtcatcgcagtaattgaggggtcttcttgttgcagatagtatatacgccataccacaaggacccgctttaggtcctttgtacggctgcaccagagtacctgagacactatttgtagataacagttatttacttctcatagaggtcgagacacttaagataaggcaccagcaggattgctccttaatgagggcacattctccacattcaaaccagccccttgttgctgtgccctctggagcagggacactcttcttacttgtggaaggggtgggagaatgggtgccctccctcaaccgtgagtcctcctgggagggtgctgagcctttattacttaaaggccaaggttcttttgcactggggattaagtttcaatacagatggggtgggacaccatcattcaaactacactgaaatcatttgtatcactctggactgtagaagccatgtttcctatatgcagcacatcattataattttcttttggttccttcactttacagattttttttttttattgagggccttttttccccgtctccctttggtactgagtctggatcgtctgctctgtttacacacacacacacacacacacacacacacacacacacacacacacacatattcctttagaagtctatatcttcagtgcagtctccagtgactctgcatattagcttgccaggtttttatactactgatatctaagtttacttgttggatgtgtaataatataataactacgtttacatttcttgctccccacttttcgcatccctgtcttgcctgtgtgtgccacggtggtcctcagaaatagacatctaagtgattctcgctcttctctccccaataggaacaggtgtcccccaaatgctgctagccctccctggagaggatccttcggaaaaacatggactcatgctttcatgtttcctcactcaggccttttctgcttctcccctgcctctaccctggttttcattccttctctcagaaacccacaatatcaaggagctgggttattctgtgaagcattcatttgtctgctggtctttataaaaagcacacaatattccttaagaggaaagtcctcacattctatttactactattgtatcagaccagatccattcccattaagacattccttaaagacagtggcaagcttgtcaccaaatgaaattgtttccactgcagaaaactgctctcctcctaaagcgcgctcagcccaggcctctgagcttttttgcctttcttttcttttcttttcttttcttttcttttcttttcttttcttttcttttcttttcttttcttttcttctcttttcttttcttttcttttctttagtgtatttcctaaattatttatttatttttaattttatgtgcattggtattgcttgcacatatgtctggaggtattggagcctctagaactagagttacagacagtagtgagctaccatagttacagaaattagtgaactaccatgtgggaactggaagagcaaagggtgctcttaactgctgagccatctctccagacccctatcttcttttcctattcttcacattactcgttctgaatgcctgtctctaaaacttggtaatccaacactaattttctctcatgtagctttgtgtatcattcattaaaacctgaaagggtttttttgccttgttaattggtccactgtaggtctcaatgtcaagtattcaaccattgtcagttttgttactatgtttgattatttttttcatgtttgtttgtttgtttgtttgtttttggtttttcaagacagggtttctctgtgtagccgtggctgtcctggaactcaccttgtagaccaggctggccttgaactcagaaatcctcctgcctctgcctcccaagtgctgggattaaaggcgtgtgccaccacgcccagccccctcctgtttcttttattgaccagtaagtaagggttgtgtgccaatttcctcatctattatctataaagataatgctctttatcttgaagaacacagtgaagttgaccgaagtgtcgggtttgttatctgttcttttgctttgaatggcatgtatgttagcaaacatagaggaaacaaaatattgcctcattattatttatggtcatgaattaatatagtcaatcaatgcaaaaacatactaattgaattttatcatttacatttatgtatgagtggaaattttaggtctctttcctttaaaactggtgcagactcaaagtagcaaatcagagaccatttgggctcttctgccatgtgcatacgtctaattggaaaccattgtaccttaaactcctactaattgctcaaacttaaagtcattatttcagttctttattaaaaatgagcctttgccctataaaatgcccataatttttagcagctatatatctgctgtgtaatttcctctctcaaaaaatgtcatgctcaatttaatattggtatgtcatttgtaactggctgggggagcttttggaagctattacattctctagtttcacaagagctggactctgaagcctgcatgcctgacatccttggtctgtttgcctgacactgtcccacagtgtatttctctcgccccatgggctgcctgagaggatgttctgttgtggaataagatgacatggattaaaaagaggagctgttcttctctgtgagaaagggaattgagagcccaaccacaaatacaacagacacgttaaatacaacaaaatgcacatgtctgtgtgctaggaagatattccacaaatggttcttataaagacactttacacataattgtaaactttatgtaccagctatttaaaaacaggatataaagaatacaatagactactcagaaagatttaaattcaaaatgatatgtatgagatttgcaacctctgtacaatgaaacacataatgaggacgtcttattttaatatccttttaaaatttcatgtatttatataatgtattttgttgatatctacccaccactacctcctttaacctcccttactgcctctcaccctgtctaccttccatcttcatctcctcctttcttttgtgtccaaacgtgttgtgcatatgcacatgggcatggggccatccactagaggaagggcagcctactagtgaccatgtcttcaaaggagagtgacccttcagacagccatcaaactgaagaacatatcagtgggtaaaattattaaagtcaacatactgactaccaagaaaagactgaaacttcagcagattcataacaattgatataaaagagatgtttatatcatcaaaatgagttgggctaagatacaaagactccatatacatattcatgaacactattattgtctttttgccttggttaccctgtgatctaaaagtgcctgccttgttttggactagacgatagttaaagagtactgtggggcaaacactatagcatattcaaatagcttattatgtaataggacatgttatgtgtcaattaaacctttataatgccaaatatcaagttgtcaagtaactatggcatatgaagtgggggcataaataattgggtagatgccctgaccttaaggagctcacgattatttagggtgctacaatttacatatccaaatggtatctctaccagtggaaggtggtcagtgatacacaatcagaaatgcagacagaagagcaggaactgggggcttttggcctcatccaagtaagagaacacctcagtgaaggcatttcacattgaagtcttgcttatgaagccttcatggcaggaaattctcatatctgggagcaagaaggcatgggtaaattgatgggagaagaaattacttgagaagtaatagaagataagatttcaagggaaggctagaatgtagcccattggtagagtgcttgcttagtacacaaaataaattaaaaagtaggaaaataaataaggaataaatgaaataagaggggaaaaaaagaacaaaaaaatgacattggggtcaacctgggggagccatttttatccagcctacgtttattatctaggtaggtgaaagggactttactctgtgtcatttatgaaggataaaggtgctggcctgtggtagctgtggcaaagcgaggagtgttaggcaaaggagaccagcccaaccctccttggagtcctgggaacaagcagttgcaagttagcaacaacttgacagagcagatgagcccgtatggctcagtgtactttccagcctcactctcctgttccccttccgatgtgacacagtgaacccagtctctgatattttctgtttggatttgactgtttgctcagaacacttgggacttgtttatttcattgtgtagccacccaaatgtcgttgtcttaaatattccttgtatacagaagagaattcgcagggacatagttatcttaattttgtgtgatattctctctctctctccctgaagacctcccacacaatagacaagctcttgtctgccagagttgtatttcagcatcctgaacagtttgcttcgtgagtaagctggatatcactgattgtcctgaaatgtgtgctttaaagggctgctacgtatttatttatttatttatttatttatttatttatttatttatttattttgctataacgttagcataacttgaaacaaagggatactaatattaaatggacacaatttaaaattcagcaatccaagtgaccatagtaaggaaattacacgagagttgattttgtattattaagagctatgtgcttagtgattatttattgtctggaacatgatgtaagtaaggtgacagtaaatgaccattttgaaacatacagcactagttgtttttaaaaaataaaatctctgctagtttggagcttctattgttaaataccatccccaactggagctcggtcttgtctctgggaagagtcagaaaagctgaaaaagtggatggtcctgctatgttatgaagcagagccattcgtccattacataaaaagaagatgatggtctatctttcgtgtcagtgtacggagcctcccaaaacatcattaaaagattaggatgctattcatgtttaaaatatgggaacctttggctctatattttctaagaacatcacttttcatactgatggtttctactcctgtgtctcatcctgtttaatattttaaatttggtgtgttctctgaaaggaattgctattttgtgatttacaaccttggagaaaaataacatactagtcataactttgcagttttttgtgatgcatgaagatcagattttttaatgttggttaatgctttgctaattaaagtgtgcatgttaattaaagcagaggctaatgttaattacctatattaatggaatctcatgtagcacctgcctgaagcaatgggttcaattttcaaaatatctcaattaaggctagaacttttgatttgcatctagtagggtttcaattaactgcactgaaaacttcaaaaacactcttaggggtgcaaaacagcagtgatgatatgaagtacagtggagtttgttaagttcatttacaaagacttttttcattagtctttttttttattatgtattttcctcaagtacatttccaatgctatcccaaaagtcccccacacccccccactcccctacccacccctccccacattttggccctggcgttcccctgtactggggcatataaagtttgcctgtccaatgggcatttctttccagtgatggccgactaggccatcttttgatacatatgcagctagagtcaagagctctggggtactagttagttagtcttaactcagtttcttctttactggcggagattgtattcacttaacaaaagtcagagaaaacagccagatgtatattgttgcccataattctatccaagggaggctgaggcaggaggatggtggattcaaaaccagtctgggtttcacagcaatacattgtctaaaacaaaactaaatctcagtacaaacatcagctcctgaggatctcactaatgttaccatctgagtacacctgtccttacccttgcgccattccaccctggatgacagtcttcatccatatctgttgctaatgaatgtcttattccttttatttaaccatatataaccactataaatttaattatatataagcatgttttatggcttataaaaccacattattctgtgtttgtaaaaaaaacacaaaaaacaaaaacaaacaaaacaaaaaacaaacccaaaatacatttgttggctaaaatggaagtgagtgagctactgtcacctagttatttcactgttgctacacacacagccatggcttctcttctttttctgtggcagctttacataaagtatcaagttactgtctagcatctcagtacaatgtcaaacaaaaggctgattttttgttagtaagttaaatatggctggcaatggagaagagggtatgtcaggataagtcattgttataacaccagtgaatgtgtattttatcctggtgtcaactgtattaacatttttttttcattctaaactttaacttgaatgttctacaagcaaacctggctcatgaccacaatcacagtagaatgcttgcattgtttttgaaaataatatatgagataatcatatgatagggaccagatcttaaaataattaattaaaatgtaaacagataactgaagataggtacattgtgattagtatgcatattgttagctctcctgtacccactgctctatttgctaaagtcccaataacaaccattcccggtgggtctttggaagggattatgagctaacagtgataacctttctgacatctagtataatcatggtttcagaaaaatagtttccattactgtgaataattgaaagagaagtaatcgtctcaataggtatatacaaatagattacaaactgatttatggtccctggaaatcagcatcattaactattattgtgccttagcagacattgattctgataactgactgttgatctcagagggccaagatttgtctccattcagccgtagagaatatcaaacaagcctaagattgccatgtgtaagggatgactatcaaggtgacacaaaaggcacatagctgttgctgctgtgctattggcatggtgataacaaaatatttaaggtaacagcaaatagtattggctaggcaaaaagatgctcgctaatgccctgatggcagaaagtgtggctgtcgagaaggatgttatgtgtttactaatgaagaacattgtagggatagacgaggcagtgaacactctcatccttcatctcactactgactagttagctaactggtctgttacaagatggaatcaaggcaataactagttgggtaatgtgatgaatatgaatatcagactttcctaggatgaggcagcgggccaggtcttcactactagaagaacaaagtcaccaaagcatccagtccctgttgtatcgccattaaggtggcagatggcaaagcattagcaggaagatattgagaagagctgaaaaacatctggtgggaagagacaacctaatgggtatccttggctgtgccaaattgaaaggcaattactgggaatcctggaaagaaacttctatgtgtaggtaatgggaagaaggttggctagaacaatcaattctagtttagggatttctaaattctggaaagaagtgactttagaaccctatgaatagattacagaacattaacttgctttctattttgcttctatcttgatttgcaatcttcttgtgttgcttcaaacctgatatttgaaacagggtctcccattgaacttggagctcactgattgtctaggctgactggccaatgaggcccaggagtgtacctgtgcaatggtgttgtacatggatgctgggaatctgaactcaggatctcacacttgtcgctctctgttcataactcgggattcaccctcctttgtcaagaggatcacctactttccaacgacctctctgtctgtcaggctcaatccaaagagaataatgtctcgattttggaactagtgattcctaacatagcaagaagcagtaaggggaaaattccccaacagactgataggtagaatttgggagaccaagtacactgacgcacatattattcaactaaaagagtcccttatagatgggcaagaaatcatcctcctgtggggtctgtaaaggactgtgcaaacttagacatgccatgaagatgaagataaatctgaacaggcactaggtgggtattgtgttacaaaacttcctgaggagtccaacttggtgagccatgagttctgttggggttacttataggaatatgggcaaagggtcatttacaggagcagaaatgactcaaagacagttgcatcaccaaggccctccacaacctgggtgacatctcacaaaggctgggaacagttagagattgtctttcccaagtgactcagtaggtctaaacctcttccaggaagctcagctagttcttgttcctgcaaggccttgttggtctcaggaacttcctaaagctagctagtttttttgacttgtttaccttgcaatcttggaggaaactgttacacagcagggagttgcttattttccaggcactctcctcatctgcttgttattgagaagacagattgtcaagtctttcaataaatgttaggccccatctcccttcattcaactccctttttaaccattgagccaaaagtaatctattaaataccttttataactttttgtttgcatttgtatttttcttccagactcaacaaacaaataaaaagaaaacaagcaaataaacaaataaacaaacaaaaaccaagtttactttaagcagggtctgatcagtttctaacatctagagcccagatatcctctttagagaaagcagggttattttgagcagaaagcaagttatttttgaggaagtggcagggaacatgagtgaagagctagaggttggaaaaggtggggtgagtatgcagtgttcagtgaggacagcacatgtataagagtcatgtctgagaaatggtagaaaataggcagaaaagaggttagagaaaagctaccagaaggaacagagagaagtcaaaagctctgcatgtgttccaagttgagcccccaatttttaaggagtttctacagctcctgctccactgaatcctacataccaaaatatcatgattataataaatcatgctactgattgggaaaaccaattagatgagcaagaaaatgatgccctgacagtgaggcctcattgctttctgtctctggactctgagagactggatgactgtctggtggagtggtgagctgcgagaagacaaagtaatcagagtgtacacagggagtttcatttctgaacaaaggagcaaaaacatttggacgaatctaacattcgtaggatacagggcactgggcctttcagaaagtggatgaaatacacaccttctgtagtagactaggtatcatcttcaagctgccagatgttttcttcactgacagtactagtgagggactagctagggaattgaaatcacggtttcaggactactgcctagaaatgatacccacgctgaagtggagttccaaaaatgaagcctgggacttagagtcagaagcaatgtgactctgatatctgatatattggtgctcagcataggttattgtgattgataaggaagatgttatgcatggaacctgaaaccacaaaaataatgtaatctattacccaaagtagctaactctattagcaagtgattttcgattaagctaaatgttactctccatcatttcagcattaatccagatgcccaatgaatatgccctgttctaggtgatagatagtaagctcaggattagacaaccaattaatttgtaatttgcatactgtgtcaaataatagggtaaagtcaataattatttcataggataatatattatttgaggtaggactataaaatatgaatgtctaattatgtaagatataaaaattatgtttctccctaaatgttctatgaaatgacagagagtgcatctccatcctgacggtggagttatgcctgaagtcaagatgtacattgtgttttctagagtatcattctcttaggtctggctctaaaggtacaaaacagcagtttaggtaaaataaacataagatagcagtgtatttaatgccattgtgaaaggaactatcttctcatagctgcctttgattctgactggtctttttgtttctgtctcaatattcagttcaaactaaggtcccaccagtctttaccaattggaagaagccaggtgaatttttgtgtggggagtttcatgcgctagattcatcctctaaatatctcataatttttttcttctactcctatttcttcccccagcctttgtttcttatatactgaaattttgttcaagaatctttcttggattgagatatgtatggttctggtggtatctggtcatgccagaatttctactatttgcggtgtcaaaggcagtggtagtggggaccttcgtccagttaagatttcccctctaacatgcagatactcactggagcatgtgcatcctgtggggattcaattccctgttgatgtatccattggtcatgtgtgctacaatcaattatttctttggaagttgcaaaaatggtggtctactaattgtaatgtttcttgtgcatttttagctggctaaaaatctctataaagtttgcttgtaccaactctgagaaggtacagattctctcataatgtgcaattatcctttgcttcccagtattcggaatgtgttaatgtaatcacaccttcttcaatggcattattttctcattttctggtttgaatttagttatatacaaattgttcagtatgtagccatcacttgaagagattccatttggagcatatatttaccacttttgccaaaaggactcctcatgatacagctgtgtccttttgtgttttagtcaatctctgctcctttgttctctgtacaagatgatattccaggcttatatatttttgtcttctataaacttttacattaattactacactagtattttcaactcttcttgggtggaagcaagttataccaaccctctcagcctcctccactcagtcagtcagtccttattgagtgtcttcttgtatcagaatcccatggttgatatcaaagcaaatttggttcacatctcttgggcatacttaaaatctaatcatatagaggagttacgaacatgaacatggtagaaagagagatccttatacaaggggggggggaattttacatccagggatttcaggtgagagaagaaattctgtgtcctagaggaatggggggaaagaggaactgcagaaatggagcatggctgagaagcagagatgcaaaagccttattcgtgaccaggcacaagttagtctgatgagaagatagggagatttttccatttctcagcaaggaactcatagaggatacatgggaatgtgcatcagagtccagtcatatgaggtatagaaacctgatgacaaagcatttagctttattgtgtagcaaatgataaccagtgagactctgttctttgtttcttggtttttaagtcagaacagataaatgactgaccaatcacatgactatggaaagactcttataaagttctttttctcttggggaccatcaaaggggacatttaatcatgtagtggatgggttagatgctgaatgctgagtaacctagcagtagttggcatggtgactcaagcaccaggatactaagtagtcctgtgatttgtgtctcacacaccaacagatcataagacacgttcagtgccacttcataatcagggttgcatcaactgtccccagccatgagaaattccactgcatcccagataactgtttcccaagcatgaagctcagttctccctgggctgcaagtcaaattctaacgtgtttatcttgatgctttggagtaccatttgtacacgaggtttaagctatataaggtacaacagaaaaacaaagacctaaaaaaccaagatgctcatgaagatacaaagactataaaatcacacagtaataacatacgatgtgttccttgtgaagttacttgctgggttgttgaatacaccaattggaactttggttatctagtttctcatcttaattgtggtggtttgattgagaatggccccctaaggttcatatgtttgaatgcctggtgcccagttggtgggcccatttggaaaggactaggaggtatggtcttgttagagaagttgtgccactaggagtgagttttgagctttccaaggcccacaccattcccatttagctctctctctctctatgtctcatgtctttggatcagggtataagctctcaactactgcctactgccatcatacttcccaccatgatgaaaactgaaactgtaagcaggcccccagtaaactgtttctcttatgagctgcctccattaccatggtgtttcagagcaaaagaagagtaactaagatatgcgtgcatatacaaacatatatatgataaaacaaactattaggatctaaacagtaaatgttctctcctaggtgtagaagagaatacaggctattaaatatgaaactggaatattaaaataattttaaaggtactctctgtgaagaaaagcaatctcagtgatactttttagattttcaaaatcatttgtagtacagattctatataggattgtgacatatcatatttaaaaagttggcattttaataggtaaattgttctatctcttccccttgaaaactggtggtcaaactgggtatgttgtagagtctgaaagtgatccgctaggctgaccagtttgtcggcatttgctcttccctttggctccattaggacttggagttctcctgtcctatttgtggtgatcaagcattattctctattatgactgcgagaattctattttctaccattgtttaaaatggggtaacatttcttcatgtcagagtttattgaaccttttatcttatttcatagagacctgctaaaattaaataacactttaaattaaaatctgtaacataggggtttactaatgtccaagggttttcatgtttgcaaatttcagagaatcccaatacattttttaaaatgcaaagaattttaggtgattgtggtcaaaatggccttttctttttttttttaagatttatttatttttattatatgtgagtatactgtagctgtcttcagacactccagaagagggtgtcagatctcattacagatggttgtgagccaccatgtggttgctgggaattgaactcaggacctttggaagagcagtcagtgcccttaaccactgagccaatctctccagtcccaggccttttctttttaatgctacaattcacatctcagattggtgttagttagactgacagcctcagatattgttggaaccagccacgaatctacttcctgaaagtacacagcttcttctagcatgactattactaagatatctcacgaatttccataaacaacccactcactcattcagcacacaattttctgggcactggagatgcaattgtgaataagaaacatgtacaatcatgtacagaattctcaaaaaaatttttttattttaaaaaatggagggggggcatagcccctgccattgtgaaatttacccgtctagtgggatataaattaaaaatgcatattctaaaaaaaaccatcaaattatcaagataaaataaaaatgagtccaaaccagtcataaatattagggaaatcaaggatggagtggtagagagaagaaagaaagggaaggaaaataattggggaggaaatgccatttaaacagattttgaagacaaatagccaggtgaaaaggaaaggcagaaaattccaggcagagggaagtacatgtctacagcacaaaggaaacagggtaattcagggagtgaaactgaaggaagatgtgtccagagaccagatggccaagcggtttagcaggctggagtgactccaaacgcagtcgggccctgaagactctggagaggcgtgtctacagcttgctggttgccaatataagaagtaagatgtcaaccaaaccatctaagagaaatgctcattccggccaagatagatttagagcatagcacctaattcctgttgttagctcgtctgctcacaatgcctgtaaactaaggcagaaaaaaaaattgaggacatagttttgtttaacctgtcccctacttactgtgtccaatagataagaatagagatatcaaggaagagaaaaaaagaaatgcttgtttctttttggttagtctattatggaggtgataactcagagacctagtgagaattttcaggaaaatctaagcagcatgtcccgctctacaaaatgtaagccgtcctaatggtcaacctgtgctttcatagaccacacacacacacacacacacacacacacacacacacacactcacacacactcacacacacactcacacacacactcacacacactcacatacacacacactcacacacactcacacacacactcacacacactcacacacacacatacacaaagacatacacacactcacacacacacacatacacagacacacacacacactcatacacacacacacactcacatacacacacacacacacacacacacacacacacacacacatacactcacacacacacataagagaattactactgtagaagtgtgaggggagcggggtagacaactattgtgctggggttttgttttattttgtatttttgttttggggggattttttaggttttactttaaagcatcttgctaactgccctttgctctatgacatttgcttgctggctgcccctggatcctcaatgcttcatttatgtcctgcaccctgtttcctcctgctgggggtctcctttcctgctgacattcaggagcctgtttctgaagagctgtgatcattctgggaaatcttggcttttcacagtctcttcctgtctgagaccctgacctccaaggagctgtaccccaatatgttgtaggtgtacaagaatgaacccccaagacttgggtgtacttccctaggctttctcacaccttttgtgcaagtagatttttcttgtgatatttttaagatttcaatttcttatttatttgtagggtggagcttgtgtatagagatcagttctcttctaccatgtgtgtctggggactgtcctcagcttgtcagaattagtgcctttacctactgggctgccttggtgaccctgcaaatagattcctacccatactttttaagaaatgttcttgtgggctagtgtgttttatcattaactgaagaaagttaaaaatatatgaaactggagagactccatgctaatatgctaatgcctatgcctttgtaccatgagtcagcatataagatgaccccccctccctccgtgaaatagctaacaagaattaggataggggagtaaacagggtagtggggactttccatgtctaggccattacatatggctttgtgaatttctacaataattttatctagcatgtagcaattcactcagtaagcattctctgcttccattagaatctcccaattaaatataagtacatgtctttgggtaattatgattaatagtcaatataataaagagcaatggtattttctaaaaaaattgatatttcctacaaaatatagctttaaataaaatatctactgtgagtttaaaaggagcttttcatttgtccctttttcttcatctccatatatttctcattaatcagcagctctatcataacataatttctagataagatgcattttctccttttaaatactttgatattgtcatctgtttttatggcatgttactgcatgtctccagaggcacgaagcatttttattttcaagtaaatttatattagttacagtatccagctggtttagatataggatcatttcctgttggtactgtttccaggacaattccttttttttttctcctcacaaaaatgaaaaatgtaatttaacaaagatatcctataattgccttcatatctagcaaggtatctagcaaactgaataccttattttatttaaaacatctgtctatataatgtctagcaattgtctaaagctacaccatccatgggaaacacagctgctgctattttttatttaatttatagggaagcaacaaaaatgtctccttaatactgtatcctccgctgttttattacatgcaagctattttcataaatgagaataacttaccttttgggtgcttacaattaatttagtctctttcaaatcaggaaagactattagccactgttttagtgtcaggatggaaacattctacatataacattacacatgtgtgtgggtgtgtactataaatattatatgtgtgcatatctaacaatacatcataataagagggcaccatgctgttccatttgtgtaactagtcttgtactcaaggcacatcttaattgcgaggcttcttgatgttatttgtatgttttcacgtataagggaagtgtaaagtcttttactgtgaagcctttctactgattatagcaatcaattgatgttttgttacttgctctcttgcatagagaaaggtgaagctctacaaaagctctttgtcatagggagggtgctgagtgttatgtaggagaaaacccatttgtaaattttatttattgtatatgacccttgaagcctaaaattaagcgcttaacttttactagattatatcaatttcgacttagccgactgtaataacaacagacacctagacttatgatatgtgcataaagagaaagcttaccttttccagggaaataatcaaaagattcccttttggaacaccaggcgtatgaaagggaaatggttacggtcccctagtgacacactgtgatgattgacaggaaaaaccaacatgcctgccacctgagacatcttgttcaggaactttctggagggtagtaaattggtgttggcacaaacacaaaaaaataaaatgacttgattcagcacttttcaattctaaatccccaaacactaaagaaagaagtaaatattcatcaaatgatcaaaatttatattgatttttattctacattagcagctcaaagtcgagactcttgacagggtggatgtcggcttgaatgattctctttgaaatgaggatatagactctgagctgagtgttaccatgcattcctgaactatagaccctgattatgggaaccctaggaggctgagatttcagaagaaagcataaagacactcttgtttggttctgttttgataactaaattgttattattagtatgtaaagtaattcttattgctcctgcctctccaccccacacctcctgtctccatttaaagacaactattctatggaaattcaatgggactgaagtactggtagtggccatggacttagtagtagcatttgccagcatagaggtaccaaggaaggagcttctagccctgcaggctgagggagtcctgactggatcttcacaatgtacaatttaaatttttagtttctggtggagaataaagagttttctgtaggttggtgtggaaggcaaggattaggctcctgcagctgagcataaacacagacttggtgcctctgtcacagtgcagagatctgctaagggaacagtaatggagaaacatcgaaaattctaatcatcccctccagtccacaccttgtaatcacacttcccccaccgtaactcatgacataaaatgctgaatttttaatgagtttaaccgcttgcattacaaagaggaaagcatgaacagtggatgaagggcccacggacacaattgtgtgtcacattggtttttgtctgtgaggtgtaggtggtttttgttgggattaataaacatttaatatgtcattaaaacagagggggaaaagatatttttctttatacataaatgcaaaagaaataatgaaaatagtgttaatgttaatttccccactttgtttgaatgttaccatttaacaagtctccttaaaagtacagctttaaaattaaattttctaaatattatactgaactttttaatgatttgtaatcaagtcaataagaatagaaataaacacctaaagatctaaaatattgttcctctgtcttttacataaagatacaaggactatcactaactctccctaatgctaggttttctggagtgacaatataaactgttgtatacttaaaggtagatcagtatatgcaatgatatttactgaaaaatactatttgaagagttgaacattttaaacttttacttgatatttttcacatttcctttgtactcttgtgtatatgtgtgccatgctcaaataacagcttttaagattttattctcattatgtggctccttaggactgaactccaggcatcaaacttgggaagttccattacccattgagccaactctctggtcctcttgttcatgtgtgtgtgtgtgtgtgtgtgtgtgtgtgtgtgtgtgtgtgtgtgtgtgtgtatgtgtgtgaagtttcaattatttttttatccaatgataaaaagaacatgctgacacatttttaaaggattttattagtctgatccttgaatgaatatttgagtgtttcttatgaaccataatttttctagttagattatatactccctgagggtacacacagtgtcaaacatacatttgtattttgtagaatgccttatatataaaagacattcaagatacatttgttgaaggaatttgttgaaggccaccaatcaccattgttccaaagagatgtctaatcctatgatcctcctcttactcggtgaaggaagctttggtatcttactcaggcctgtgtattgtctggcaggcgacgtaggttctcctgaattataacagcagtgtgctatttctgtgcagccagaatgtacctgatcataggtatgcagatgaatgtccagacggagcccttttctgtgctcagaatgtactttgaattcccaaagttaattatgtaagaaatcttgaaccactaaccatgtgaataaaaacaaaaagaaaaaataggggggacccccaatatatatgattaaaaagaaagaagaaatctgactcttaaaacgatgatgggaaactcggccacaggacatacacaggaagaactggatggcagacaagtcttcaacaaagagcagaggaggggagagagcattgagctgctccgccattgagagcagaagtcctgagcaaagtcctgagaacacgctccttactggagtagacgtggaggcttaggaggactaatgctcaacctgggtactcaagacaaaggaaaagaaaatggaggcagcagagatagataataaatgtaattgtggttccctgtagtgaaggaagacaaaatggggctagagccagaagaccgatcagtgttgacaccatcctggcacctgagagaaacccaatactggggagatggatgggctagtgtaaagagcacagagggtagagaacatagtgcaggagaaaaggtgcttttcatgatcaactctttggtcagttaagagaattctagcatgtaagtggaggaattgacttcagatagaaacagggagagcccagaaatgggggtgcggtggggggtggctcagagaacgcagatctagctgagaggtggatctgaatttggtgggaatgtggttaacaaagtccagtatggtatgaagtgagaagaaaataaacttttggggaagttactagttgctaaagatcttctatctaggttaagcataagaattaagagagacccttagaagaaagcagacatgcccaaaaggcatgtaaggcatgggtgtacatctgcatgtaaggcatgggtttctttaactgagggtcagggtgtcttttacagtagtcacagggcaacaaagggtccctcaggaccataaatgagatcatagagtggctcctgagagacgtgtctttgagtttctattgctccacaacctaaaacaattctgggaggaaagacttccagacaacagtccatctctggttaattgggactggaactcactaaaggtacaattggaggcagaaactgcttttacagctcagaggtggttcatccacagtgagctgggccctttgatgccttatgactactgtaattcaccaaccaagaaaatgtaccacaggcttgcccataagccaataggatgggagcattttctcaataaggttctctctttccaaatgcctctagtacatgctaagttggtttaaatctagccagcatgaggcacctaatgaaattataatcgataagggagaactctagatcacaggcatacaggagctgccttcactattaacattgttaactgtctcaggctctaagcttggtccattgttattctaatataagatatctgcatatgatgagaattctatctctgttggcaacagatgctaacagaaaatgcttactgggctggaatcttgcttctcaattggccaggagctttaaccagactcctggatagagcattgattgctcttccatagatcctgggttcaattcccagcaaccacatggtggctcacaaccatctgtcattgggtcagatgcactctttgggtgtgtctgaagatagcaacagccgtactcatataaataaaataaataaaaataaaatcttaaaaacatttccatgcttgtcatagtatgcctcagcccctgccccccccccagcccccaagactttggtccccaaatcttgagggttgcagagggctgaaaacagtctatagctgcttccatgcagtgtgaggtcaaagaccctacttactgatgaatcaaaagtctctttggtctgaagggaacatgagagtgtctgagcttggagattggagggtcaacatttgggagggacctggaagagatgatgtcattactcaagacatcaaagcttgtgcaaggaatgaagcctgtaatagattattctgaccaagatcagcacccaaaatgaagcatctgatgatgagccatgatgttagtaagttgttaaaacttcaggtagactccgacaaagatttaatttgggtatgtgaattttagagggccaagatacattgtcccactgtcaggtatatctactactccctgcttatagtgggacaagttcttctaatatgaacatttagtaccaccaggtcttaggtacagcaatttttttttcaacttaacttttgagtttaggagtgagatctcatgtactataaaaagagatctcatgtactctaaaaatgtttagagttactactaatgctatggcaaaatataaaagaataatttccaaaagggaatacatttaaaggaaaacaacatgaggttatcattactgagtatgtgttatgcaaacagagtctgaaagaaaacagtgaatcaaatctaaatgcaactgaggtgctagccagtaataagcttaatgtagctttgcattgttgttggagtggctgagacttgttcttcctggcatgacactggctcacacttagaatttaatgggtaggtttttaagatcagaatcatggtttgtccttttaaaaagtctatgctagttccctttctgttatatcattgtcgtcgtcatcatcatcatcatctggctatactttcctgctgagtttttgaggccatgcatgtagccaaaaattgccattttttttccttttgaccattaaggccagctaagactctttaggaagaaaccctgtggctcttttagttttcttttctttgtaccatcttcccttggaagcattgagatagtattctctgtgcttgcccatctctttgtagactgaaagatgaactgtagttaaatttatcggtgttataatacttaatatctgacaaagacttctaataatcatcaactctgttaagttttagttctctgatgagaaattcaatagaaactgtaattacttcattacaacataaagtatttttttgttaagcatgcttccacaaatatatactaattttaaattttagctttcataaaaatattgtaacgtactttaacattgattttgtcctaatctgttttgttttagtttggaataatcattttccttagaaaaactcttccaatatattttcatcttcttaaaatgagaaactttgttgttatctttgtttaaaccaaaaatttattctgtatctttcttttttttcatttcatggtatttatctgattaggttccttaaaacttttaaataacacttcactttaagtaaaatattgaaaacatgtgcaaaaaaatgttaagagtttggtattccacaaaatagaaacagaaggtactctacccaactccttctatgaagccacaattactctgatacctaaaccacaaaacacccaacaaagatagagaacttcagaccaatttcctttatgaatattgatgcaaaaatcctcaataaaattctcgctaaccaaatccaagaacacatcaaaacaatcatccatcctgaccaagtaggtttcatcccagggatgcagggatggttcaatatacggaaatccatcaacgtaatccagtatataaacaaactcaaagacaaaaaacacatgatcatctcattagatgcagagaaatcatttgacaaaatccaacacccattcatgataaaagtcttggaaagatcaggaattcaaggcccatacctaaacatgataaaagcaatctacagcaaaccagtagccaacatcaaagtaaatggtgagaagctggaagcaatcccactaaaatcagggactagacaaggctgtccactctcgccttacctattcaacattgtacttgaagtcctagccagaacaattcgacaacaaaaggaaaatcaaggggatacaaattggaaatgaagaagtcaaaatatcactttttgcagatgatatgatagtatatataagtgaccctaaaaattccatcagagaactcctaagcctgataaacagcttcagtgaagtagctggatataaaattaactcaaacaagtcaatggcctttctgtacacaaaggataaacaggctgagaaagaaattagggaaacaacacccttctcaatagtcacaaataatataaaataccttggcatgactctaactaaggaagtgaaagatctgtatgataagaacttcaagtctctgaagaaagaaattaaagaagatctcagaagttggaaagatctcccatgctcatggattggcaggatcaatatagtaaaaatggctatcttgccaaaagcaatctacagattcaatgcaatccccatcaaaattccaactcaattcttcaacgaattagaaagagcaatctgcaaattcatctggaataacaaaaaacataggatagcaaaaactcaaggataaaagaacctctggtggaatcaccatgcctgacctaaagctgtactacagagcaattgtgataaaaactgcatggtactggtatagtgacagacaagtagaccaatggaacagaattgaagacccagagatgaacccacacacctatggtgacttgatctttgacgagggagccaaaaccatccagtggaaaaaagacagcattttctttttttcttttttctttttttttttccattttttattaggtatttagctcatttacatttccaatgctataccaaaagtcccccatacccacccacccccactcccctacccacccactccccctttttggccctggtattcccctgtactggggcatataaagtttgcatgtccaatgtgcctctctttccagtgatggccgactaggccatcttttgatacatatgcaggtagagtcaagagctccggggtactggttagttcataatgttgttccacctatagggttgcagatccctttagctccttgggtactttctctagctcctccattgggagccctgtgatccatccattagctgactgtgaacatccacttctgtgtttgctaggccccggcatagtctcacaagagacagctacatctgggtcctttcgataaaatcttgctagtgtatgcaatgatgtcagcgtttggatgctgattatgtggtggatccctggatatggcagtctctacatggtccatcctttcatctcagctccaaaccttgtctctgctattataaataaggctgctatgaacatagtggagcatgtgtccttcttaccagttggggcatcttctggatatatgcccaggagaggtattgttggatcctccagtagtactatgtccaattttctgaggaactgccagactgatttccagagtggttgtacaagcctgcaatcccaccaacaatggaggagtgttcctctttctccacatccacgccagcatctgctaagacagcattttcaacaaatggtgctggtacaactggcgattatcatgtagaagaatgcgaattgatccattcctatctccttgtactaaggtcaatctaagtggattaaggaactccacgtaaaaccagagacactgaaacttatagaggagaaagtggggaaaagcctcgaagatatgggcacaggaggaaaattcctgaatagaacagcaatgacttgtgctgtaagatctagaatcgacaaatgggacctcataatattgcaaagcttctgcaaggcaaaagacaccgtcaataaggcaaaaaggccaccaacagattgggaaaggatctttacctatcctaaatcagataggggactaatatccaatatatataaagaactcaagaaggtggactccagaaaatcagataaccccattaaaaaatggggctcagagctaaacaaagaattctcacctgaggaatacccaatggatgagaagcacctgaaaaaatgttcaacatccttaatcatcagggaaatgcaaatcaagtcaaccctgagattccacctcacaccagtcagaatggctaagatcaaaaattcaggtgacagcagatgctgggaggatgtggagaaagaggaacactcctccattgttggtgggattgcaggcttgtacaaccactctggaaatcagtctggcagttcctcagaaaattgtacatagtactactggaggatcccgcaatacctctcctgggcatttatccagaagatgttccaactggtaagaaggacacatgctccactatgttcatagcagccttatttataatagccagaagctggaaagaacccagatgcccctcaacagaggaatggatacagaaaatatggtacatctacacaatggagtactactcagctattaaaaagaatgaatttatgaaattcctaggcaaatggatggagctggagggcatcatcctgagtgaggtaacccaatcacaaaagaactgaaaggatatgttctcactgataagtggatattagcccagaaacttagaatacccaagatataaaatacaatttgctaaacgcatgaaactcaagaagaacaaagaccaaagtgtggacactttgccccttcttagaattgggaacaaaacacccatggaaggagttacagagacaaagtttggagctgagaggaaaggatggaccatctagagactgccatatccggggagccatcccataatcagcatccaaacgctgacaccattgtatacactagcaagattttgctgaaaggacccagatatggctgtctcttgtgagactatgccagggcctggtaaacacagaagtggatgctcacagtcagctattggatggatcacagggcccccaatggaggagctaccgaaagtacccaaggagctgaagggatctgcaatcctataggtggaacaacaatatgaactaaccaatacccccccccccccctggagctcgtgtctctagctgcatatgaatcagaggatggcctagttggctattagtggaaagagaggcccattggtcttgcaaactttatgtgcctcagtacaggggaatgccaggaccaagaagtgggagtgggtgggtaggggagtgggtgggggagcatgtgggggacttttgggatagcattggaaatgtaaatgaaataaatacccaatttaaaaaacaaataaaaaaaggaaaaattttaagagtttggaaacatgttttacatcaataaatttaaatgaaccaatttgtagagaatagaatcctatggaagcagtcacttagaaactatttttgtaataaaggctcttcaacaatgcttcagagaaatcccagacacgccctgaagaagttatcaatgagggataggacagaggtatggccctgcatccctctcagcagcctatttagttttcctaaacctttagggacctcatcaaacgtgatggcatatacatttaatctcagcactgaggaggcagaggcagagttttattagtttgaagccagcccaatttacaaagtgagttccaggccagccaggactatgtagtgagacttagtctcaaaacaaacttttaggtaaaattgactcagaaccaactaggattcctggatttgatgcagaaaagaatttcaagactagccagtatgaagaagaatttgtttaataaagatattttcatatatatttaagggtgcagcttacaagaggaacatttagaagtaagacataccagaaaatatggctatgggcttctctaggagagttgtcaaaattaatgttaatgttttcaagaagcttagcccatcaaaagatgcagagagagaggggggtacagaggaaatttcttagaatgacttataggctgtggatcagttaattcaaaaatggctggctgggaatgacaagtccaagaaccccatagttgctcagtccataaggctgaatgtctcagctgatcttcagtctatgctggaattcctaagaagtagaccacatgaagctcaagaagaaagaagaccaaagtgtgggtacattgtccttcttagaacaggtaacaaaatattcatgagagcaaatgcaaagacaaagtgtggagcagaggttgaaggaaagaccattgagagactgccctacctggggatccatcccatatacagtcaccaaatgtagacactattgtggatgccaagaagttcatgttgaaaggagcctgatatggctgtctcctgagaggctttgccagagccttgtaaatacagaggtggatgctcaaaaccaaccactagactggtcacagcatccccaatggaggagttagagaaaggactgaaggaggtgaaagggtttgcaaccacataggaagaacaatatcaaccaaccagacctcccagagtttaaaccaccaactgaggagtacacatggagggactcatggctccagccatatatgtatcagaggatggccttgtcaggcatcaatgggaagagagacccttggtcccatgaaggctcgatgccccagtataggggaatgtgagggtggggaggtgggagagtgggtgtgtggcttggggcacaccctcatagaaaagcaggaggagagggaatgggatatgggtggccagaggagaagaaatcgggaaaggggataacatttgaaatgtaaataagtaaaatatccaataaaaaatgactaagcataaaaaagaaaaaaatagatctaatgccagtgaaggaacggacttgctagcaaggcaagaagagcaagcaggcaagcaccaaaagtttccttcttccatgtccttacatatggcttccagcagaaggggtgtcggggttagaagtgtgtcgtcccagattaaaggcccacgtcttctcacctcaagatctggattagaagtagatcttcttacttcaacttaagcaaaagaaagtcgtcagaagtatgccctcttttgaggggttttagtttagatatagtcaagttgacaaccaagcacagccattacactgagctcctctcgaagtggcaagagctgtgtgagcacaagtgggctgtccatgaggtaacagtcccatccgggtagaaggagggatcgtagaagaccacggccatcacacgaggctctgttggctctttgttatgctcagaatagtgtttgagttccctaacctgtgtcctccagtaccaccctttactctacactctttattcaaatgccctaaggctccagtctccattcctattgcactatctcctttcatgactttggacccttaaagaaatcaattattctgcctctggagatggcttcacctaccaaagtcatacttatcacctcagttctggctcagacaccacctctgtcagctgtgctctctcctctgccttcaggtggttattttatttccgattacagtgccacttggcagaggcctttaccttctacgctgtcctcccttagaggaagagaatgtgttttgtcttccttctacccacagcaactgtagctcctcacctgtgatcaactctcggcaaatgtacaagtgataaatgggtgggtggacgacacacgtcgccaacaattacttgtctaatgctagtcttggtccagacactagcaaggtgctcagaatgcaaaatttcaaggatgcagacacagccacttctaacatttgaaattcaaagacaatctgaaactatatcaagcaccaaagtcagaagcttacatatgcatgtgtggcatctaaagcaatgtaagtcaggtggctggtgtaaggctcagagggaggtggctaaaggcattgctatctagatgacacttaaagcaaaacttaaggctatgaagaaaagagtccagcccgagcttgggcacaccagtgatcttagctgtgagacaacacggtcagctggggaacagtgtatcagcgagtgcagggtgttggagaagacatgcatgcgggagaacaccagaggatttactgcacctggtgctgagctgtgctaacgcccaggctggaggggcggtgggtgtttcatcttctcatggtgtcctctgtgccaggggattcgaattccattctaatttcaactgttgcatctgagttagtatttaaattcaaatattcctacaagatcaaagatcttcctctgattgtcccaccagtgtctctctctagcccagttcactctcgcagtatctgctcaacatctctgcaacctggaaatgaagaggcacagccaccactgaagtctctttctttctacttaagaaaaaaagtcccagtcccatttttaacttagctttaatatctatcagtttaactgataataataaacttaatatctaagtttccatatgtgaaatacagggaagttttaaagtacccacagttatcctagatgataattaaaactcttttattcagagaaatagtggcactgattttaaaaatgatattttcttcaaaactgtctccttcaaggttctgtttggattaaagtatagtagtagtaaaaaacttgagagagtctacacatctataaaggaatttagaatggcaatgccactcaatcttagcaaaacaaacaaccaaccaaccctatttagttctatttccatcagcatatcctgaatgagttcaaaacggaagtggaagggagctggaatgtccagtcatctgctcatagtgaagggaattttctatgtaagggagaacttaagtaagaaactaattatattctgagttgttttctggattctttcacacactgctcttaggatgtttcatctgtatacagaaatgactgtggaccacgaaaggatgaaggctgactatttttctgagtggtgataagtctctgttctatcttctttatgagcctttttgtgaacagtggtgcacactggagagctcactgcccagagtgagccatggcccagcacatgacctaagttaacagaagcctccacacgtgtgttccgaatggcccagatgtgttatccacagaatacccagtctgggtcaacttcctcattgtgccccttgactgctggtggaggggaggttgcagcatttgggagattgttcttaaattctttgactactgtttactgcctctgtcatcttacttgtctcagaaaaatttgacataagctctttaaaaagatgtatgtatgtatgtatgtatctatgtatgtatgtatttgagtatatgtttgtatgtgtgtgtatgtgtatatatgtgtgtatgtgtatgtgtgtgaatgtatgcttatatgagtgaatgggctgggtggggggatgcatagaactgtgtgtgagaagcccagaagagagtgttgatccctcagagctgtagccacactttgtgttggtccaggcttgttctgtgggtcttggatccaaactcttaccctgacaattgtgaaacaggtgtcttcagcatgcagccatgtgatagtcctggtaggccctttacaacattttcaaatcattgattagcttttttctttaaaatatatttttagggggctggagcgatggctcagtggttaagagcactgtctgctcttctagaggtccttggcaacttaatatattacatgtagtttccttttcaaatttgtggtgcttgaaataaaattcaaggcttcactatgctgggtaaggggtctaccactgagctacatcctcagcccctaacataagttttccctttaatttttgatattacaaaataattacaacgttgctccatttccttcccttgtcttccaaatctccccatacattatacccataaagtctttccaacacaactgcttcgacaggagctgaacaagggcagcactaggtatgcccaagtgggtggggaaagcccaggtgaccccagtcctacacagagatctgcaggctaccaagggatgctggaagcaggagaaatgatcttcctcagggaaaagcacaccagttagctgtgcagtaccaatgataagccctgaaagcagtcatacatgcaacattatagagactgagcgggctctatgtaagaatatatgtatacacatatatgatatatatgtctataattcttaatctgattgaatctcttcttatccaagtcagttggtttgagcaaaaagaaaatctagatggacaaataaaaactggccttgaactttctgaaactttaatacacaactacagtaatttgaacgttatctctttaaattctccatggaaatttagagcattcacaactacctgcttgtgaaaagcaacaaacagaggatttctagtggttcaggccctctatgcaaccactgctttatgagactcctattttctccatagctgagtcttaaaaccaaagtccaggcaaaagggcttcattggctctgaagactaagattagaaggttatgtctagcttaagttctcttatatattaaagagttctggtcactacccaatagctgagcatgactgttttcctaggaaaatacacagtagaattatgaaatggtctgaaaattgatcagaactgctaatggatgtgtttgattttgtgaagcatactaaaaggaatccaagggtaccttggtcattagcacatgagaagtcagccctgcctcctctcctccatcacagagaagcttacccttgaagagacttcatttccagtctcagctgtgttctagggaacccaaagccacagggatgatgacagtgacaataaagcatctatcccacgcatttctgggcaaaaacagcttagcattctttaacctctggttaaaataataataatagaaaagaaaatgaacattaattgaaattaattactttctttagtgaaattacttagtttcttttgcagtgagcccccatgtgtttatgaaaggtaacaattcaagtctatgtgtaaaaaagccactatagtcatgatttaaaattattaagataatagtacagagtaaaaaaaatgcaataaatgaagtatattagcattattaaatatgtagtagaattaatggtaggtcttttacttccccccccccagtgaagaaaataaaaaggcattcagaaaagaaataaatatacatacatgaaatatcccagtgttatgaattggaagggcacttcttttaaaaggctatgcatgccaacatgaggaagactattattaaggaatttcacggaatttttatgtaaagttttattgtgccgtgttatgatctcggggatagtttgtgatatttactgagtcttctgagagttcatttattcaggtcatattttaagaaagaacttctaagattcagatctttaatgtaattctgtgatatgctcagctgatcccattaaatccaaccctgcgcatgcagtataatgatgtgaacaattccctttctttaacttgttacacctcgcttgaaatgcactccctttgagtggttcttcttcgcttctctctccaggctgaggctcagctctgctacctggaagcgcagagagacgctgtggagcagatgtccctcaagctgtacagcgagcagtataccagtggtagcaagaggaaagaagagtttgccgacatgtcgaaagcgcattcggtgggaagcaatgggtaggagactattctttctgtcattttaggctcactaagctgctttttcagtgacattcctccggcaggtgttaggcaggctttctttcccagctagcacacaaggcaaggctcagtcaagggctggagttaaggactgagggttttatcagcctctaccacctaagccaaaacttctgacctttgttactgtccgtaaaagacagccttgtgatttaggagtgcttttgagactgtgttttacccacaatattgccttttctccttcatagattattttcaaaatttatatcccctcctccctcttgacatcagggtttatgttaaagtctgtttatggaatttctgagcatccaaacttcatcagaaacttggaagaacataagatcgagatctagtaattgtttagcaaacatggtttagccacctactctcataccaagtcagctagaattatagactagctcttgactttaaaaaatatatatttggagccgggtagtggtagcacatgcctttaatccctgcatttgggaggcagaggcaggtggatttctgagttccaggccaaccatgcctggtctacagagtgagttccaggacaaccagggtttacagaggaaccctgctttgaaaaaaacatatatatatatattagggtatcatgtaattcagactagacttgagctcagagaagagtaataggtaactttgaactcctgactttcccacctctacatcctgagtgctgaggtaacatgctactgtgcctggaagcactaaccctgtgatgttgatagtgtgttaaaggaggaaacagtgtctataatccatgagcagttttattcagcctaagatatatggttccacttagatacgattagctacccagtcttaagtaattgtcatgtatttaggtatttctgaatgtctggaaagctatacagacattgcccagtgcatttatatttctctgttttctgactcgattctaatattgaattaatattgaataggtgatcattaaagaccaaatgtaagggtgaagttaaattatttcatgttttaataagcagtcatctttttcacttttacacttgggctggacaacaagagataggcattattctctgaggttgcattacatgtttgtagtatgatataaacctgtgcaaatagcactgcccagaatattgcccaaaatattctgcagcagaagccttttcttgtacttgggtgcatttttgtttgtttgtttgtttttgtcttttttgagacagggttttactatgtacctctatcttggagctcaccacataggccaggctggtcttgaacttacagagatccatgggcctctgcctcccaagttctggaattaaagatgtgcaccactacgccaggcttgcgttgatcttttgaagttcttagatttgtaatggacttataaccctcatacaaagttgagggttaaattagcccatagattagacattatgtcttattctaaaaaaattcagggtagaagaatataagataaatattagagacataattttgtttagaaatgagaataatccacatgatgttttctccacacaagacatgttatatatttagttgacttgtgctacttgactcaggagactcagaatttttctattcagtagagggtaagaacagaagcaattgagaagggaaaaggttaactctcagggcatgaacaatcagctgcttagggaccttaatgtgctttaagttccccaaatgcctgagcagtctccggtgtgcatgcaagctcagattttaggtcacattgtcatgttttctaaaagcctccggactgagcagcaccacgtgcttctgacctcagattccaaggacccaacctgtgtactcactctgggctccatgcatcataaatctaccctgggaattgcttagttagcaacaagcattgttctggcatgtgggaggaggtgaactttcctgatagcctttgtttatgctacttagggtgctgaaggctgttcattgtgcagaaatttaagagcacactgaaggaaagccagctatttaataactagaacagaaacctatactgccttgcagcccctgttgacacacagaaaagcactgtttgagaaatccctgtgggcgaggttatctgaggtgccttgcccccaagactctgctcccacagtcaattctgtagctcaaaagccttaaaaactcagccttgtaaaattatttattccaatgacagataaacctcattaaccattacatagcgcgagtattgtttctgatgagtgaacgtgggaatagtgtgggctttgcagtatctatattgcaaatgcacatatccaataggctaaagaggacattaagtcagtaacccaagccctatactctcattttctccccattcttatgtgcatgcccagatggtgtgtactaacatagttgtacaagaatacttcagagaaaacacaactgccacaatgaatggtgcacttaaatttctacaaagtttatgtaataaaatattccttttgaaatgaatttataatctttctggcttggcaagaagatggctactagagtggcggatcaaagttaatactcaactatcaattttgtgtttagcagtcctgggtgaatgtggtgggaggattttcctgaatgcaaaggcctatgttctggtgagagcgcatgctcacctgtgggagatatatatgtatacatgatggacttatggatcctatcatggaaccatgactcctggatgccctgcaatgtataggtctctgtgactcttcaaggaaataaacaccgtcatttttttttaagtgagaagcaatattgattgttttgttactttcaacaagcaattctttgcctagggcccactatagtttgatgatctaaatgtaactcatcaacaacttgcattctgtatgcttcattaaataggagccatctcttttttcaggtgtttcttcttataaagagattgtgtgattccacttctcaagtaaaatttaaagctgtagtctagtgtattaaggagctatgcacttactgagaaaacttagttgatttttagtcatgcttcttggtcaacatataaatcagggaattaaaacatcaaacagctaaatggttctctagcccaggtggcacatgcctttaatcccagcacttgggaggtagaggcaggcgaatttctgagttcgaggtcagcctggtttataaaatgagttccaggacagccaggactacacagagaaaccctgtctcaaaaaacaaacaaacaaacaaaacaaaaaacaaacaaacaaaaagatggaacttaaaaaaaaaatcacagctctgaaccttgggtcatgaacataatggctgctgggcatggctgcatgcctgttgggagagaaagacagatcgggtttgactgtgaaacagcaagatcctgtctggaaaactacaacagcaaagagcaacaacaaaacaaaaacctagacagtccaaaactcatattatctcctctcctctgtatcctggacaggttttttatcataaaccctgcattgtacaaattcaatagtatataaaacttcccatggaaaaaatgcagtagtctgaaggagattttattccacaaggaggtttttggtaaaaccctgcacaacggggtatatggcgcatgcctgtgagttcagctacttggggatgctgatacaggaagcttgctggagccaaagacttcaagaggagtaagacaatgtccaaaaagtggaacaaaaccctcagaaaactcaaattcactcattagtttgccaacgtttttaagtgttttccatagtcaagctcaatgggaagtggaaattggctgggagaaaatggggtgaactttacacttgaaaacacacagtttagttttaggaacaggcagatctatagccaaagtggtaaagtatcgagttagaaacatgggagggttagaggcgggctcctagacagcagaactcgatttggactttgtccaggagaacaggagcagatctgggaagacaacagggagggctctggaggtgagagaatttctcaatgtcacccgaaaagtgcttgctgaacacctacacagtcagatcatagctccacatttagctgtgcagtaggagaggggaaatggggttctctgaactgatgagatggatgcaggaggcatagcctagctgtgcccctgcaatccgtgcacgtctccttgaatctggtatgctgcctggcacatgctaggtgcccatatgaataagtagctgaaactgatgtggagcaaaggtctagagggtcagtcactagatgactgatggttccttactctggaaagcaagatagaatgctgaaggaatggagagacagatttgagaaggaggtcaactccagctcctggttttatcattgtgtgtggtcttagctatggtcaccaatggaaccttaaagccaaaagcatccccttcctccactgcttgccccaagtgcttaaaattcccattctatgggtggtttggagtgggcgtgcgtgggtggagtagtgattaggtctaaaactcattacttactaggagcctgtttcagtggtttttaaagtgtgttctctgagacagcactatcaatgcctatgaatttgctaaaataccctatctggatttcaattaattacacctataaatttggagactttgagaaaaggcagtatagacatcctaagtggacaagcttccaataatgatttctggaagtttgagaagcaccactttggacgatgaatttttttttcaggttaggaattaatgtaaagtatgctaaaaagatgaaaggctgaagatataataaattagacagtctttggaggactgtgggattcagagaatgagagagggagaggcactctgatgccccaggtgctcaaatgatgttggtgttactaaagacttaatgcatattgaaaacctcttaaacagaggccatgcaagacattggggataagaagtcaatggcatacaaggacttttgatatatataacacatataactcaatggaggatcatacaggcttggaaataacaacaacagcaaaaaacaaacaaacaaataaaaacaaacaaacaaacacaaaaccctgtttctccaaacgaggtagcatctgaaaagaactagaacagtcaagggagtccaccatgacaagaagtgacagtgtgctagaggctggggagatgactcagcggcataaagtaccagactggcaagtttgaggacttgagttcaaatccacagccgccacataaaaactgggcatggccttgcaaccctaaaaccccagcactgtgtggggtgtgatgtcagagacaaatggctctctgagaagtcccaggctggctcagctagccagaacagtgaatttcctgtgcagtgaggtctgctgtctgtggtaataaggtagagtatgatgatacttctatacctagaatttctaaagaataaagaatattttaaaatctgcagcttcttacccatgatattagatatactcagaatacttctaacgacaacaaaaatatctatctctagagaaagccgtgtgttctctctaatctaagttcaatgagaatgtgaatcaggttaaaaactaagactagaatttcagtggcaccatgctcctttatggctacacaaccttgattaaggcttttaacctctccatggttcattattggtatataaagtgggaatcattatcttagtgcattcattcaggcaaatttttgcagccagaaaatgtgacgattcataagaaaatacaaaaatatatgtgaaaaatcagttaatgaaatatttactatgcaaatattgcatttctgggagtagcgtgagatactagaaatgcaaaggcatacaaaagatttcatcttggatgtctggatagagcaacagagagacaaagaagaaaagagaaccattgacttagttaaaacattaaaaattacgggacgcaattccagatatccagcattacaggattattgagtctgactaatgcagcctgacttggaaggggaagggagatgtaggagagaaaggacgtttgggttacaagcaaagatgtgtacattgtagtaaatgggagagtggggcggggcgcagctattagacattacatacacagagggcagagaaggttcccagctcagctggcttggtcaggagggattcccaggggaggttttacatgatagctcattacccatgaggaaggcttcccctgcatctgggggaaattgaaagatgattgttggaaactggggtgtaggggtaaggggtgtgtagtcaagggttgcatcttatactgaagaaaatagacatgccattctctcatcatactagatgttttagcacaaaatttcttatttttaaatttttttttaattttaagaaaaaataaaaaccttaagaaaaatgtttttattttatctttattttaggaaatttatatttaagcatatatacgttattactgcacgttggtctgaatgaaatggcaaagggctaatagtgtgatagagaagatgaggaaaagacatgcctcctggttagttcgaaaacacataccaaatgcacacacaacatccccaaaaagaactgggattgacaagtgaaaagaaatgaatcaccatttaaaatattgcttgattaaagatcaggtttgtttctctaaattaattaagcaataagatacgctaagtggctttaaccacctgagaagagacagaagtgccctgggtttcagggcctccgggatcttcctgggtttgtactgagcaatgggtcacacagttctatcgagttgaatgcaactgtgcccccccccccccattcaacaccctgccctccgaaacacacacaaagaacatttttaatttctgcttgatgagtatttttggaacatgcttatataaattattttctatgggttttccactagtgattcactagacatagaaatgaagtactctgtcttatgtgtactggtattgaaattatccttacaaatgtgttaaatcactagacatcctcaataaaccatcaacctttcctgcattctattccttctgaatcttattctattccaatattacaagtagctgatcagtgtttgattcagtccttttggcttcttctacagtgagtaaaagtattattaaaatgcaaaatgtagccagagaagcagaactaaccaggctcagtgttatgtgcctgtattcccagctactcaagagactaaagcaagaagatcactggagccctgcagattataaaagtaggactttgggtgctaaagcctacagaaaacactagccaagagaaacatattcacttggtaccacaagtatatgatctttgaatatgcagattcatcaaatgtagagacttaggaatatgcagattcattaaatgtagacttgtatggatattctaaccccatccatatcaagggccaatgaactgcaaatcagggagggttggaagtctactttgtagggaggtatgacttcaaagttattagataacagtaaagtcaaccaataaggatttatgtatactgcttctgtctacagagcaggcatattgatgggtaatgagaagggtaaaatgctaacagaccttgagaagacaacttgggtaaacttaatctaacacactatagtgtgcagaacagaaatgttttaaagttactgtctttgatcattcttccatcttctccatcaaaggatttgagtcacattataaaattattgctaatatgacataaagcttcatgaaaataacttaggcaaaataaaataattataagaagaattaggagtgaatattttatgcatactttcaacaatggctgtggtttggcaccaagaattcaatcctccaaagaaaaatataaaatttcatttcattatcaatgcatagtcttataaataatatatatcagtttgaagcaatctcttactcatgaagatctgacataaatgtctccttgttatttgaatgtgaaatgcctttgacctgtttttgaacacttggtgtccagttggtggcactgttttgggaagctgaggaaacactgagacctagagacctagtgagcagaggtgggtcactgaggaagggcctcatatccaccattagttctgtactgattccctacttcctgggccagtgtccatgtgaggaattgcactccatgtccctatagccatggatgcattcctccatgctttctcttgccaggacagagtgaaatcccctgaaccactgggtgaaaatgagtccttcctctcttaagtcacagcaatgagaaaggatctaacaaacttccctataggtattctattgttttcagtacaagtatcgaacccaagtccttgcatatactacacaagtgttctagcattgagagcacctattgttccttaagtgaaaacaaggcctctgtgttacatctttataagagaactaaatcttagggcaggtttaggatgtaaactgcacagtaatgcctaaggatataagagtgttggtataagtagctgagaccctgacacagcacactttgaacaggatcagcccccatggagacagagtcctcttaaaagagcatttgctataaggatttggcaacaggttgtttaactcatgtcaggactcaaaggtaaatatttcctatttaacatttgataactagtgatacctaaagtagagttgacatttttactaagaggtgagctcctaaagccacaaccagcatgcatagagttggcttggatcctgagccccatcagtgtacacaataatggaaggctgacttctaaaacaaaacaaaacaaaacaaaacaaaaacaaaaactgaaaaacaataacaacaaatggtttgatgtctcttggtttgtttttagaaatataggttcttcctttgtttccccaattttttttctaaaattctccaggaagggttttagtttggtgacttatctgaaaatttgatcaagagtttgacttcctcttagccctacagaatcctaaaaaggacagaaagaacactcagagaaatatatgtgggcatttctaagtatacagattatatctgttatttcaatgataggtgtttgtgagcaggtgatttatgaggaaggaagaccaattataaagaagtttctagtcttgaatttacttttcttagatatttttatgtacacatatgtatatttgtgttatatatttaaatatacatacatatatgtatacacaatacacacatatgtatatatatatgtgtatatatatatatatgtgagagagtgagagagagagagaggaagaagagagagagagagagagagagagagagagagagagaatgaattactgttgctggaaaaactccatattctttttttttttatttatcaatggcaaaaatcaggcttcttgtctcctgaggaagttgctcaagaattttcattcaaaatagtaaattattgtccacactttaatattttcagagtggaaagggattctatatgcaactgtgcctatcagggtccacaccttgaaagccacatttgactctgtaatgatattatgactggactagattacactgttagagcccacttccttgctgcttctgtatggagcagagactcataagagatcctgagctattattagtatcttccttcagtaaatcacttatatatttgtaagattttcttaccactttcttatatgtcttttttaaaagccaggggcaaacatctctgctcaaataatgtgaacaatgaatacttggtgaatatctggggaaagaatcaatatgctgaagacattaggaaacttgggtcatttaataaaacttttagtataggcaggtaggtaggtgtttttagacatttgttagtgcaaattaaccaaataaaaagatatatgtatgtatacatataaaatacatataaatgaatatataatactcagcttaaggtagaaaagcaatagatatgttagtattatgttctcttcaacctataatcattctaatataatgatttcttaatttggttgtctgttttaatcaaaattcctcaatgggccaagttaaggcctcatatattcacacacacctcccattgatttcacttgggtgaaactgtaccgttaaagcaaagatttaagttgaaatgttgagttaatgatgcccactttaaataccaaaggctgaatgcatttgtgtattaagcacttagccagtcaaacagaattcccatcaggggtccaagaaaacagtatttctgaaactatgctagcctcacaaatatatactgccattctatctacaggggacgtgccaaatccaccaaatcaatgtgatagtctgtctttctcttctctctctcctctttctttctttctttctttctttctttctttctttctttctttctttctttcttcttttctttctttctctctctctctctttctttctttctttctttctttttttcttcttttcttttctttttcctttgaataaaaaaaagatatggaatcttttctaacagtaatatgggcagtcaatgcactcacaagtcattttggcaatcggctgtaattattaaacccaaacaggaataaatactgaagaagcatttgtacatttctcaaggtcttgcctcttctctctgtttatgtgtttgtgttaggttctccaactgttctagtcacagttctattgctgtggagagacaccatgaccaaggcaaatgaaataaaagaaagcatttaattggggctggcttacagtttcagaggttcagtccatcatcatcatggcaggaagtagggcagtaggtgtgataagcacgatgctggaagataattgagagctttgtcctgatctgcaggcagaaagagagaggaagcttccctgaatttagcatgggcttctgaaacttcaaagcccactcccagtgacgcacttcctctaacgtaggacgaataataggttgatataataacctcgataattaccaataaaattttgtaacaaaagtctctctaaaagggtattcatgtacttataggaatgtaattacttgtaaaaattcctgccacttaaccacaccatcagtaccccttcttctttaaaaagagaaacctgcatgattttgctagaaagtcaacaaaagaagctagttgtgaattcagctgatcaaactggtgtgtgcttccaggggataaagagctgctaactgggtctgtggtgccacgggaggaagtgaagtcatgaaatgagacctttccatataccacactgtagctgacaggctacttaaaatgtattacctcttaaaattaatcatatcctctgaaaacacgtatctttgaaaataatgtgaagaaggttttaatgacttccatgcctacaaggtttcctttgatagtgttcacatagaattgtagacatttctgagtgtttcctaaggatcaacaaaaaaaattcagcaatttctgatttgctacagagttatctatttgatttcactaaattttgaaaaaaaatctaatgttttcccataaatctacaaatcaacacatgaccagcattatgaggcatacatgcctccttaaaaacctttcttgttttctgtattaggactttgtgatatatatttttttgaaacattggtgctaactctacaccaaagaaccaaattatgttaccatagcatttacaaaattatttgtgaaatagatttcacaaatgcaatatcaaacctaaatatccttagctgcaaagaacagtgtgtcttgaagatctgcagagtctctttgtaaggcttgtccctcatgctcaggtgtggactaccagctcaaagctgggcccaatagcaatagagagcttgttctaaggcccttgatagggagactaaggaagaaagagtttggcaggcctagtaaaagccagtggataactttccatgattcaaagccttttatgatcttgcatatattctatatttatttcaagactatttagtaatagttgctcattcatatattttctttaacttttgtgtagaaaaaaatggatgaaaggaataagaaggtgtctaatcaattatatgcaatggtttaaataaacaaatgtttccttaaaatacattggggggggggacttagtaattccctgcaaagtgcaaattaaaattactatgagatttcattttacctcaatctaaacggctaagattaagaaaactcccccttggcttctgcttcagttcttcaggcttctgtcttgagctcctgtcctgccttccctttatgatggactgtaatttgtaagctgaaataaacaccctgcaccctggcaagctgccttcagtcaccgtgtttatcacaacccaaaccaaactagaacagctgggagaggaagaaaaggacgaattttaagatcagcatcgaagctttaaatatatgatagcctccttaattaattcattctccttagggaggaatgacttagtggatgcccaggttttcagatctcctgttcttttccatccttttctccaaaatgacagctgagccaatgaaggtttacacgaccttgtgattcttgaatagagtggctaaacacaggctttgggtacaggctagctggattctcaggcaagctgctccctgcagacagctgtggctgttttacttgttgttttctgttggcttgatcagaccgtagaggaattcttgctgactaagccccatctctgccctcatggatcctaccagttttctaagaagcctggcatcacatgttggatccccacctccctgtccttaggttcatggtgcctttgttgccatggaaacacctctgtccagtgtagccattaaactttcagagatcttggagtcttctcttggaggagattaggtaactaggatgtcaaagggagtcttaatcgtctccttccatctgcacacccctgcttgttgcaggtgcacctcgtaaggcaagctccttccatagttcctagtgggagatggagctgaggattctgcgctttctgcttccccctcagcctgccttagatgcccgctctcaaggatttgggccaatagagaaggggaaaagatacattagagtatccactcctcctgtctttctttggttcttgttctcaaagcccactgaaatgacaggctggccactcactcctccctccccttgcatttaattttcctctggatcctactctgcacagtttgtgggtgatattttacctttacttgattttattagtaaaatattggaaggtgttaggggaaggaaatgttagccataatttagactgcatttctaagtgaccatagacttagtagttattctttattattcacagacttaactttgaaatcctgatgatttatctttctacagtggttgatttgttgttgaatgggaatattaattcatatttcacaaatatactgggaataccttgtgcgatccaagcatcaacagcacttgctaggaacacagaattgcatcctccttcctatgagttagtaccttcattttcctagaatcttcaactgtgtttgtatctccactgagtctgaaagcattgtcacagaccaccatagacctgctgaagttcccgtgtgccttaggtacccatgtctctggcatctagtgtacacttactaatagttccacgatcaaggatctttataattatgctaaaacaattgaaacaaaatagacagctccagatctagttttccccctcccagatccaccttaaacttgtttgacatatctattaagattaagtatatagtatgcattttttctggaaaagcaatctgacaccgagagacaagaacacagcggtaatgaaatccccccattgactagtccacattcgcagctggggtcactactctatgagcactagcagggaatctacaatctgtgctcactgagtttgacaaaactgtagcatttctcttaggggtggtttggaggtgggaggacaaagtcatagtttccagcctgcactttcattttctgatcacagtgttttagaagaatctgggctttacttattcaccaggctttcaatagagaatcacattaatccttttaagctccttattctaatgatttattttgttgaaaaccatagtgatactcctttgaattttaatgatcgctggctattcaaagattcattgttttgacttcctgtccttacctttgtttcctgcatgtctgtggggaacacctgtctaatactggatctgccactggttctcgctggcttaccagagtcactcaagcctatctctgagtgttaagttgaaacgctagctactcatccatgacaataaatgtaggatgtatgtttgcagagataggcaggtagacaggcgagggacggatgaatgattgagtcattttccggagaaaagaatgtttttggatttgttagcatatgttatcattgttgaaaatctggaaaataatttagtaataaacactgaggtgccccatctaggaaattgaaatgagaaagcagttttgggttttgaaagtgctgtctttacccttaatctgggattatgaaactttggcaaattgctggccctccacttctcagtctgcgaagggatggcatgcttcctatcaaggacatagtcacggtttctttgtttggaaaggggcagtagatggtaatcaccatgacgtggctcaggagggagcataggaattatatgttgtgctttccaaacctgggaagtggctctgtcacagccctgcattcctgctctgtcctctgtgaaaccacacagaggattttccttctcctcttacaggtattcacccaggaacaccctgggttctcaagaatatattattctaatatgagatttttaacaactacactgtatttatgcataatacattttcgtgccttatcttcaggcttctggactttgattcagaatatcaggagctctgggattggctgattgacatggagtcccttgtgatggacagccacgacctgatgatgtcagaggagcagcagcagcatctttacaaggttagagctacccttcctgcttttactttgcggtggaagatctgattagcctgacaagtgtctctctcaggatagctttgtgttcattgtatgtatcatggtgtctattagaattccctcccctgtcctcaaactcatttccctccctagtgtgctgacaggccgcaccgacatcataattccaagaaagttccctttatcacatcctgtttggtgtaattctaaagaaggacaaagctttatcttcaagaccaatagcaataaacgaaactgcattaataaaaagactgaaacaaagcaaagcagagacgggctggtgacatttaacaggatgtgtttccattggagcactcaggtagatttggtccactcctcagagcttctcagagaagacagagatttgccttcattttgacttgttgttaccaaagcacagggctcatgcaatttgaggtatgttagtgatgcatacaacaggctctctcattaaatctgtgcatttcaggttgtttaagagttctcgcttggaattcatattgatctcagacaatacatctgataactatctatattgcttccatgtctgccagatcccccttaacctagagtgttttaccaattctacttaaatagctttagaaatccttacaaaacaatcatgtgatttttactgggaggaaaaatggctgtaagcctcagagtccctgaaaaggctgtgggggaaggaagagggacgttctactgaaatatcaggctgcagtaaatcttcctcatttaagcaatttttattggagtaattctgacagttgtcatccttgaattgctttgagcatatggcatatttcaaagagcagattgtgaatcataaaaaataaaattaataactaaccacagcatcagcaacagtataatgacaagaaacaactaccctctagctttttaaaaatccttatagaataagaagtatactcaaggtcaaataaaagttatcttcttcaattttaccattttaggtaaacccttctttcacaaagtattttaacttttttctcccttcatgagagagacatatactttaacagagtctgattgacattaattattgtcccttgagaatcatcttagttaagaaaagatataggctccctgtggactccgcaactggggacattttactctctgaagaattctgtatagcattgatgtcgttcattgacttttctgtttcctgtatggctagctgtccacagaacccaaattgttttccaacataccacttcccaactcacgtaactaaagccaggctatttcacatcttatgtcaggaccggaaattacatatgaaagatgctttagaaacctgtattaattcagtgctagaaaaatattttatttctgaagcatcatctcagaacttattggagtcacgttgccaaataacatttcttcttgaaacattttgtattttgcctataagccattatttttttttctgaaacagtgctgttctttgtcaaaatcacagccatataatttacatcacaattaataggaaatcagtgaatgaaaaaagcagttgtctttttttcttgtggtttttttgtaagtgcttttcctgagaattcccatcctggtgagcactgagtcattactccacccactcaggatgtctgggttaaagtatttctccaaaccttttccataccgtgtcgctttcatcggtgactcagcctttcactgtgcctctgcttctaggtgttcaacatagatattctctttgcatttggtttcgtaaagaaactataaccaagaaaccaaaggaaaatgctacaggtctgcaaggatcttgatgtgagccccagagaactgcagagatctagaaacttccaaagcaatcctggggatatggagttaggaatcctgtagaagtgtggcttttagattagaaaaaaacttaacgaggagaattggtttgaggtcttgctcaagaatttcgagggctcttcgggtcaagtcaacattgtcagtgctcgattcctgtgttcagatctgctttctggggaagccactttactgatgacttggtaaaggagaatctgtagcctgttgctcaaagagactcttgggagaccggagctctttggttgctccctggtcttcttaactttatcatgccacgagaccaccttgagcatttttatcatcggcttccagcacctctgccaatcaatgctttatcaaactttttattaaaagcaccattggtgttttgagttttgggaactatgtctcccagcagagagtgcttgctatccttatgcctgagctaaaagaagatctgaacccacctcagaggatttctaacctataatacttaacctatcttcatttctttttacatctcttatagttgtgtgtgtgtgtataccgctttgaatacatggtggtcaaagaccaatttatgagagtttagttctcaccttctaccaatgggaagccaggaaccaaattcatgaattcaagcttggcaccaagtatctctgtctgctgagctatcttgccggcttttgcatttattgaaagtgttaacatttaaccaggtggtagtggtacacacctttaatcccagtacttggaaggaagaggcaaatgactttctgtgagtttgagaaccagtttggtctacagagaaagtcttaggacacccagggctacataaagaaaccctgtctcaaaaaagggggtggggaggtgggtattaacatcaagagaaatgccttgcacttatcacacacacacacacacacacacacacacacacacacacacacacacacacaagccaagcatgagagtgtatgcctagtgcatgcctataatcccagctaggagaataactttatttgggaacattcttgatgccctatatgaagtgggttcaaaccccaaacaactatgaaaaatggaaaaaaagctcatcctgtgtggcataattgaaaaggataatggtgaattttctaaagcaactctcgagtcgagtgagggtaacaactaaagcaagcatgagcaaggacagctcttcatcctgcctccgttgtatctcaacatacacactcagcctttgttcttctgtccctgggtagctctgtattccaccacccaactccttcgctggcatagatggctgggtccagatttatgctttgctatggtcctaggtgagccccagcaacctagggaacctagcctttccagtgctcagaaagcaaagcttacttagcacttcccacgggagctgctgcttccccatctgcttttatcctctggtctctagaaagtcgtttaccctcaacttctaaatgtggcagaactcattcagcatacctcctcagtgggatgctccttgttttatgctgtttatctcaagccagccaaacacaaaggaacgtacacagggacagaagaggctaggataggcaatgcatgcattgacacgagatgacggagtttacctccctcggtacagccatgaaatataaagcacattttctgtttaagccatttcctgttttcatattgttagacatttaagagcctctctttctaattaattttacactgcatcattttgagaacaactcaattcatactaaaaattaactatttgcttgattacattttctttccaattttgggatggtaccaccagtgctttccctgcccccttctcttttttgccctacctctgaataggagccctctgtgtctattttctaataaacgctggcagcttcttcagcctagaaaatacgaacatcaacccttcttgttttttcttcctccatctgagaattgcctccaaggagaagttgctccctccctctcaggttctttctctccattctttctactctcctaagtaggacaatttaatttgtcaaaagtaaccaccgtgatttcgaaagttcagctcctatttggactagagttacggagccagaattcataatacgaggagctgtcattctgctggtctgtgtgtgcattaactattaatggagaaatatttaaaaacccacttgcaaaggaaaagccccattttttttccatttctgcagatcaaaggtgacattattcttgggctcgaggaagctctgtcacctcctcccatcctacacactttatagactgagtgatctggaaatctgtcatggatgggagagctggactctgctgcggctcctctcccagcagtcaccgctgtcttcacggtcctttaaaggcgcaccctctctggaccacctgacctccaccagttttatactgcctacaaagcacagaccacagagctcaccataatcctgtgttgatgtattaaccaaaggaagtgctagtctcagcactcgggtgcagtggttggagtctggtgattattattataactgaacaatagttactttcagatgacatgaataggtgtatgtcttgagagagtcccttagctatgccgcaacaatattagctcataggatttccaaggagctaaaagtaactctgccagcttgaaagcaatctcaaaacttacccatcaagactttcataccaggaaatttacagtggatttttttatatttaatttttaaattttattattttgtttattatttatatatttaccatatagttgtacattttaaggaaacaatacaagttttctgtatctttctccattagtgtctgatcctaatgtcctgtttgttaaaatgaacaatttgttttgcctaatagttactgaatgtattgattaattcttatatttatgaattttggattgttaagaatcttcatgaaaatactttctatatatatacatacaaacatatatatgtatacatacaaacatatatatgtatacatacaaacatatatatttatacatacaaacatatatgtatatatacatacaaacatgtatatgtatacatacaaacatatatatgttatacatatatatgtatacatatattatgtgtatatatgtatacatatattatatgtatatatgtatatatacatgtatacatacaaacatatatatatatacatacaaacatatatatgtatacataaaaaatatatatatatatgtgtgtgtgtgtgtgtgtgtgtatgagatgcagtagcacctccacagagtgctatgagggaagaaggttttaaagtaaaaatacaaaccagaactagggaaaatatgcataggccagcggcttgttctgtgagaagagtaagtatggctgacaagagctgcatagcctgtagcatccctctcagctaaaaaaatagaagtttgagtttcctggtagcaaaagcaaaaaaggaaatatgttcacttatacagtatgcgttttgtatgaaaaagccataatagtgcctttgaagaagctaaggccattggatatatatatatatatatatatatatatatatatatatatatatcatgtctacgaatatttattaagtagttcttttgtacaagtaaaatggcaaatacagtatttgtaacatctgaactaatttacagttcaatgacttagtcgctaagtaaatgttagagacttggagcacagacctcgccaagagactcctgttgatgaaagttaaccaagcaaacagaggcaacaggggtgaattaaagtactagacaaataaacatggttgaaatgctaagtaaaaacgacctggcaaggagagagtgaggcttagaagcaatgacggggaagggtgcacttggaggagctcaggaaaacaccatgtagaaaagtcgggtaggtgtgtaaaaagctttgcaactttaaatgtgtgtgaagtacgattatatattccaaggaataagaaatacagagtaaaagaagataaatgggacatacttggcttgttatcttacgacagctgatgccaaagtgatgttgtcattgctatgaactgatcatagaaaacagattaatcacgctatgcctatattttataaactcacgaatatcaaccccctggaatagattcctttcattttgctttggatggagctgttgtaaataatttcagatgttccttgatcctctcatggctaaactcgagttcctacaactggattgtatatctgcctcatggttcaggctgtgttgattgggcttagaattaaagaatatctactgaatatatattatttttatatgttggtttatagactagaaatgtgaattgaaatttgaattctgataattgggcattatatttggatttcagtaccaaattttacatttcaatattgattgtaccaaatgaaacaaattagcaatcattcaaacagttagggaaaatgacaccacacacacacacacacacacacacacacacatacacacacacttcttgacaatttttttttacctcattcttagttgattaattggatagcctaattgtatgttacatttaaaactccattaagaaaagaaaagtatgcttaaaatcattataatatttcaaataacattatctggtcatttttaaagtgacaagaactgaataaaatccacccatctccactactatctagaaatgaacttgcttcatttttattaaagttcaaaaagcccttagattaactgtcacattaatttgggcattgatgaatcactgtttgatatggatactcagatttatatttttctctttttaatttgagagagggcaaaactcttcatggaatgtttaggggaaaggccgatgggatgttcccaaacaacctatgaaaaatagttcctgctggagcttgtaagttctatttgattcaccttttttttttaaaggggagggaaagaagaaagattttagagactaggatgctaggaaacagttggctctgtacagaggtcgaggaagggaagccctgccaagagtctccaagagtctcctgtggtgctgctgtccggaaggtgcgctggctctggggctggccctgtggcattgtggcgctgttctctctctggctggccggctctggcctagagtggatcaaacaagctgtggggggaaagtttccctcatttgcatcacttctagacagccctgtcttactctttgctgacaggaaatcactgtctttgtcaccttttctcagggccctccttttggcagagatgggccatgtgaccacgtttaatcacaacagcagggctggctggaggctctgacaggttttcctccgcacttcaataaatggggtggaggagtcaggaggaaatgactacattaattttatagtgaaaaagataattaacacttgaaggcctgatgctctaacgctagaacctatggggttactattcaaaacaaagtaaatttatcaaaaacttgtgaaaactatcttattattatttattttaatcttgaatggtgagatctgggcacgttagagggaaaaggagcaggcaggagagagggagtgattgcatgtgaggaagagagaggagtgggggaaaaagaagaggaaatcctagcaggcattagctctgtttgcaaaagcaacttaactgggctaaagctccgccattccggggctggaggcgggagcgtgtaaagtgccgcctcgatgatatgaatagacacgggcaaacaaaagcagcagtgtgctcctagaaaactctgcttaaaggagtttccctggcaacagaaatgccgttccaaaagtagacagaactttcctcagaaaacatactattaataacaaccttccggaacaacttggaacaatttgacgacttggcaataatgctgccaagcgtcgagcaaattaatctcacacatagagtttatatttctcttgtctgtggttctgctggggcccgcctagacctctgcttttcagtggctcaggggtgaaaagtatttctcagtgctgccatggaaaaaggaaactaaagagacctcagtgtccaacatcactggccaacggttgtgttcagccttgggaacctaccaagagattttagtttgaggagatgagtgtattccagtgagaactgctacaggaaatcacacactttaatcgccctcttgaatatctctttccaatagagatgcttcctggaaaaagacttactaagggttaacagccttagtctgcctctcacgtgaagcacctctgaggccatagactatataaacgtaatatataaatgtaatgccaaatataggctgactgttactttttaaagaaccattatttcttgtcagctcagaatggactcatcttgggtctacttagccaaagggaatcatttgaattctcctaaaggctgcttgccagctgagagtcgaatgctcccctcctccgacctttctcgaatccttggatgtaaaggttaaaagtaatcaatatctcattgtgctgcttggtttcagggtaataagtaataaccatcatgttaaatccaaatgatcccagattgcacctaaatgagctgacccgttagagaggtggcgttaattgcaatcaggataaccaggagagtttgctaataaaagtttgatttaattgtaaaaggaacaaaacaaaacaaaataaaacaaaatttaatctttaactttttgaaaacttttacttaattaaatagaaatgcattatctgcttctatgttaatctgagagctttggctccgtgcccagtgtttgtaaatttccttccgatttctataaaagtccttacaagaaagggcactgacttctttgtgtcccaatactaaatgaagcatatgaattttattatttatttatttatttatttatttatttatttatttatttattttgagacagggtttctctgtgtagcctgggctgtcctggaactcactctgtagaccaggctgtcctcgaactcagaaattcgcctgcctctgcttcccaagtgctgggattaaaggagtgtgccaccacgcccggcatgaattttagataaatggaaatatcatctaccaatttttttagcatcatctagttttaaactacttatatctttacagcttatattcattctattttgactaatgaaaattagtctaaataatttagagctagaaaattatatgatgtgtgattaaactttatagactgctatgagtttgggcttgctattttgttaaaaattagtaaagtgccaaagcttaaatacgaaaatcaagtattctcattgacaaaggaatagtgatctgcaaatgataagaattaggtttaatgctccatgtaattatatcaggaagggattgtctataaccttaatagaaagtgttgcattagacatatattccgttcaatataaacacttgtctttattatgattctatgaactgtaaggtaggaaccaaatctatgggaggggcagtattttagttatttcaaaagaagttggagaatttgtttagaataggtggtcagccctgggaacctgtctgaatctcagagctgtcagtcatgaacttgctaccctggttccatttgtctaactgtacaaggaagagagtttgtaggttgtgatatgcaagacatgtcatcttggagcactaggagtgctcctgctctactactccattcccaagtgcccatattccttccctcttagcccgcagtcccatgtctttgggaatgaaaaaacgaactctgctagatgctgatattttggtgtgggatataatattgaatgaaatgctgaccttaaaaatctagtttaagtggggactgtgtagtagttgctctgttaatagagtgtctagtgtgcatgaagctccaactaactgggcatagtaatcccaaccttgacagaatagaggcaagaggtcaaaagttcaaggtcatcctaggctacacagtgagattaagtccatacccttgggctacatgaggctctgtctcaaaaacaaaatgtcctttagttgggagggccttagaaaatgaagtgaatattgaaaggtcaacagaagctatcaggaagatgggtcaagtgtggatttctattttatcacacgataaaaagggactgtgttcacaggattgcatgtgtgcttgagtatattcatataccatgaaacaggagtaagagctgaggatctatgagcctgtgaggggccattcacatccacaccatagcaatcttcaaagaaaacatggtgggtctgagctggcctttcattcatcagaagccctacattttctaaggtgtctttgcactccagcaaagttctatattcggtcagattctaagggaaaaaaaaaaaagctaaatttgaaaatgtttatctgtttgggagatccactaaaggcaggaagatgcaacctttgtaaatccggttttcaccaaagaaagttccctagtacaccctaggaataccatttgtgggaaaaccaccttctagtgctgtcaaggaagcagttttagttctcagaaataggggcatttctcagcaactcttttaataatgtgggctttttaaaaagcgcatacattcttaaatgtgtatgaacttgggtgccgctgtgtccctaatgaggtaggtgcactgggttaggataagaaagcagtgccagttacacggctgattcagttgtgactttcccaagacacaacacacacacacacacacacacacacacacatctacatatgtgtatgtgtacatatttgtttttctgaaagaaacacccaccaagtttatagcctattgctttcaggtttatttcagttttattgctaaacgtccttatacagagctaggacgtttctctgagagagtatctctccatcctgagattcatctgaacacactactcagctgccttccctagttgattccatatgtctgtagatatttgcataaaaaatttatgattgtgatattcctcttgtcatgttatccattaaaacctgagaagctcgtggcagaagtatgcacagaaatgcatttatgcacacacatttacatatgggcacacacgtggatgaggtattaatttgtttaattaaaaaagtctttcatcagaattgaatttagatgaaaccagagtccttagactcaagacatttaaagcatgcatatataaataaaaacacaaaattccttcatatatgccaagttttcagccaggaggacatttctgggttataaatcttagcacattggattttactgccttttttttttttttacaacagagcaatgccttttaatactcaaaactgcatcccaagaaaccttccttccaaacaccacaccgagttctttgttatgaattaaatacatactctaagcaatgctggtagatttaggcttggtggataaagaatggacaattcgtggcaggtgagatgcccatgggttgtgggggtgatggtccctgcttgtcaagcctgaagacctgagtttgatccctaagacctatgtggtagaaggagaaaactgatctacactctgacacacaccttggcacatgcatttgtgcatatccacaataaataactataataaaacttctaaaagaattaatgattacattttttgttaaaattttatgtgccaaaagggcagacttcatgtctgtggtgtgtatggcttgtctccagtatatggcaatatgtctggggcatttagaaacaataattatacttccaaaatatttccagcaacatttattcaattgttaaactctgttaattaaaagtatgctattatttcatgactttatcaagtaagtcattgagtataaaatttcgtgttttttaaatattaaatataaaaccaaaatctttatcctggaaaactaaaaacaggaaagacagttgttaataataatcatcactgtgctgtcaattgaccaaattactatcaggagaaaagaagaaaagagggagaagaaaggaaaagacaccattataattgagttgtaaatagcacctccatgtaaaactgataacataaatgtggaggcaatctctaatctctcagccaatagcattcagatagaacgttcattattaatattaactaagggaatatttttaaatgctgactatagatttagacttggtagctcaaatttaagaatgaacagtagagaatagagaggtggattaatagggagaggcactttgtgctgaacctgatttatatatatatataaatatgtatatatatatgtgtgtgtgtgtgtgtgtgtgtttgtgtatacatacacacatgtatatatacacatatgtgtatgtatatatgtatatatgtgtgtgttgaacttgattttatctatctatctatctatctatctatctatctatctatctaatgacatgcactgtgcaaatttgagtataaaagtcaacagtatatgcaggtgagaacatggttagcaattagagatgtttggcacatacatcagcaagttttgcttttggaactatggtaacatgagagcttacccattttcattttcctaattatttttaatgtaaaaatgaatggattttattagaacattttcaaatacacaaatcattgtactttgctcatattaataacccccccattgccatcagttgtcattcctgtaagacctaggagagttatttacgtagtacacatcatagaaaattagaattgcaggctggagaaagacttagtggataaagttggttgatgacctaagtctgaggcccagagtcaacatcgtggaagaagggggaccgactcctataggttgtcctctgtgcttcacttgtgcatcatggcacacatatgcctatctataaataaatacatctaggaaaaaaagggggatttggcttcacttgagataagtattttcaaagattgtggtcaataagaaggtaagacaaagaatgaagaacatggatgggcgtagtctactctttaatcctgaggtcaatcctttttagaagctgcttccaggtaaacttgactattacatctctcttccatcgttctagaggctgacacatcggttttattttagggtttctccaatattttcattttaaataacatttacgcttttcataatttataaaatgccaattattatcatacgtggtattttatatattccacctagcaattaattgtgaattttttttgaagaatgaaagtatttaattttactgaggtgccctaaggaaaccctgaggtctcaattatgttccttggcacctttaaaagataatagcttcaaaacacaacagagttctgtctgtgactctggtagaaacactgaggtagaactagactggccatgcttctgttctcaatggcctactgccttcttcccaagtgcctattccttctcattattaataccaaagatatttatttatagattaaatgtgtagtgtacagaaattcacattaaagaaaaaattaatcccacagcaaggtagaaatattaatgtaagaacatttttcatctgaagggtggggtatccttttttatttactggtatggaagactacaggacaagcttatgattgagtgatttaattttgtcattttcctaatttgaataggttgcatataatcttgatgctatcaaagaagaagaatatgtaaacacaaaattgtgaccaaggtagaataaataattactattagttgtgttgtagaggtatcaatttgggcttatgcagttatgaaaaggctaaactatccatcattgagaattagaatttggttggtagttgtgatgaacttgtattttactcttatttatgtccaccttgagctccactagggcttactatcttctcactgtgttcttacttcctgttcctgagctgggacacactgagacctgaaaacttgcaggaagaatgttgctgtccatatgatttgcttcctcctcctcctcctcctcctcctcctcctcctccctctccnnnnnnnnnnnnnnnnnnnnctcccctcccccttcccctccccctcctccttttcttcctccttcttttcactctcatctgcctgatggatgcctaagacccgttccgtgagatgttggttgtcttatgaaccacaggggaataatctttatattcattgaacctggcagaaataaatctctacgactgagctaattggaatattttctatgacatggaagtgcagcagaagatctccagttcagctagcatttcataatccatgttttgataatacttccacaagtttccattcttcccagtttgtattagaaaaagaattaaaatacaaaaccaccactgggagccttttctgtttaaaaataacaacaagagtagggctgctagggtcagtgccacaaatcccaggtatcacccaactagagcactgagtttagcctttaaaacactttaacagaagtaaatcattcctcgcccactgcccacgctgccgctcagatctgtgtcctgcaagggtggacgttcccagggttgagtaagttcgctcagcaacactctcccacttgaatcatcatgcaatcgctgtttcctcccaaatattacaaagttaactcttagggggtttgtacagctattcagttctatggagggtgaggagtttagtagaactttatggactaaaagcgacctcaaaggcatctttatttcatttcttcccttcgaggattttaaaaaattcatttcagataagaggaaatttatccttaagatctttccagaaggaattctacaacctcccattaaaatgtttaacaactttctctatcctggaagtcttcttatatccagtgtaaacgccttctgttgttaggtttaattgtcaaatcaaccagaacctatgctctataattaaatatcttcacgctcttctatgtagtcacattttcccaagtttttgcagttttcttctcacactagcaaaaccatatttttagatcatttatttcagttttgtctacactccatccaactaagactactcccatgctcttttctaagagaaaacacgccaacgccagcagagagattactggcatagtcatatatgtgatgatcatagcaagctccatggattttacaatcggcattttcagctctttcattggcagctaacaaagggcttcatgagcaggatgggacatgtcaagggatggttttacatatagtgagcaccggaaaatgagagctcctgtctctagctgcatatgtagcagaagatggcctagtcggccatcactgggtagagaggccccttggtcttgcaaactttatgtgcctcagtacaggggaacaccagggccaagctgtgggagtgggtgggtaggggagtggtggggagggtatgggggacttttgggatagcatgtgaaatgtaaatgaagaaaatacctaattaaaaaatgtaaaaaaaaaattttaaattgatatttcataaaaaaagtgctgcatatgacctatcaatgtttgaagaaagggctgatgaagcattgtgctgcaaaagaaaaccccataaagctcttgttttctacagagagctggtgtatattgggcattatatggttggtttagagcagtggttctcaccctccctgtgctggtttgagtaaaactggactccgtagcactatagaaagtggcactattaggagctgtgatcttgttggagtgcccgtggccttctgggaggaagtgagtatcagtcttttcctgctacatgccaatccagatgcagaactctcagctccttcagccccacatctgcctgtgtgttgccatgcttcctgccatcacaataatggactaaacctctgaacttgtcagctcccattaaatggtcttgtaaactttatgccccagtacaggggaacgccagggccaagaagtaggagagggtgagtaggggagcagggcaaggggaaaagtataggggactttctttgggatagcatttgaaatgtaagtgaagaaaatatctaataaaaaattgaaaactaagaaatacaaaaaaaagttttcctttatgagaaaaaaaagaaaatgaatttaaaaacaaaatgaatgcaacataaaaatgggccctcaagcaatcctctttccatgtggggacagagacatgtcttcttgctgctgatatataatctattatttatgaaggggtgaggcatcatggcttggccccagttcccacctagaacatacacagtatgtcagtttctttggtttattgtcatatatatggctatttttaatacattatttctgcctctttctcaagcttggttacgcctagtattctaaaaactattgatgtaaagttttaagtataaaagaagctatgaaagaagaaatggcaagaggcagtattttaagggaacatgaggtggaaagacaggagtactttcgcccactaagaaaaaaaaaacgcagtctgcaacagaaacggaaaaggggtcaaagcaagtgtattccattctgtctccgaggcaaaggtgaggctgtgcaaagcatttccaagttagaaagagcttcttatattttaaaccattggaagcaccagattgtaggcttaggccctagggatgatgatcctcaccttgaatggttcttgttaaagttcaatcaaacactgtatcgtctgcaacagaaatctgccagtagatttgacctctcatttttaaataaagctttattgggacccagccttatgcatcgtttgtgtagctgtggctctttatacagtaaaggagcagagctcagtacattgagcattgatcacacagctgacatccctaaaccatttataatttaacaccatgggaaccatgtgttaatccctattgtaaacaataataattacaactgcgctttatgaatatactgtgttcctcaggtttgaatgatttctcagttcaattttctgtttgttatactgaacgtcacctctttaccttcagtcagtgtttaaggttctaatcatctttttacaaagaacccaaatttttcttgcttttccgtgcaccgctaaacagttagttggctcatttcgccaccaggtggcctcctatgctctgttgtgcttggaggacctaaagaaagtgagaaaatggctctttcagctctttgaactttagtcattcattgtctctagtacttcacagacagcttggctgctctgtgactccttgcattccatgtttggcccaagaacataagtaaaatcataccaactgccttaggaaactaattctacttcagagacgaaaatagttgagacagtaaataataaaaataataaaaagattgcagtgtgtgtgagtgcgtgtgtgtgtgtgtgtgtgtgtgtgtgtgtgtgtgtgtgtgtgagagagagagagagagagagagagagagagagagagagagagatgcccccacagtggagtcctaatgcagatgacctgttttgtttgttttggttttaatcaccttaccttgcctcagccccactcatattgcacacaggagtagttgatagaagcttcctcaagagaagagaagactcgctcagactcagatctccatgtgtaactctcttttgaagagaatctatatgcctcatcttagggctctagtctagtttttaatcttatagagacagactcttgtgagtctttggtttacatcactaaagacactattaaagaaatcacacgatcaagtcccgaaaaagtaagccagagatcattatgcattgaccaatttttattattgttatttcatttgtttgtatgtgtgtgttgtgtgtatgtatgtaggtaggtatgtatgtgtatgtttgtttgtatatgtgtatgtaggtatgtatgtaatgtgtgtgtgtgtgtaggcacatgcatgccatgcagctcatgtgtagctcagaggccagtgtgtatgagaggccatcaggatcagccatggtgtttcctctcctggctctctcttctcgggtctcatttttctcattgtgaaatgaggagggcttggactaagctgctctagtgtgggttccagctttgccattctctctggtgtagaactacaaacgagtgtttcaacgcttgacttgggtcagttctgtgacatcttacttcccaccttaatcttcttgccttttctgtttagcaatgcctactaactgctcctctgtgtctcacaacatctaaagatatagttgttacacctttgaaaaatgtcccatcatttgagcaaattgttttcccttctgtttgcattgtattattggtttagacctgagttattacattggctctcagaacaggacagctaaatgcacttagttttctatgaatgtccaagtttgctttttgttgctgtcaattagttttctatgaatgtccaagtttgctttctgttgctgtaacaaaaaccatgaccaaaagcaacctggggaggaaagcttcaattccagcttacaggttggtctgtcacggaaggaagttaaggcaggagctagaagcagaagccatagacgaactcagcttactggctccctgagtggactttctttcacaggccaggcccacctgcctagggaaggcaccatccatagtggaccaggtgactttacatgcatagcatcgaagaaaatgccctacaaacatgcccatagacctgtctgatggagccaattccttaataagtgttcccttttcccaggtgagtctaactgacaaccaaaattagccatcactttgagggaaagacctacagggccctaaggacattgggtaaagatctagctcagatgtgggatcaaaaatgttgatttcactcaacagtgatttgttgaggttaggttaggtaaagggagagagtaatggggtattatgggaaaagatgcagagccacacttaggcagaaggaatactttttaaatgttcagaatactctaatgtataaaggcagaagtagatacggcacacagagagaactggggtgtgactgctagctgttatagtgagttctgaatttatacagtgaggcctgcacaactccatgtacgaagtgaaaactgccatgctgtgcaccttcagtgttaagttctattagatattaattatatctcaataaagctgaataaaagcagactataactgaatcaaagcacttcagatgacctagtgacaggcaatcattctacccccagattcccaattgcagagtcttctctggaggactgtgtggctggacacaaatgggctgggcttagaggctgatcacaagttgggttttttttttttaatttgcaaactgctttaattaatatcaaacctggttaataatttaggaattttccatcactttctgtttgccaaaaatacaaagatacatcttaccttagttcatactttttaaccctatgttttgaaagttgtgttaggtcctaatacaaatattaagaattaactggaagtaggaagctggctcagtcagggtctgggttcgagtatcctgaaccaatgggaagcaaactcaacatgaatctgtaatcccagcactcctagagccagctaggagctggaaagaagagtgtccctgaagctggggacaagctatctggtatattcagtgacaaataacaaaagactttacctcagaaaagatggaaaggaccaatactttaggttgtccttgaatttccatcacatacactatggcatacacccacattcacatatataagcgtggacacacacacacatgtatgcacatgtgcacaccatgtatacatggtatacacagataaaataaaaagaatataaagcatgctatgtattgtgatttgctatagaggacccaatacttttaaaggccatcccgagctagtgagtaagtgaaggtacttgccaccaagcctgcaaccaaaatgatggaaggagagaagtgactactgccagttgtcctctgactctcaaacgcaagccttggtgcacatgcgctcacaaataagtaaatgcaatttttaaaaatgcaaaggccatccttccctttaagtaatttataatctactttcttgagaaaagtaaaagcaaacagcaggatataccagcagacagcaaatccatgtgcattcagaacatacgtgagctttctcatagtctatttaagaaatagtagtggaactggcatttgctggggagaaaaatgaaataagggaacagatgtagatcctctgagaaaaacaacaacaacaaacccttagctctgaacattctcttgacatgattctacaacttcacccaaaccaggaaatcaccctagagaggagtagagagcccacaatgcctcacaataggtttatccagtgcgttcaatggacgttattaacaggcaatgtcttttgtctttctactgataatgcagtgttctacttttggaagagaagtcatgtatacaagtatataaactgtcactaggaacatataaataggtgagaacaggagcgcacaggcacgcaagctggcacgcaacatttggatcaagtttgcacaaacacttggatagtgcttattacatagcaggccttagatcttacacgttagttcatccaaagtcatagcagctttatggagtattaacattattcttgggcagagaatgaagacccaaagaagtgctaagctgactatttgtttttagggtctgtgaagttcctagcactggataatatcaccatgtcccctcttcccttcctaagaggagagaaaatacttataccttaccttgtagattctgcaagaaaggaattgaatgtgtatgcaatatttactttttcaatgatttttttttttaagcctacagcacctggtattcccaagtggtctcccatccaagtactaaccaggcccgaccctacttagcttccaagatcagacaagattaggtgcattcagggtggtatggccatagactcaatgattcttctttgatgtgtcttattttattgtctaatgaggccagagaagaattataatatattatttctcagatagaaaggggagggggatttgcagtcttgtgtgcaaatatataataggccaagaccaaaaaaaaaacttattagaaaattcatggtgttaaaaattgaagaaattctttgaatgatgcagtttatatagattgtggaattctcacaaacgtggtccgattgcatcttcaaatgtgagtggctaaaaagggcaagcctgtcatctttgttttgctggtggtgaagccatgaaaaaacgaaatgacttcccttggattctacagcatggcatcatccataggacgaagacaggaagatggtcccagggcagatggcactcagcaagatgtgctaactctcagtgatgcacagagacagtcctccacaccacagctttagaccccatctcttctttagaactcagccattgttgtggcaacatcctgcttgaaatatccacatcccacacttccctttcttagacttcttgtctcctctcagtgagtgcttagcctttctcggccatcacactctcttctgctgtgtgactatttctgggactttattcacggaagacctctccagctatactctccctttcctacttgctactttctctccctctaactggcttttttattttgttctgtgaacctttaacatttcctctttattttattactctgcctcttgtggttgagactcatacatataagtgcttgtacacgtgtccctgcccctctctttgtctctgtctctgtctctctgtctgtctcagtctcagtctcagtctctgtctctctccatgtctctgtctctctccatgtctctgtctctctccatgtctctgtctctctccatgtctctgtctctctctgtctctccaatataacaattttaatgaacttccttggtcacttatggtagattcctctctagtagtggggtcttggtgtgtgcatcaaagtatttaccagttattatgaccaagatttgcatcttggagtcttagtttatgccaagaaatgtctactgtaacccagagcgtctttaaactcggaactgtcattctcctgagtgacaggcatggctatcactgagaactcttctatctgaccttttagcctccacctcacactatttaaaatatatgatttttggaggacaagcaacatggaaatgagaaccatcaaggaacacagggtggcttcctcagtgtattttggctacttcaaagtctctttgaatggcattcttgaccttgtttgcatttaactcctaggacccaccattttcctcagacttctgggctgagtctaaagaagcatttttagagagcaatactccagccttgcatgctaagccacaatgctttctgttgctgggcttcagcacgacctgggcgagcagcttagcattgactctttcttttttttctttttttcttttgccatttaggtttccattttttttaaatattttttattaggtattttcctcatttacatttccaatgctatcccaaaagaagtaccccatacccccccctactcccctatccacccactcccacttcttggccctggtgttcccctgtactgaggcatataaagtttgcacgaccaatgggcctctctttccactgatggccaactaggccatcttttgatacatatgcagctagagtcaagagttccggggggctggttagttcatattgttgttccacctataggattgcagatacctttagctccttgggtactttctctagctcctcaattgggggccctgtgatctatccaatagctgactatgagcatccacttctgtgtttgctaggccccggcatagtctcacaagagacagctatatcagggtcctttcagcaaaatcttgttagtgtatgcaatggtgtcagcgtttagaggctgattataggatggatccctagatatggcagtctctagatggtccatcctttcgtctcagctccaaactttgtcactgtaactccttccatgggtgttttgttcccaattctaagaagggacaaagtgtccacacttttgtcttcgctcttcttgagtttcatgtgtttcgcaaattgtatcttatattttgggtattctaagtttctggtctaatatccacttataagtgaatacatatcctttgagttcttttgtggttgggttacctcactcaagatgatgctctccaggtccatccatttgcctaggattttcataaattcattcttttttatagctgaatagtactcaactgtgtaaatgaaccacattttttgtatccattcctctgttgaggggcatctgggttctttccagcttctggatattataaataaagctgctatgaacatagtggagcatgtgtctttcttaccagttggaacatcttctggatatatgcccaggagaggtattgcgggatcctctaatagtactatgtccaattttctgaggaactgccagactgatttccagagtggttgtacaagcttgcaatcccaccaacaatggaggagtgttcctctttctccacatcctcgccagcatctgctgtcacctgaattctttgatcttagccattctgactgatatgagatggaatctcagggttgttttgatttgcatttccatgatgatgaaggatgctgaacattttttcaggtgcttctcagccattgggtattcctcaggtgagaattctttgtttacctctgagccccatttttaatggggttatttgattttctggagtccacattcttgagttctttatatatattggatattagttcactatatgatttaggataggtaaagaacaataggtaaggatctcaatctgttggtgacctttttgtcttattgacggtgtcttttgccttacagaagctttacagttttatgaggtaccatttgtcaattctcaatcttacaacacaagccattgatgttctattcaggaatttttcccctgtgcccatatctttgaggcttttccccactttctcctctataagtttcagtgtctctggttttatgtagagttccttgatccacttagatttgaccttagtacaaggagatgggaattgatcaattcccattcttctacatgataaccaccagttgtgccagcatcatttgttgaaaatgctgtctttttccactggatgatttttgctcccttgtcaaagatcaagtgaccataggtgtgtgggttcatttctgggtcttcaattctattccattggtctacttgtctgtcactataccagtaccatgcagtttttatcacaactgctctgtagtacagctttaggtcaggcatggtgattccaccagaggttcttttatccttgagaagagtttttgctatcctaggttttttgttattccagatgaatttgcagattgctctttctaattcgttgaagaattgagttggaattttgatagggattgcattgaatctgtagattgcttttggcaagacagccatttttactatattgatcctgccaatccatgagcatgggagatctttccatcttctgagatcttctttaatttctttcttcagagacttgaaatttttatcatacagatctttcacttccttagttagagtcactccaaggtactttatattatttgtgactattgagaagggtgttgtttccctaatttatttctcagcctgtttattctttgtgtagagagaggccattgacttgtttgagttaatcttatatccagctacttcaccgaagctgtttatcaggtttagagttctctggtggaatttttagggtcacttatatatactatcgtatcagctgcaaaatgtgatattttgacttcttcctttccaatttgtatccccttgatctccttttgttgtcaaattgctctggctaggacttcaagtacaatgttgaataggtagggagaaagtgggcagccttgtctagtccctgattttagtgggattgcttccagcttctcaccatttactttgaagttggctacttgtttgctgtagattgcttttatcatgtttaggtatgggccttgaattcctgatctttccaagacttttatcatgattgggtgttggattttgtcaaatgctttctctgcatcaaaggagatgatcatgtggtttttgtctttgagtttgtttatataatggattacattgatggatttccatatattaaaccatccctgcatccctggaatgaaacctacttggtcagaatgaatgattgttttaatgtgttcttgaattcggttagtgaaaattttattgagtatttttgtatcaatattcataagggaaattggtctgaagttctctgtctttgttggatctttctgtggtttaggtatcagagtaattgtggcttcatagaatgagttgggtagagtaccttctacttctattttgtggaatagtttgtgcagaactggaattggatcttctttgaaggtctgatagaactctacactaaacccatctggtcctgggctttttttgtttggaagactactaatgactgcttctatttctttagggaatatgggactgtttagatcgttaacttgatcctgatttaactttggtacttggtaaatgtctaaaaatttgttcatttcatccaggttttccagttttgttgagtatagccttttgtagaaggatcttatggtgtttttgatttcttcaggaactgttattatgtctcccttttcatttctgattttgttaattaggaagctgtccctgtgccctctagtgagtctgactaagggtttatttatcttgttgattttctcaaagaaccagctccttgtttggttgattctttgaatagttcttcttgtttccacttggttgattttgcccctgagtttgattatttcctgttgtctactcctcttgggcgaatatgcttcctttttttgtagagcttttaggtgtgttgtcaagctgctagtatgtgctgtctctagtttctttttggaggcactcagagctatgagtttccctcttaaaaatgctttcattgtgtcccataagtttgggtatgttgtggcttcattttcattaaactctaaaaagtctttaatttctttctttattccttccttgaccaaggtacattgagaagagtgttgttcagtttccacgtgaatgttggctttccattatttatgttgtcattgaagatcagccttagtccgtgttgatctggtaggatgcatgggacaatttcaatatttttgtatctgttgaggactgttttgtgaccaattatatggtcaattttggagaagataccatgaggtgctgagaagaaggtatatccttttgttttaggataaaatgttctgtagatatctgttaaatccatttgtttcataacttctgttagtttcactgtgtccctgtttagtttctgtttccacgatttgtccattgatgaaagtgaggtgttgaagtctcccattattattgtgtgaggtgcaatgtgtgctttgagctttactaaagtttctttaatgaatgtggctgcccttgcatttgcagcatagatattcagaattgagagttcttcttggaggattttacctttgatgagtatgaagtgtccctccttgtcttttttgataactttgggttggaagttgattttatccgatattagaatggctactccaggttgtttcttcagaccatttgattggaaaattgttttcaagcctttcactctgaggtagtgtctgtgtttttccctgagatgggtttcctgtaagcagcaaaatgttgggtcctgtttgtgtagccagtctgttagtctatgtctttttattggggaattgagtccattgatattaagagatattaaggaaaagtaattgttgcttcctattatttttgttgttagagttggcattctgttcttgtggctgtcttccttttggtttgttaaaggattacgttcttgcttattctagggcgtggtttctatccttgtattgatttttttctgttattatcctttgaagggctggattcgtggaaagataatgtgtgaatttggttttgtcgtggaatactttggtttctccacctatggaaattgagagtttggctgggtatagtagcctgggctggcatttgtgttctcttagtgtctgtataacatctgtccaggctcttctggctctcatagtctctggtgaaaagtctggtgtaattctgataggcctgcctttataggttacttgaccttttccccttactgcttttaatattcctatctttatttagtgcatttgttgttctgattattaagtgtcgggaggtatttcttttctggtccagtctatttggagttctgtaggcttcttatatgttcatgggcatctctttctttaggtttgggaagttttcatctattattttgttaaaaatatttgctggccctttaagttgaaaatcttcattctcatctactcctattatctgtaggtttggtcttctcattgtgtcctggatttcctggatgttttgagttaggatctttttgcattttgcattgtctttgattgttgtgcagatgttgtctatgcatctgagattctctcttccacctcttgtattccgttgctgatgcgcgcatctatggttccaaattactttcctagggtttctatctccagtgttgcctcactttgggttttcttcattgtgtctacttccctttttaggtctagtatggttttgttcatttccatcacctgtttggatgtgctttcctgtttttctttatggacttctacctgtttggttgtgttttcgtggttttctttaaggacttgtaactctttagcagtgctctcctgtatttctttaagtgagttattaaagtccttcttgatgtcctctaccatcatcctgagatatgcttttaaatccgggactagtttttcaggtgtgttggggtgcttaggactgggtggggtgggagtgctgtgttctgatgatggtgagtggtcttggtttctgttagtaagattcttacatttgccttttgccatctggtaatctctggagttagttgttatagttgtctctggttagagtttgttcctcaggtgattatgttagcctctctcagcagacctgggagactagatctctcctgagttttagttgtcagagtactctctgcaggcaagctctcctcttgcagggaaggtgcccagatatctggtgtttgaacctgcctcctggcagaagttgtgttccactcaccagaggtcctaagatttcgtggagagtcctctggggaccttggggttgtcctcagactctgtgccctaggtgccctggtgctgttcgactctttcttaaaacagtaacattcctactatttcttgtgggctttcctttgggggcacagcagtaataacaatagaacaatgtcctgagatgctaatcaagctttctgaggctagaacagcaaaccagcttcaggttggaaactctaaaatctatgcactgataagcatgagaaagtactcccttcttctccaaaagaaacaagagctggaatgatggaaggatttgaagagaagaactttgaaactgggaattagaactagcctcttgtgtgctggtaaatgttgtcctaagaacacgctgctgtgtaaagggttcccttaagtgtgaataagagatgcctttgccttcctcttttcctacacacttcataggtgctaaccactcctgatcatgggaagcaattaacttcatgtctatctgaaaactgaaaatatttctagattggatgttttaccaagtaaaactcccacaggggggaaattcaaagataaacaagacagtcgtggccttttcctttctgtgcactaattttgcttaacatggatttccacaactgatttaggtctgtctgatctctcttttgggagaaattcagatgaataaatattttccaaccccttccatctaaaccataatgtcaatacttatagtggataaagggtgaataatatatggttcttgtccatttgttgcagaatctatgatctaattcttaaagcacatttatcctcatctgaggtactttttaaaatgtggccccaaggtatcagacattttaccattcaagcattggtccaagaccactcctaacccattatagatctattgagattatgggtgtggccagttaatgaagtacttgctgtgcaaggatacatatatgaatttaatcacagaatccaaattaaaaaaaaaatccaaaagtggttgcccatgcttgtaatcccagaactggagcagcagaggcaggccattccccaaggctcacttgccactcagcctaggcttcttgcaagtttcaggtcaatgagagaaactttctttaaaaacaataacaaataaacaaaacaaacaaaacagaaaagagtgggtggtgctcaaggaatgccattcaaagtttttgtgacctctaaatttacacacacacacacaagcacacaaaagcatatgcacatacatgtgcatctatgcacacatgaacttacatacacaaaattatcgatacgaaaatcctcttgtctttataaaaaagatttatttgtgtgtgtgtgtgtgtgtgtgtgtgtgtgtgtgtgtgtgtgtgtgcatgtgtgccacatatgtgtgggtacctaaaaaggccaggacagggtgtttggtcccttcccagctgaagtcataggcagttgtgaacatcctgccatgggtgctgggaactgaactcgggtcctctgaaagaacagcatgtattattttttattctgtcttctctctctctctctctctctctctctctctctctctctctctctctgtgtgtgtgtgtgtgtgtgtgtgtgtatgtgtgtgtatgtctgtggtgtgctgtgcttgtgcatgggcatgtgtaaccatggctattttggtccaggctggcctcaaaggcaacaggcctgcctctgcctcctgagtgctggaattaaaagtgtgtgtcaccatcacccagctaatttttattttaaacttaggtgtggtggtgctttttctcccagtattgtgaagtcagaggccaacagatctctgtgagcttcaagcccagactgatttacacgatgaattctaggtcactcagggccagtgagactttgcccaatatgtgtgtgtgtgtgtgtgtgtttgtgtgtgtgtgtgtgtgtattcattctttgagaacttattacatgtatctaaagcatcttcaatgcactttacttcactgtattcccccttccaacttcagattctcttcattttctttccttgaatccaattagagctacaagtatgttcctgggcatggggacagtcaaagagagaccacatcactgaaaaaagctgagcccatcccatcagccaacaaagtctagtagctctcagggtcagggccctttaccacctaagctgaaatattgatagacttcatcatgcatacgttttgtgtagtgacaagtgctatgattttatgagcgaatggttgtcgtgttcagaagacactatttcacagaacttgtcgctctgctctggtgcttccagtctgtctgcctcctcttcaatgatgctccttgagattttgggggaagaggttcatatggaagtccttttggaggctgggcttcccactgttacttcatctttgccctttaattagtagagagtctctgggttagcttatatctctgtaataaaaagcatttccagtggaggtgaacactgcattaatctatggttaaatgttttaaagacaatatgatgctatgtccatttagcagaataaccacatttgattcttctctagcgcatatgatctttctagccatgagttactggccaagtttacagtaccggatatgaatttcttcttttggagcagtctttaaattgaatcaggaacctgtcagttatcttcatcacattcaggccactatggcaccaataggcattagatatgaaaacataaaaattgagcattaaaagtcaccatgaaggacatatccattggatggcatttccattttgttttgtggagacatgaccctgaagaaaggtttgtcatgtgttaaggctatcaccacatgacaaattctggatgtggcttctctgtataggagtctttagtccctgggaaaggcctagtgcacgaatcctgaggaaatgaagtttctgtgggttttgtggttactgtttttgtcatgtctatattcatgtgtgttatttaagacagtgtctcattgtgtaactcagctgtcttagaacgtacaaccctgctacctcagccttcttagtgttagaattacaggtttaaagcactacaccaagcttgagaaataaggtggtgaaaatagggtcactggttctagagacttcaaaagtcaccatgttttgtaccaacatctttctgatgaaaatagctacagatttcacattctttctccccccttttttttcccaaagaggaagcaagatattcccttttggggaaactttatcaccaaggttaacctaacaagtacatatttttcccttatgaaattaatttgactttcttggcattatttttgaggtgtacaacatcttggcaactgctttggtttgaaactacgtgattttagaaaagcacgtttcagaatgtttaattcagcgatacaaaagcactaatgaaatatgcatgtatgaattttatatcatattagttccctctttcttaaaatctgaataaaagccaaacatctggattatgtttgaaaagcctgaatttccagtttccagagagatccgatctattttgacattgcgcacttagccttaacatttacagcgtgctattaacattacttgcaattgtagaaaaaaaaatcctgtgatttaaacaaacttggtgcctcctaatgctaaaaatatatctatatttcaactggctgctgctgcacagccatacgcatccacagtttaggcttcatcagcatttccatgataaatacttatactgagcaggcctgtaattctgctataaagatatggggtaagctttgacatatgaattctcctgttgttgtatatgaagacaacaaacagcagttcatctgtcacttagcttgagaaactattcattgacttagtgctttctaacagccccaactattgaaaattcttcatcattacccaaagaagacatgatagccatcattctttgggggctcctttctccaccagtaaccaagagtcagccagcttctgttggctattttgaggatattttgacactcaagcaaagtaagtattaatggtgagaattttggggagtagctaagaaactgattgttgtatctaatttaccgtcaccccatatgtagtagaatctgattggtaaattgagttttagaggagaggacatatacacaagaggtcagtgcagaccatgtaggaatgtggtgtgtttgaagtttgactttagttaagtctaatgtgaggtttagtttatatgtttgttacagtaaagggtaaatttgttcttttaactacatataaaagactgctaaaatctgtaaatttccttctcaattcttcttttgtttggcttaagaaaatgcaatagcactgtactcgattacatgaaaataaatgtgtttagcagtgtcttttggtaaggggttagaaaacaaaagaaactagactctaaaataggaatgtctgggaaaaagaagctgggtttgttctgctaatttctcctcacatttcccatcctgcactgcatcctaacagatagtgcatatctgcacaactattcttactacatgctgacatgccattctaccatttcctatacagtactgcaaaccttaattagaacagttatgacccgcatcctcactgaagtacacacaaaggtggagacagcccagggtgatgtgcagattttcagaaaactatggcatagcctaagacacattgccattgcaccctgtgtgctctcctctctcactctctctctctctctctctctctctctctctctctctctctctctctctgtgtgtgtacaaatgtggtcaacataaaatgtcttactgaaatcagggttagctatataaattctggaggaaaaaaatctctctgatatgtatttatcaagtaaaaggacctgacaggtttcactccgtggttcattagtgtgaattgaagatggctgtagaagttttgacttatttgctttgtctcttgtatctctgtgttctgcccagcttagtttgcagagcttccttttatgcggttcggtatcttctccactgcattcccaggtttgcttgcactacaatcttttaatcctattccaacaagtgacaatttcttagttggtagtttgggtcttggcttttcttctgcacacaatagtgtggttattatggaagatctcatgaatgctggtgaaaagaaattctaaaacagagaaagcctagattccattttcaagccaacattcactcaaccctgcagaatttttcagccagctagacagctctctgcctggagttccggtgacttggaaggtgttctctgccttctctgctgtatggatttaggctttgaacttggagctccaggatacctttcatagaacaggtgaaaccaattattttctatgtaaagttctccaacacccagtctgcaaacaagtctttttttgtttgtttgtttgtttgttttttgccctcagaactaaatactcattgccccttcagtggctttctactctggaagggtcaaatctactcaattcttttagaagtttcctttggtattcaatatggtgtcccagtctcctttgtctcagcccaacaaatagttatttgttggtttgtctctttagcatctctcttttagtgattgctgactcaaattgaaccaagaggcaagtggaacccttgtggcttccgttctgtatgcagtttagtttctatcttctggtgaggctaggcagggaggaagggatgctaataactctgccatgtttgacatttgtcattgctcctcagagttaattcattatgctagcatctttgtttcttttagagtctaatattctcatccaaaatagacagcatgaagtggtccccagtggattcagacccaagacacagacattgtttggtttatatactaaaagtttcagtgtaacataaaaattatgagacttttacataaacatatgtattcctggcttcacttaaaacaacatattaatggtactgaagccatattgaagccacatttccatgcgaggatggttggcttagcatagggcagttgcttctgcatccactgcagacctcactaccatctcccatcttctgtcactggggtcagattctagtaataatcacacctgtaggttgttttcctttcatttgagaaatggctgttttttaccacaatactatcagtcatttaatgtgaatgagagaagaggacatgtgctgaccttacactagtctttggcatcaccttccaagcaattgggtatatgagccagttattgctagtttgtgctagctggatagaaattcatgaattttgccaacagtaacaaccattggcagctcagaatctaccctgaagggagtatttatactagagaaatcagcaaacactataaatcaacactttttttcctacttgaggatcagttcattggcatatgatacctgcaagtatttgaccttctggtctctgagctaaattatttacaattttatcaagtagtaagatcagtataatctggcaatctgatcaatctgttcttgcttatgttttccttgtttgtgttattaaagcattgaagaagactggacagaacaagaggaggctgggtacccatgatgatcattacagtctgtagtccactggttctctgcagaggccttgcacactgcttctgagcatctgcagccatctgctcacttcgcaccgaggaaaacctaatggaagcgcacccatctaaacaccgactcacctccttgctgtagggatttaagtcattagattctgggtgtttgttgctagaaatttaatcatgtttaaaatctggctggcagtgtagtgaagagctgcccattctcgatacaaaactgcattgagaaagtgaaagggccgaatttctacacaagttgacaattaagatttccatagatgcagaattagccagctcctgtaggggaactggagccaaagcctttctgagcacttcaaacagacaaaattataatagagtcaaatcaagactaaatacatcagctgaaactggagtttagcttatcaaacccagatccaaagcatagagtggagagcatgctggatatttcttccttaaattcctctatttttttttttttattggcactggagaaaaaaataacacattaaaacctcctgactgaattactgtcctaaaccaatagatccactgggcttgtttagctaaaagccacaacagactttgtaatgcaatgatgtaatcttggctttgtgtcgtttatattcaacctaaatttttttttcctgaatagacaggctgacaacaatattgttcagtgtgggtttttatttggattctttccaaatggctcacatgccttcacagtaacacatcaggctgcttacgggtttccccccctttgcctgaattctaaactttccccctcttactagctttctatttttcttttaatgtctcagttatgtttgtaaaactaaccagcaccaccacaaaattaggatgtatcttgcagagagcattcattttactttttgcatatttttccggaggtcatgtcaaggttagtttgaattccatcctacattaagacttctttcacagctatttagctcggcagcctactccccgctggggtctgccccttgggcacgtcaaagcttcagacctgacaaatcacacacagatgaagctgtacagttttttaaacagtttgatcagtaacttttttttttttcctttttcactatccttcatagtaagattctttttccctttgaattaccgtttcaggaattgagggtttctacttgagacagtttgctttacatgagcgttgtcagccagcagtggtttttattacactgtgtcgaaagtcttctgctcacaagacggcagacatagagacacactcttaactggcaagattggaattgtgttcttaaaacctacttggagtgggaaggttagtgttgggatatcacagatttccttgggatcagaaaataaaaaatatacccagtttttatcctgttatgagttgagcctaaaaatgcctctcaaatgcttcccaggatgctcttatcagtattttagcaaattatgtaactgaccgcctgcctccccacctccctttcctgcttaattgatgaacttaaggtgcttgcctgtaacgagtgtatcagccaacggtctcctttatcactgaaggagatcacaaattttgaaaatcagcatactgcccatgtttttatgagttgaaaaatattaactgccacaaaactgccacatcaactgaagagatggtgtgattggggctgcggttatcttggcagtgccgtgatagagcagagttgctgtttttaaaaaaataagtcatatccacatttcattacattttcacacaggacagacaaaaaccaccggaaggtttttagctttgggctaagctgaacacttacagggaagagggggaaataatatttaaatgactctcagcaggaaagtacacaatgaaggtcccataaaaggttgcctggttgaaactaattaaagacaggtctaaataagaaaagagaaaaagagatcaaaggaattacattaggtgtcactatgctatttggggggcatttgatgtaatttaaaaaattttggtttaggaaaacactaaattctgaaaatgtccactcctgtcatcatgccgttatttttgcaacagctacacgtcagcaggcaaacatcttgcagaaatcacttcagcactactggcgcattcgcacattatggtgaaaagaggggcttgtgcttttcacgcggtgcgtctcagccttcaattaatgtgaaagcactacaatgcccatgcaacttctcttgcctagtggtgcaccgtttatcattgcagttttacattgaccttgacacccacttcattagaataaagattgtctaccatttaggttacattgttcctctgcacagagaccccatgcaaatttctgttcagagagaagagctgtgaggctgtcagaggtcatctgcattaaatgattgcagctattttccaaccgcttcttttcattctactcaattcaggctaggaggatcaatcaagttttctgcctgaaacagtaggactgcagggaatataactgtttttggtaggagtggatatgccctaaacagtgttaaatatttaatataaactcattaaaggccatgcaaaggcttgagaaagatgccacatttatagaaatatcaagggggacagggcacccttttgaaaaaataaacaacagtaattatcaattttataattccagaagatgtaatcacaatatttcttagaattagtgactcttttctgctgttttttttcccccacccttgatttgggttaggaaaaggggaactgggagacttcatattcttatatagtattttgcaagaagttgacaggaaaagttttcagtttgttggtgcttctattttaactcagtaacaataaatcctaacctggctgcatttgttttaaaacacatagatattctttatgtaaaagaaaaaaaaatgattggggaaataagtcgcctcgtctcctccttaagtttcctgagtgatataattggaattaaattattaatgggagatacttttaaaaagattgttttatgatctcctattagggaatttgcaattcattttaatatttgtagtttgatttatattaaagataatgcaatctatgttcaattaacaatacatggccaatgtaatgtgatttccagatcatgcaaatggaataagctagaagtgtgttggggggggggggactccattcttaacctcagatgtaatttgctgtgcgagttctggcaattttaaatgacattgcactttttaatttttccaaaggctcagcagcaaatttatcccaatcaagaaagcctattattaatttacaaggacaattgtaggagtccttataatttctttgtgcaattattcaccataaattctaatggtaaaatacaaatagtttgcaagaaataaccaccattacttgtcttgcgcttgagccttcttcttgaatcttgaacatcctttctaagtgttagtgatactgactccttgtaaagcatcccaggcttttgtgggaagctggacattggctgtcttaaagagggcagcaccagagccgccgcagaggcagtcctggcctctaccagtccagctgagctgtggacctggactttcctataaaaagattctttgttcaccactgaatagcattaggcatgggctagctgaggggccaccatgaagcctcaaaagaggagggcaaacactagctagagaatacagtgtgagagtcacagacatagccttgcatttgtgagcaaaatacatatttttacatattattttgcggtagtttggttagtatgtgttccctgaatatactttcttattgatacactaagatacattgtgtcttcacagtgtgttttcttttcctgggggatttggggtggcagtgggggtggggggggaataatcaccacaaatatacaggtgtttgagatactaatttgcacaggcaaagattcaaatgtgtcattattataactagatcatttgccttgtcttaactcttctaaatataaagtcacctgatggccggtttaaaacaacatcctcaggatagaaatactcaaacgctcatgactcagaattggacagccgttattctttaatcaggaaaattgtttgctttaattcgtgtgttcctcatagccgaagcttcgctctctccgtttagtaatgtctgctctcttttcagcatgaccaccagaagcaccatacaaaagtcttacaatgaacgtcttaatctctctgtgtgcttttagagcattattttgaattccatcatgctgcctttttttctcccctcttctgatgttttattacaacagcagaattcccagggagctttgggggcaaggttcacataatatagccctgaagttttgctaggtgggagctatcccccaggcctggccatcttttggcaatcttactatttcaagaaagaaaaaaaaaaagattctcggggtagagtctttcacagcgttagctggataggggtttatgttttacttttttttttatttactagagagtgaatatctacaaccctttcatgatgctttctttcgctgacctcaccgtgacaaggcatcttgttctttaacattgagggaggcagaaaaatgcttgagtttctcaatgtgtgccttctataccagtttcaaaatggcttattcttctggtttccatggtgacaattaacactgtttcaaggcattgttccactctccatttgggcagaattttcggtgtgatttttaacaaaaagagagagagagagagagagagagagagagagagagagagagaggaagaagaaaaagggggaaggttttaagagaaggaggaatgtctggcaaaagtgtcaaaaaagttatctcaatcaagcctgtatttgctactaaagtcatttatttttataaatccatgttttatttttactggctttgatagttcagttttagtatttgtgcgtttaaaatgtaaattataagtaagaattccaattttaattcttagttgaaacaatgaattactattaactctgtatttcctttaacttttctttatacccaaagaaatagcttttaggacactagtagcctgaatctttaatttagatcattcacaaatctattaagaggattcattagaccaaattgaattggccaagcaaatacacttaataatgtaaatatgctctttgaatagagtatattttatttttgaccagacagcacggcccacagcaggagctgtggaaagttaaatatgggatgtttatttaccttagcactcaagaaagccagctgactttaacttggctaatctcatctttggctattgaaaactcgtctgtatcatagccttcccacaccacggaacatgacggggcagcttctgctcacttactgctgtgggtgaaatgaagatgaagatggaatgatcttctcaccacgggatggagaagccccgtggtagggggatggagagcagataaagctggtggctggttctatccatctaatgcttccgaagagatgctagagacagaagagcacacgtacagtagagtcaacaaaaatgaagcccacctagcatttacatacacagccgtcaggccctaaaccttattggattcaacctcatgatgtctcaaaactcaaatactttcaccttaaattacacgccatgctagtactctccactcacatatcaacatagctaacaattaattaggttctctagcttttatcgtttgaaggcattgcctatcaatcacctctttccttgggctgttgatgcagtaagcatatccagtgataacgagggcatacataataacaaggacttttcagtctaataaccgtcttagtagctattgccataactattcataccacattccatagggaaaaaatttcccaatgtctaaaatcaaattaattgctttttatattttcatgattccaaggctcgaatttttaggaaacgatctaaactgtccacctgtcttacaaacttgcaacggaggagatgtttaaagttgggaaagagaaaagacgagtttgccacaaaaaagtccaataaccagtaaaagccactccgagaaggcacaactgaaggattctctgtgttgattgatacatatgacataggggaaagatttgaataacagtcctctgcctggctgaaatacgccccccccccaacatcatgtcagtcttacctaattagttatgtaaatcttacataggaatctgattacataaagcagattgcctctcctccagtcatcacactgacaaatcacacactatctgagtttctagaatacttgttgagtattgagttgaaaaatcttaagtggacagtgtgttttctatactggagaaccatggtcctggtaattgtctgtagttagaaatgcaatcagaatttccaggttttcacagtccaaattctgaaagtgctctaaaacaacccttgattttcttcagtatgcatattcatgtaattttggatacttcgacaccctgatcaacatgcattaataatataaaatgctttaaatcacctcatttaaaacattttgttctgtgatccacaagtgcctaacatttggggaagtttacataatacaaatgatgtgcatgtttagtgtaaatggaagattaaaatatgaaacagaaagtatgcaaacacatgcacacaagcgctgaaggtctattaactgaagcagagccgcacacctttctttctttcaagctaattccaattctagctttgtttagaattttataaaaagtgtttttgaggggacttaaatcatccaactgtttggggatattatgaacctatagatctgcaacgctcttcccccacaagagctttccttgtgaaatctgatagagtttaccttagggcagaaggcaaagtagaaatggtgctgtagaactcagaacttgacttcattgtttcaaagaaatatattttggcaatatgttacatttaatattttacccacatcctaaattttatactcagggatattttgatgcacacctccccataagcatgatagtcatttacagttgtttataagattctcttactgtgaactttcccaaatacaggtatgtgaagaataccaccacaacatggtttttactgagaggctattacattgtctccaagaaatgtcttttaagagactcacttgccatttgttagaatatagtgtgcattagttggggcaggagggttcagtagttggctgagaagttcagggtagtttatagtaatcaataagcaattgtaggtctgtatctatcccagggaactggtgagcatccttcctctttatgggtgttctttctctttagctttcaaagagtttttaagtaaaagaaaaataaaaacaaaatagtgacttaggctttaattaatagggaacttaaaagaaataagtcatataatacttatggataatgtttttctttccaagataactttgccagtttgtttgtaaataaagtccaaatacattagaaattaatcagcattgttttaacttttataactcacagtccaatgtataggttgactttgataattcacagtccaatgtatggattgtttgtggcacaaacattttcctctaccaaccaccttcatttgaaaagtgcttctccttaaagaagaaaggctcacctgccaggaaagtggttgatacatgtgtgtcatgggaggaaaaaaaaaagacaaaatactttgacctcttctaagatagatctgctgggagtgagggttctatagccaagtggtgacccaagctaacttaaatggtaagtccttccaggtcaggcactttcttgtttattatattttaaataataaaaaaacaacataaattgtgtgtgagaacttagttttaagacaaaaaaatcactgaatccagcccaatacaagaagtatctatgccgacgtgtgtggtaagtgatgtgtttgcagcagtgttactgggtcactcaaggtaaccaggcttagcctcccaggaaattgtattgtaaacaaaaccttctagttccataaacagtatgcattctgcctatagaacatccccgcacactaacgagtcatccttctcttgccatttcagcgctacagcgtggaaatgtccatcaggcacctgaaaaagacagagctacttagcaaggttgaagctttgaagaaaggtggcctttcactaccaaatgatatcctggaaaaagtggattcaattaatgaaaaatgggagctgcttggggtatttgcatttttattactgtttgtaggttctgtgtacgtttttgtgtgtggtgaagtactctctctgtctgatttctaatttgaggcacaaatctctctctctttcaattcactccttacatctcaagcaagctactcatgttattatggggaaaacattgcttttcctcttctgatctgttctttttttaaaatttattccgagctgtctcttctcagattttaataattttggttctttaatacataaagaagtaagtaaaatatgccatgtattatgagtatgcaccaagtcaactctaatacagtatatctgatatacacggcctgtcacgcttggatgaatgttaataggatttgttctgaaggtacatgttagagacagccgctgtttaactgttcagtgtgaccttaagatgggaactgcagttgccactgaagctttcaggtcacactgaagccaccaaatcaagtatgcaaatgtgacctgagtatcattgcaagactgatctgcttgtgtgtgtgtgtgtgtgtgtgtgtgtgtgtgtgtgcacgcgcgcgcacgcctcaatttcctcagcatttttaacaaaagaaaaaaaaagttttggtagttcatttcttgcgaagatggtctcagccaaagaaacaaaaagacaacatatagatatcctgttatcagaagctcgggggtggtgtgtgtgtgtgtgtgtgtgtgtgtgtgtgtgtgtgtgtgatgcaggagtctgcactgtcctgttgttggaagacagcagagagagaagttagcctgtacttgttcatcagcttctcgcctaaattgccttcacttcaaatcaagggtaagctaaatttgccaattacctaagtgattaattataatagctactatgggtggtgtcagttacagagcataatttttcaagccctctatttttctgcctctttaattttttttttaaataatactctagaaatattttgaattagaagcgctccaagtacagtgatgacttggagacatgccagtgttccgtttatgccaggcttaatctaagtgattaaaaacctgcacatttaagcccttgtttctcatctaaattctctacactgttgtagttgttcaaagtaacttcaaatgttaaaaattcttatttctagttgttatggtcttaccttttaacgataattaatgtaacctgctttaaaacatggtggtttaaattaggacctactaaattctacagcgttcattgatctcagaagaaattactgtatgatattctcaaaggatgtttacaaaacagaaaaatggcagctttgttggcctcacagataaactgacagcctgttgacactgcatttaaaggtatctttcctaatttgataaataacagtactcgcttagaaaactgtttaagctctgtcatgattatcaattcctcacccaaaaattctaaattattacaccgaagacacagtatttagttaatctgtatgagtcagatgcctctcaaacacttgccattttgacaacatatcaaatcccatatagtttttagagtcactttgagagagtagtttggggagaagagtttagtaaagctggagccacgctgaccccaggaggcaggcggctttaattggcatgattacattttaattggcatggaaaaaaattacagacaaggactttaacttctaacaatagtaaaatagagggatatggtttttaatatttctttcatctaaggtgaacagtgtagaatggaaatacattagaatgaaatgtcagtggtgcgtacagtctaatctgtgaaattctgtcccctgtgctgcatatgactctgtctcgattgcatattaaacaaccctatcaaggcagccattggcatctgctgcgctgacacaaattgtgaattaaatgaaattgatgtcctctgtcgtatatttatgaagacggaccattctctgaagtattctgtttataaagaatttatgattgcaaactgttccagaacaaaaaaagtggcaataaattcctttttgtgaccctagcctccaagggcattgatttcacctcctgctgctccttttgttacagcataaaaacaatagctaaatctggattccactgagggtcttcaaattatcaatatttgcaccatgaaaatgcaagggtgttgccaagacaggctatttttctgtcatgatctcctaaagatactatttacagagcactgtggagcagatgaatgtttgttgacttaattttatttgtgttttaaagcgtatttttttctaggtttaatttatcattatagattaaatcctattgattcagtaaagagagtgcttctaccaaagagggagaaaagaaaacacctctatcccatagtgctcagcctacataggtttataatacagcgaattgagtattattttaacatatatattaaataatccacatccaaaaggaaaagcaggaagaaccttggagctgaagatctctaagtcaggtgaaatggacagctgaacctagtacatctgtcatatcatttgaggaattgtactttgcagaaccaatgtgtgtgtgtgtgtgtgtgtgtgtgtgtgtgtgtgtgtgtgtgtgtgttatttatacttatatatttctctgtactcttggtctctgattaaattcaggcctctatctcctgaacactttatatagaatttcttactgtaaaatttttgccaagagaattcaaattaatttttgtccatgattatgttgaacttggaccaaacctccttcctgttaaagcaatgtctaaggaatgaagttttgcatgtgtaccctctggtagtggggataatgcttactaaataaccaaaaaccaaagtcacaatcaagccaatcagagttgcatgtcagttccgaggtccaggcacttccttggatcttccatgatgggttttgagcgaattggctaatctatttttgtcttgtttttgtttttcttcttcctttttaatctgatgcattagaaaaccctaagagagaagatacaggacacaatggcaggccacagtgggtcgggcccacgtgacctgctctctcctgaaagcggaagcctggtaaggcagctggaggtcaggatcaaagagctgaaaaggtggctaagagatacagagcttttcatcttcaattcctgtctgagacaagagaaggaaggaacgagcgccgagaaacaactccaatactttaaggtaataaaaatacaatccaagttgataaaaagctttatttatgggagagatgaaatatgtatcaagtacttaaattgttgtgctcctgcatctatctatggctggacccttaaatgcttccttgaatttacagacattatccacacttaggctaacctctatgtatcaaagaagaccatcaagcacatcaaatccacactgtatgtagaggaagcctgtgctggctctgtgtttgtgcaatgtctgttaagagagaactctgatgaattaaaagcagattggcaaacacagaagataactgaggactccaaaagatctaagtgttccctaaatagagtaacaaaatgtccttccataaattgatgtgggaaaaatgcacatggtttaattgatatccataatgctaacaaaagaaaacataatttcacatatgaaaaagtcaactattcacagagtaaaggaataaaagagatcttgcattacaagtgtattccattgtaaacaaatggtgcttaatcttaacaacaggatcaatattgttttggtggttttgtgcatggagaagtgttcttccagtttgtttctgttctttatgaagcatcaagtgattgaggtttaaaaggctttttagaatatttatttgtgtttgcgtttgtgcatgtgtgtgtccatgtgcacttgcatgaacccgcacagtatgcatgtggtggtcaaaggataacatctggcagttggttcttctgtcacagatgttccagggattgaacttgcttatcaggcatgcgcctttacccactaaactatcttgctggtccatagaatgcaatttaacatttgaatgttttacctcaatgttcagaagagcctatgctatttccataaataaataaaagataattatttggtctttgtgtgatcagtttgaggctttggggttatggaatgaattagtagcaatatgccttatagcatggaggaacttgaaaaggaggaaaagaccaactaagaaggaaggaactttctggaacagacaaacatttcttctcaaagtcttctagaagcaggttttattcaccggttgccatctagcaatccactagaaaatgtagtcaccttctgtcggccatacattcttgcttaccttgctcactgctgtaacaaaagtcagggcaccctcaaaggcagttgccagtaaactgcctgtatcgcacccataataattgttttagtcaaatacttcatctcctgccattgcactgaaaagttcagatcatcaatccccaagacagggagaaagcagagtcaggcatgcatctctgtgtcatttgaacacagcgtgcattttgcagattagctgaacaactacaggggtagatgctgcaaaataatttttcacttctgttgtaacttcattgccatgttagtgaactgaccagtgtccccagctttggaattaggtcacattctagtcccattggttgtttgacagatggtcatatttcttgcgcaatcccatcattgcttgatcactttctctgtaaaatggccttctaatgttatgtattttgcaattacatatataagttactattttattgagctttatgtcatgccaatagtatctaggcctaagtaacacattttaaaagtgtgagagggaaataaggagaacacgttggggaaggaagaaggagaagaggcgagagaagcagggagaagtggagggaactaaggagggaaacagaaacaccaggaagtggactttggacttcagatcactccagcatcctagtctttctaggtcactatatccctaacctagctcagtgtttacttagtaccccaaagtaacagagcagtgctgctccaggacactaggagctgccacatgctttcccccattttatttctgttctctaatgatgtgtctttgcagagtttttaagtgtcactatctgttgagctatctgtatttacatctcattctctctctctctctctctctctctctctctctctctctctctctctctctcaaagctatttttaaatcctataataactacagagaatcacctatcctaaagaaaacgcaaaaaccttaaccaacaatgtaaacctaactctgcggctcctatccatatcctgtccctgcctccttccgctaaggcaatcaggctcccaagcccaatagtcattctagaatgcttcctatagttaaattgaattccttaatgttagttgcatttcattttattacaaagatattcatgctgtaagctaccctttaggacttccttcttcattcacgattataatgcaaagatcattcacagtgttggctgtggtaataatgtgcttcctttgaatgctctacgtctccattttgaatatgtaaatatatctcatttaatcctaacagcagacctatgaattagctatgaggatcttgatttgggttataggaatcagaggcaaagggaagttaagttttgtgtgtccaaggtcatctttaatgagcaatgcagcattatattgaaatccagggctgtctggctctaatgatctttggatgaattactgtgtaaaattgatcttaactgatatttcctaagtattcttccatatcaggtgactcaaagggaaggacaggacagaaatacatttcattgtgtctttattgtagccttgttaccctcttcagtttttagccctaaaccatagctttagctattgtacataaaatgtgtgtatgtcaaggttggtttgttgttgttgttgttgttttctctatgggtgtcctttgccatcttttaagctgaaactctttaaacctttggagatcatggaaccctgatgtgtttctttatcacttgaaagcagacctttttctctttatgatgctaggatagagcatagttcttgtgcatgcttgacagttctacagctaagctaagttcccagccctaaaattggccatcaggagtctgggtagacaagttaaggatctggcataacactctttttgttgttgttttcttttgaagaaaaatttatacatatctgttggaataaatatatttcataaccaagattttaatatttataagctatttgcaagtttttcctcagtacttcttgtataattaatcaagtgttctgggccttaccagattcgttggaagaacagaatcaaatgtttgtaatttagtataaaaatgtaatagtgtgtatgatgcctcaaaaatcataattttaataagcacacacggaataaaagcttttgcttacaagaagtctaaagaaaacatacattaaaataacccaggtcagggaggggggaatgaaaactctttatgcagaggagcaggctccactggtggaggagtgtgctctgcctttctgctgggtcccccgcatgtcttctaccttcgctggctgctcagaagacaccattacctccaggccttatctctatgactcgtcattctctgaaagcacaggctgtactgattccccagcacatgatccggaagacagaaaggtgctgtatatgaaggataacgtccatccctttggagacagatctgttccctactcagactgatatgagacaagaaaagagatcgggattttaatgtttcctttgggggggggggaagcaattctagattatttttctgtaaggcagtggggtggtttgaatttacttggcccattaggaagtgtggccttgttgaagtaggtgtggcctgactggaggaaatgcttcactgtgtaggtgggttttggaggactacagagctcaagctctgtccagtgaggaggagagagaccatcctgactactttcagaagacagtcttgccttggctgccttcagatcaagatgtagaactctcagctccttctccagcattatgcctgcatgctgccatgcttcctgccatgataacagactgaatgaatctctgcaactgtaaggcagccccaattaaatgttttccttattgagagttgccttggtcatggtttctcttcacagcaacgaaaccctaactaagacaggtagtaattgtagtagatgactgattagacacaagagaaattctatacaatgaagagtctaagcccagcagaggggtgtcatgaagggaagactccaaagccttgggctagaaatataaaattattgaggactgaacacacttttacaagaaagcatgtgggcacatgtcgaggacttaatgaggccaactggcaaagggcccttaccactcagagagtgtaacatcaatgccattggctagaaggcactgccttttaaccataactcttcagagagaaaggaatataattacttaatcatatgttccttgtattccaaaaccatattcatttattctaaagactctaaattaggaacaaattgtctattaccagctaaagaaacccacagcattggcctagacccagaaccagcctgggaaggggaatgagagtaggcctgctacaaagctgtcacccagaaggggacatgaaagaaatagacctcagcatttaatgctgtagatttgcatagcaatttaagtctgaccaagcactttcatgtttgctactaattaccttcttatatgtgcacttatttattttcatgaatgaagaacttgagctgtaggaaatagatatgtcttgtttgagtgtacacacagacagcaacaggggagcaaaagcaatgctctgtgcgtgcaaattccaggagttacccactgtgtcactcattgctctttcagggaactgtggaaacttggttttcttcccaaagcgcttttttcacaaaaactaagtaatatagtctgtcagttacacaactgatgctatggtccaaaggcagccacacacaatacattaaataatagatgttggctctggtggatcaattttagcactctttataaaagcaagcactaaacttgatttaacccaaaggccatatttatctgaccatgtgttagactttaacaactaccaatgtggagatggctgcttctaaatgcctaagaaatagaaaccaggatggagagatagccatggatgtaagagcctgggttcaaattcacagcatctttatgaaaggttcactgtagctttacatcagcaatcccagagataagggtgggaacagagactataggaggctcagtgggcctccaatcctactgagaaaggcaaactcaggttcacggagagactctgccttcagggaataaggctgagagtaacagagcagcacagtgatgtattcctcacacatgcacacatacatgtacctgctacacacacacacacacacacacacagagagagagagagagagagagagagagagagagagacggacagacagacagacagagacagacagagacagaaacagagacagaatatggccatagcattatactatagccacaacttatacttgttgagtgtttatactcatgtcgccatttctaagtgttttgtctgcagttgcttacttaatcctcatcaccctcctgaggcaggtaatggggtttgttattccctacttatagaagataatattaagatgggatctattattctatattccatctctaaatactcaatgactatctatgatgttttgaatgtgaaaggtccagcaacacctggtggtattgttttaagaggcttcagagtctttagaagatgggctttagctcagctacgcagccctgagtgtacagcctaacccagctttatgttcagtccctgattctccacccttccccttgggagcaagcacattcatggtactacagccatagcctcaagcagtccccaccagcatgctttcactgccaacacaggtggaagcgttgattattttctgtaatagacacttctttctattcaatgtttattcacagaaatgagaaaattagttaatacacataatgaaaggaaatcagtgacaatgttttatgtcgtgggaatgaaaagttatggagtaaagcttctaaaaggacttaagattaactatgaactgtgacgcaataacaaatggtcactttgaaaataaatgtcactctttctgaatgtgataacatatacctgtaatcttggtactcaagggaccgagtcagaaggttcacaaatttgaggtcaacttgggcaacactgagagaccgtgtcttaacatttctaaacaaaacaacaccaaagaatcaaacaaatgaagagacagaccaaaacaagaaatactactcttgcatagcagtttcctccttgataaagccctctatcttggagtgaagttaattaagatgcaggatattccaagagaagacaaggcattccgtcatttggggaagtttattaagcacaagaagaaaataacccaaaggcttcaggaagtctctaaagttgactggcttctccaggatctccctccctaggcactctaagtaagtagtaagaactgctaagagatactgttggacaaaccaagctccctagaagaagatgagctacctaaaaaggttcagaccaattgtgttctgtgaaagaacactctccaacatccaattctaataaaactcactgtaaattaggcaaccactatggaagaagtcagtatgcagattccctagaaaatactaaaaactaaaacaaggaagataacataataaaattttatcactccttctctagaatcatgggattaaagccagcatgcaatagttaacttgaaaattgcatgcctgtgttaattgtgacatggaatcagcctaggtaccatcaataggtgaatggataaagaaacatcccaaagtacttttttcagccataaagaagagcaaaatgatgtcattcaagggaaatagaagcaattgaagaccctgttgagtgaaccacacaattatcaaagacaaacaccacatattttcgctcatatgcagaatctagactttataaagacatgataatacaagagggatgaaacagaagggagaatgagagtggagaactaatgaatgagaatgagcataaaggaggctggggaagatgattgcaatcaaagtacatttactcatgaatgaaaatgatgaaatgaaaccatttatttttacaattaatatacactaacaaaggaaataaatatcactaaacagaccttgagaatgataaagaagaccaacataattgagacatttggggaaattttttcatagctactataagtatcctaaatggcactgtgagtaaatcttatttcctgtgagcctcaaaagtcaaggtaacaaaacaggagagaagggctggaaagatggcttagtggttaaaggcaccaactgcgcttcctgagttcaaatcccagcaaccacatggtggctcacaaccatctgtaaagggatgtgatgccctcttctggtgtgtctgaagagagcaatggtgtactcatacataaaataaataaataaatctttaaaaaaaaaaaagaaagagagaaagaaaggaagaggagagaatatttgcagtatatggagaactggccatggttcttactgctgcctgggtcatcctgatgcttgcctgggtcatcctgagacactcgcctgggccattcattctgatgctcactcctctaatgatactatagacaatgctgtgagaatctgtgttcaataagacccaaagcaagccaacatttcaaaccaactgccacggtgaaggtttgattctttcaaggggcttagatatattttagaggcataatattagccaaaattatgtgctagtcaaaagaaaacaatatatgtgcattaaaaaatgtgtcagattctctatcacatattaagaactcctgctacttaataccttaaaatagtttaagtagttggatacaatctaaaaaggacttgtgaaaataactgactgattaaagttgtaacccaatgatagaattaagtaaatcctgctcataatagtaatcttttgaggcacagtctagatagtccaggctagcctcacttgttgtgtatccaagactgattttaaacttctgatcatctcgcctatgcctgctgacagttgggattatacatgtgttccgccatgcttatctcagccaaagaaaactttacaggtagttttagtatatttttctaaagtaaattgatgcaacaggaggtcaccctattaagcatgataaaccagatccagaaaaaggaaaaacacacattttctctcatttgtggatcctagattttatatcattacagaaatctgtgtgtgtgagtgtatgtgcgggggacgggggaatgaaaacaggtacagataaccctagtcacaagggagcagaaacacacttttggccttctcaggtagcaggcattcatgtggtacatagatatgtacatattcagttaaaatacccagacatataaaaataaataaataagtaaataaaaaaagatatgcattgtaagtctcaatattgtaactatcttcattataagtactgagaaactacctctaatagatttttaccttttaatttttatcttttaatcatttcttttcgtttttgaggttataatacagctgcaccatttctgcctttttctcccttcaaacactctcatagtatcctccgtgatgcctttcaaattcatggcctcttttctgcattaatgtttgtccacgacatgtatacaaatatatattcctaaatacatagatacatcctgctcagtttgtatatacctgcgtgtatgttttcagtaacccattggtgtgcttttccctggctgagactatttcttcagctctcagcatctcttagttgcccatagttctttgtgtacggttgaaactgtatagtcttcctcccagtcacttgacatgcctattgctattgtcatggttcaactaatatttaggcagtcatgttcttgaaaagttttgggtgtagcttttgacatttctaggaaatacagtctcacaacaaattccccgatcctctggatagtacaatctttcttcccctccccccctcccccccagtgttctctgaaccttagatgtatccaatgagtctgggccccacaactctgtattttgattggtcatggttttctaaaattatatccatctactgcaaagagaagttttctttttttaaaaaaagatgtatttatttattatatgtaagtatattctagctgtcttcagacactcaagaagagggcatttgatttcattacggatggttgtgagccaccatgtggtttctgggatttgaactcagaacctttggaagagcagttggtgctcttaactactgagccatctctccagccagagaagttttcttaatgagagattgaagactatacttctctgttgggtatgagggcaaatatttagaatattgttagggattatgctgtgaacatgcacattttaggacatttatgtgtgaaacattgaagacatgataaagcaagtcctttggagtttcagtaactttggttgaatttaatattaaacattcatattgaattgtctgttatcttccattacttcattcactcttacatcgttccttcataattgatcagtttatagtatcaagtactacaaataggttctcttaattgttaacattaagatcttgaacttttggttgtctaacctccagtgtgtaatttcccgtcacctgatattctttgtttatattttgatttctagttttaaaggattctctctaaattttgcattctatatcattgtaatagccatattttcccactggtaaatttataaaattatagatgatgctatgtaagtcctctaaacatcacttctagcgagaaattgatgaagtcagttctgcagaggattctgttgcatccccactgagatgatccatgaagaaggaaaggcatcttttgtaccaaagatgcagggctattgcctctgtcatcatggtggcaaccttactccttggctctacaacctttgcaaactctatctttaaaatttgaagactgattctgaaagtcaaggcggaagtagtctttctagtcacaaattctagcctagatggctgtactgataacatgaatatattttattggttttataagtcatcatgatcttgtttgagtcatttctaaaatgcaaagaatcctaccaataaactgttagtgcagaaacaaaaaacattgaataggcctataaaaaaatcaaagatgaaaaactctggattaaaattaatgaccaagctgataaataagctcatcttgctaatttcttaagtgacttcaagtcccttacccctctccctacacacacaggcacatatgcatgtttgcatgcacacaaacacatacacacacacatatggcttaggatatccatgtctgtccttgttactcattttgttatcttaagtaagtttattacactttgcattcttaacaaatttgggtgcatatcttccaataagcaaactaaatctgttcatcacactttcttgattagggtcgctgatcatcccttgcattccattccttcatatcctcattcaataaatagtcatcaaacacctaccatgccgcaaggactaggttgtgtatttgcaaaacatgaagcatacagtgttgtcatgtttaaacatgttggagcgtagagtgttgtttgtagacactttagtgaattggaaggcttgataaactctttgctttacttacagggttgtgaataaactaactaaaatatactagtattaaggtaaaaacattgagctttgtttccatatagttttcattgtggttgatgtatctaagatttgattgttagctcccaatgttcattctagtaacacaattagatcttttttcatatgttcaagaattccttcttagcaccttattgcattttataataattttaaaagtagagcccgatcagctgggtcagcctgtcaaaacacgtcctagcaagcctgatctgagctgtgtccttgggatgcacatggtagaaggagaaaactgattatcatatgctacccttttacctacatacaagcaccatggcatgtttacacaggcacacacacacacacacacacacacacacacacacacacgcacgcactacactgtaaaaaaacatttaaattattttttcttttaatttttaaaaactgtacatgtgtgttttgtctgcgtgtatgtatgtgtaccacttgcatgcttggttcctgtggaggccagaagacagcattgggtcccttggaactagaaccagacatggttgtgagtgctagaaattgagcccaggtcctctggaaaaagaacaagtgctcttagcagctgagtcatctttcttactcctatacagaaaaatttaaagtctatttttgatttcacttacttatctaagacttcgggtacaattcttttctatttcagaaataccttgctttcagtgctttaaaaaatatgcatataaagtactttaatcaaatctcctccccatctcttccccttcaagccctcccttatccttccaaccatttttcctcccaacttcattgggtatatcatatcatatcatatcatatcatatcatatcatatcatatcatatcatatcatatcattctacctatcatttgtgtatgtgtgtttgtgtctgtctgtctgtctctctctctctctcttttttttttttttttggtttttcaagacagggtttctctgtgtagccctggctgtcctggaactcactctatagaccaggctgtcctggaactcagaaatccgcctgcctctgcctcccaagtgctgagattaaaggcatgtgccaccacgcccggcttctgtctgtctctcaatacctactgaacctattcagtgttgtctgagtgtccacggatgtgggaccatctgttagaacatgtgtatcttcttggggtctgcatctctgaagccacagctcttcagaaagggatgggcctttatgaactcatcctcatattcatgctggggcttttactagcttgatcttgagcaaaccttgtgcctgaagtcccagccactgcaaattcgtgtgtgcagctgtgcttttgtgtgccctatgtcctgctctatcactctcatattattcccttgagactgggtctttccctgaacctgaagctaggctagtggccagcaagccccaaccatcctgtctctgctccaccccacactgatacaagacttttagcaaaaatacatttttctcttgaactaatttgttgtctttgactaatgtcaggagtatgttgcttaatttctatgtatgagtttttttttcctatttctaatttcttatgtcacacccaaaagttaatataaagacatttgtccaatttcagattgcttcaattggctgagagttgttttctggtctagtgaatgagctaagggaacaatgtttctgtgtacttgagtacatggtctattgcacatcactgtggcctttcatgtaactcaagtccactctactcttactgattttctgtctggatctttccactgttgaaaaggagagtgttgaagtctgtgattgttgatgcattaatatttcacatttcacttctgttacattttgcctatatatttagctatttataattgttacatccatttgagcaattaactgttgttattaagtgacactgggtcacttgtcacagtttcctcagatctgtttcgtatgaagtactacgtgtagactttctcagtcctcttacatcaatgtttctgagactggtttcttccaacccttcacttccttccttttgtatgtttaaagctacagcgagtcttctgtaggcagcaaattgttgcatcttgttttccttaatctatttggccactttgccttttggctagataatttactttaaactaattattgatataggtaactactcgctgctcctcttttctcgttgtctgctttgttttgtttttaattgttttgcagttcctttgactccatctttcttgttgtcttcctctgtgacgtgcattttgtaatggtttgcatggatacccttttctggatcttttatgtctgctacaggtttttctttgttattggcataaagctcaaacaaacatttcagttacggcagcctacttttaaatgataattttgttcccatataaaaaaaattacacattttaaattcccccacattttgtgttgttgacatagaaataagttcctggttgcaaagaaagagactaccactccaaattacagtgtctcaacaagacaaaattatctctgatcaaaatggtgccctacacacaggagggaagagtgagctcacagaggcagggatttggcagatggtgacagtatcttttccttattggctggggtccaacctcatagctttttttgtgattggctagtctcagaagaaccagttcaaaggaaatgaaggaaagcggggaggagctggccacatcagtcatcagagaatgcagcaggggaaaagagactttatagggtcggggcattaaattattttcataaaagttttacaaagcgagtgagaaataaaaaaatttaaattctttgtcttaagcaaaagttttacagtgttagacagaaaagactaatatttaatgcttcttaaaatgtcacaatttatatcttttacataattttcaattaccaaccaaatcattgtagctatagtaaattttaggttttgtcatataatttacattagaattagaaatgagttgccaaagtagttagatattcctaatatgagaatactctgaactttatagcagattttatgctgtcatatggtttagcattgctaccaccttttaatttgaacttgaagatcccctgtagcattcaagtaaggtaactgtactggtgttaaactcctgggcttttgtttctggagcctgagtccctaaggtcaggctaaccatgggcttgagtgctctgagatgagttctgctgctcaggctcttgtgactatgtggaagttagcctgtgctgtgaagtgtccagagccatggaaacagccggagccatagtacattgggtccacccaatcctagagcagtcctgtaacgtgggttcataagagttcaaactggagctagaaggctagggtagaccagggttgagtaagacccagaatatcctagagtgatcctggatcctgagtctgttggaacctctaatgctttgggtgtcagcacaggacctgtgtctacaagtgcttgtctagcctctgggttagcatatgtgagaccatggtgctaacatggaacctatgctaaaagagctagtctaggcctaggtagtcatgaaatatatgtcctagatatctctctgagacaagggcaatagcctatggtgctgacctgtggactgagcctctaagaacaaaccaatgccagaggctgtggtgcttagggtccctgataaagctggaggttaacgtcactctccttcctcctagcacacagtgtttctctatgacatattgattaggttaaggggaacaatgagactgaccatgagattctgttcttactctgtgtgtgtgtgtgtgtgtgtgtgtgtgtgtgtatgtgtgtgtgtgtgtgtgtgtgtaatagaagtgctataatctctcaccaattttcttagccttacattcatattcttcttaaatgataaacatattcttcaacaaaattcagtttctgagaattacagaatgaagggattctggtatttggaaataagaattagttcaaggttattctgaatatgtgaatggactctttttttttccatttattgaaccccgtttccttaagcaaatgcatgtgttaagtactatcttgggtcctagacaaacaatccatacttctcttagaacatataacacatggtctacagtgggatgcagataagatctgccatatgatttgatagacattaacacggtatgcatatgtacataggacacttctgggaggtaactgttcccatgaggggaagcagagaaattcagagtaagtgactggttccccgcctaattttagatatttcctttaaaatatgttttattcattctttgagaatttcatgccatgtatttgtcctagtcactgttctattattgtgaagagacatcatgaccatggcaactcttataaaagaaagtctttaattgaggcttgcttacggtttcagaggtttagtccattatcagcatggcagggagcatggagttctatatacagatctgtaggcaacagcaagagaggaagagggagggagagaaacagagagacagagaaatggagagacagagtcagacagacagacagacagacagacagacagacagacagacagaaactgggcctggcatgggtttttgaacctcaaagcccactccagtgacacgtttcctccaacaaagccatccctagtcctttctaaatagtgtcattccctgatggctaaagcattcacatgtgtaaagctataggggtcactcttatttaaaagaccacaatatttcccatttcccctctccctccctctaactccttccacattcattccctcttccccacagatacttctttttgaaaaattgttttcagtaagtacagcatataatgggtatcttcatggcacattcatatgtctatcattgtaccttgctcctctttgtcctccatgacctttattagacctgcctcccactggtaccctgaattagttccagtctacatttcatatatatatgtatatgtatatgtatatgtatatgtatatgtatatgtatatcacatatgtctaagttctgtatatgagaaagatatatttgtgtgcatatattttttgtccccattatcctcacttgaccctcccaaggcacctttctcctcccacataagtgactctacactgagatctgtagtaaagcaaggtctgaggaacagaatagcctatgcatgtgtagaattctagaaagaaagaaaaaagaagtaaaaaaattcctggtggttctgtgtacttgctttttaataaactctgaattaaaaggacaccatagtatgtgctattagagaggaaaaacttggttttgttttacgacaatgtcgtcaataccttggactcagtaaatcttcaacaagggcagaatgagctatagcgctttgcccttagatgagatctgagaacacctccctctctgccttattccaaagagagaagccaagcctttgatgttgtcagtgactctctcaggacccaacaaccagagccataccagagcctgcgtctccttaattccaactcaggctccaatccaataagttcaagccaatggccttttgtacatcatcatgtatgtttctgcaatattcaaattgctttgtttttttttgtaaactatgaataagaagccaatctgatttgacaaaaagaaataaaatgatcttcacaacagacataatgattaatgggggatttagaaatgcttattgcagctactgagtgcctctttaaacagaagtaaacatatgacacacacacacaccaaggttcccctgacatcggaactcagagatttaccatcatgacccccaacagcttctacttttcagggttgtatgtactcttgggagcccgcgcttgcatagagtgtgctatcatttttcaccttgcgttgcagctccgtatgaggtacttaaagagctttagagacattagctcattaatcctcccaaaacttctctaagatacagctgagacataaatcattattctatctgaaaaaaaaaacattttttgttcattttactgatgctctaaattgttggttaatcctgaattatacactgcacatgtagaataccacacattctcttctccaataagattttttttctttcttcttagaatttgatttcatgaggctagtataaaaatagaatgataggcctcatgttgaaatcacctctgagagtcatagattaggaagtggcttggcttttaagctctgtttgtacctttttcctttaggacatcctttattgtcctttgttcatgactaggaaacatgattttgaggaattggagagaaacttcatgatccattcagtgttctatcagctgagaacaccaagaaagccaatgagtatccattcaaccatgtcaccctaattcccaataaaataccagtgcaacaaactccaaagctttatcaacaaagcaatggaagttaaagctcttcactttcctgtgtgttgcttagacaaatggcgttcactgtgaagttatttagagtttgactttgaagatgctagaatatcatcataatgtatagaatctgaaggtatcgaggggtggctttctagagatggctgcaatgtacatgggctagatagggtttctattgctatgatataaaccatgaccaacagcaacttcaagaggtatagttgtctgggagagaatggcctccataggctcatatatttgaatacttggcccctagccgatggaactgtttgggaagtatggcattgttggagaaggcattgcattgcattgggggcaggttttgaggttttcaaaaatgacaccattcccacttatccctccctgccttctgcttttggaccaagacataagctctcagctactgatccagcaccatgcctgctggcctgctgccatgctccctgccgtgatgatcatgaacttaaatcctctgaatctgtaaccacccccacccccaaactcttccttctataagttgtcttggccatggtgtttcatcatgacaatagaaaagtaacctgagacttttcttacttggtatcaggaagtaggttattgctgtgatgggcctgactttgctgtactgtttctttaagaaagacgaggaagactttggaactttggaatatgaaaactgttgaatgctgttagcagggcttaatgagccatcatagtaggagcttgaaggagagcaatgtggactatgcaggcccagcttaagacgtttcagaggggaagaatatcatcaactgtgtcagagaccactctcctgataatatgtcaaagaatctggccgtttttttctcttgtcctaaaaatctgtctgaagctaaattgaaagtttttaaactaatttcatcgatagaggagattttaagatagcctaatatcgactctgccctgtgtttattagtaattgctcttatacagagctatggtgtaaaggaacaaatgaagaagaaagaaatacaaaatgtgcagtttgaggagaaaaaaagccagaggaaatttaatgttggtgtcaaagcttatgctggatgagataagagaaacctgatttgaaatggaataaagggactggtgccctgggggtaagaccctacctggctaagcttatgacttataaaaaggaaaactcatgtaacaaacaaactaactaacaaaaagcatgggcaaatgtaactcaaggagaaagccaggttctactccaagcagacacctgaacttggaagcatcagccccgaggttctggctttagagtcatgaatgatacaggtgtacaggggttgtggaatcttcctcttaggccaggtgtatggaaagggagtccttgcatggaggcctggagtagctactgttgaagctataggaataaactctgaattacaccggagacccaaagaggttaaagatggcagggctaagaaaaatatgtcagaccaagatgcagacagggggtgaaaccatcccaagagacagaagtgtgtttcagtcagcaaagctgagaaggcagagccatctaagtcctttgacatcagacatggaactatagaatttaaagtttgccctggtcagggctttgttttggtacagcttttcctcatgctccctcccccatttccccttttgtaatggtaatgtatattctgtgccattgtatgttggaagtgtgttatttgctttttttgattttacatgaattatagttatgagattttctttattctcataagagactttggattttaaaactatgttgagactgaaagactacagggatttttgtagttgcactaaatacattttatattatatagtcatgagcctgtgggaggcagggagtaaaatggtagtttaagtggaagtggcccccgtaagctcatgtgcttgaacatttgttacccagttgatagaactgtttgaaaaggattaggaagtgtggccttgctagaggaggtatggcactgggatgggctttgaggtttcaaaagcccagccatccccagttaccactctcaatttcatgcttatggatcaagatgtaaggtctcagctatcgctctagctctgtccctgccttcctgctgccatgctccctgccatcatggtcatggactctagacatctgaacctgtaagacaatgctttcttttataattttccatggccatgatattgtatcagtagaaaagtgactaagacagaaggaaagggcttatttcactttatactttcaggtatcagtcattactgtgggaaatcagggcattaatttaagcagggcagaaacctggaggcaagagctgatgcagaagccatgaaggaacactgcttattggcatactcctcactacttgctcaacctgccttcttacagtacccaggaccaccaccccagaggtggcacagcctacagtaggctgggcactcctacatcaatcatcagtcaagaaaatgcctgacgggcttgcccaagggtcaatttgatggaggtattttctcaactgagaatattttttctgaaggaccctagcttgggtcaaattgacataaaactagccagcataggactttatccagaaaaagcaactgtagttatagccagaggaagtgaaaataataagggcatagtaaaagttaaagaagttaatattataatacctctatgattcctcatgaaagatgacaactaccttgtaacatttaattgatagtcaaagtttattttataatattttcaaagaggctaccataatacatttttcttaagtataaacttatgtaatactggtgccagaatatgttagagggtaaaagatagtttcctttcagaggaagactatcaagtggatttattttgtagtttacttaaggtgacaaaactggactctgttgaaccaggagactatccccagatgtggatagtccacattcctcattccaaatgacttttcaaatattaaactaatacctcctttgtggttagacaacttatgctcttttgggctgccaacacatcaaaatggaatatctctcactctgtttggataatataccctgtatatttggttcttcttggaggagcatgcagaaaagatatgtggtacctcttccaagaagaaagtagattcctttaaaaggaagcttaattttatttaatagaggtttctggacttctgtactctattttcttttagttgttaaggtaaataatgtagttcttacattttcttttcacaaggttctgagatgttttaaactaataagtcatagtaatttacaagttagctaaaacttgctgtctctctaccaccttacataataaatggagcctgtttgattttacttataagttaatatttccaaatgatcccaagagtgcagttgatattactaagtttctgagaatactgaaaactggactaaaaccattaaatttttttaatacactggatttctacctcagatgcaaagtaaaaaagctaagaagaaaattagaaatagtccaaattcacatggaaattgtctgtttaatttagatgttctaagaataaatgggggtctggagtctaatgatgctgtttctacctctatgcctgcaggtcaaagaggaacagaggataaagaaggagcttttctattgtgcaatttttattccctgcacaactttccctttgttagagtttccccagctctattctcccttctttgtcgttttactatttgagttcttaaacccctttattccccaccagtaggcttctgaaatgataaaactgcttttctaaaacattaattcctagatgttgtatgccaagtaacattaagtctgtggtgagcccagtgctgtcttcatgagaagcagcattaaagtctaaaatgtagggcttgatacagggaagaggtagtgaatggtcaactatcatgtggatggaagagaaaggaaagtactgtgctttggggctaagcaagatataaagggaaatagtctaatatgtctctcatgaatccggttgccagtgtgttccatgttttccctaagaatgtctcttggtttgcatggtccacatgtgtgccagctctcctccttgatattatatcattctttaggtatggcctctacgatgaccctctctgtcacagagtttgctaaataggtgtatattgctgggtcacttgccacacagcattctttcctccttcccctctaaactgccgtgggtatcctttgacctaaagatctgttaaaaagaaaagatgatttcatgtagctgggaccgaaagagaatgagagaagaaagctacccccacccatccagaactgcctaaaatgtttcccatggaatcaacatgacagggagcctcagtgggcattgtaaataaatttcaaaatgcaattatgtaaaaatctattataattactccctctctgcttacgaaagaacggctgtgggagtgtgtctagtgttctaatggctaagtttcatatacaccccgcacacccccccacattgctaaaagttttctttctgtaattgcagaatagtttagcatcttaacaataatggacatgtttttaaaagattattgccaaaagtgcattctttattccagggagactctgtaatagatactagcatttttagtaatgatacaggcaatctgtaagctattacagtttcctttagagtaacttaatcttcatattgttttgtatgtctagaattttaatagtgtttttaatttagaaaaggaggtttataacatattactaattacatgtgaatatgaactaaatacacaactactgaattttattctaaaaacaaacatatttaaaaagtacttaacctagtataaagaaaggaacaacgaaattaaagaatgccacataggaagaacagcagtgttcgtggtataacacagtgagggttagcattttgtggaacgcttgaattattttgatctataactaaaacattaagagaaatgaagatagcctcttctaactaatattaatatattttataacaaatgaaaatatgatttactaaacataactatgcatatttgtccaagacttagtaacaccatccatccaagggtctccaggaagttacagcaataattaataatacccctggtatcccttagtgattcagattgcttagtaagcatgctagatagcaaggccacttgaaatcatgtccaggttaaaaagccaggccctggatagacggctgcccctggcttttctactgggcaggtgaaagaacagaagggagatggattttcttaaaaataaaagtcgttactggaaatacttttagtttatatggttctaagacgcggatgagtatctgaatcttaaattatcatccatgatttcaacactccttgggcacagcacccagctcctctctaaggagctggcagagatgtgcttggtgagctgattcgggaaaatttagtactatttttaaaaatctagcttttatattaaacaaaccactttgctattttgaaaggagttataatctacttaaaactgtcactccctgtttctgcctcgcaattagatgatatttccaaaatgtcagaccaagactctgtttcttccatcaccataattgaatgtgacagccaagatattatatcaataccttttccataattagcaataaggatcctgccaagggttaaccagaaaagtttcataaacatttttctacaaatggtcctgaaggcagtattatgcttttaaaatctgctaatgtagcaaagacttgtgacaagcagaagacgaatctatagggagaactgtttggcaagaagagttttgtggtgtgtgatgtatgttatgtaaatgggcttattaggactctcatctattttattattggtgaccaatttaatagaggcatttaaaaaacaatatttctgcctgactcctagaagtgaagaagatacattgatataattgagagcaaatgattgcgtgtcgtgccatttaatcatgtcatttttcaattgctattttttgcactccactgcatgcttatagaatatttagcttcagtatagattgagttccagagtttgcaactgagcttggctctccatattggctagcattgttttagaaatttggaatcagttaaaacactcagacatcatttattttattttgtttaaaatatgtaaatcatcagtcacatgtcatttgcaatgctttaaattttgtctactttgagtaattatttatacatctaggatgtaaattctcatttgcaaagaactattgaccctttgtgaatgttgataattatttatataaaggacatttttttaatctttgtttagtctcttctttatcatttgtggaatgtacatctttttcagaaaaggaagtactttcaattgtctgcttggttcactggtgaatctcagacacttaaaacaatgtccataataataaacatttcatacatatttgtttaattaataatgtgtatttttccatcaatgctatcaaaaccatcctaggttcaaatatagtatattttacacatttttatgtcttaaggcttccaaataagtaaaagattggacttctaaaggatggaggttgttggctctcttagcactagctttatgtttgtagtcacttctggttaaaagcctagggcacgacagtttggaaatatcgagatcttacaagttaatgtagtgatcttacaagcaatcaagctttcttcttaaatgtcattgtttttcctgaatcagctttcagttccacggagctgagtgaaagggcctattgtcaagccttgtgatccgagtccagtccccttaacggacgtggtggaaggaaacactgacttctgcaagttgttcttagacctccacacacacacagtggtacacacacacacacacacacacacacacacacacacagaaagagagagagagagagagagagagagagagagagagagagagagagagagaggagaggtgaatactaaaaatgcacccaaaaattagtcagtgctatctgggattagggaaaataacccacaaattgctgtaaagaatagtacttgaacagttgacaagcaatcctaatgattattaatttatgttcaaatgagtatggataaactcattgaggcgaatatggcactgcttttattttgtgtttgtccagatatgaatgatcaacaggattgtctttggtgcaggatggggttatcatctgtttgtcaagccttccatttttgtaacgatgcaaagttgtatgcagagttgtatgtgaccatttcataagacacataagaatggcatcactgtaacaattggattcaactaatagtctttattttccagatttttttcacactcttctttcagatctagccttctccctattcttttctcttgatatattatggtatttttagaagtgggaggccttgatcaaagtcagacggcattatttttaccctagaaaaaatgtctgatctgtcgaatgacgtctgtaggtctgtgtcagtaattccatcccagtagaccttttagctattgccttagaaatacaaactgctcctggccttgcacatatgagtgtattggtccttcactgacccagggttgtacaatataagtttccaagctttaaactctctacttaatcacaaacttttaaatgtttttattattgttagtgtatgtctgtttgtagtatgtgtgtgtttgtgtgtgtgtgtggtgtgtgtgtgtgtgtgtgtatgtgagagagagggggnnnnnnnnnnnnnnnnnnnnnnnnnnnnnnnnnnnnnnnnnnnnnnnnnnnnnnnnnnnnnnnnnnnnnnnnnnnnnnnccaagtgttccagaatttaatgttgatcattaggcttgtactggaggtgctttggcctgctaagtcgtcttaccagctatcaaataagtcttttatggcataaaagtattcttgacttagacattgtctcaagacttacaacgtcagaacattaaattacactttgttttttttatatcagaacttattacaagatctcttctcagagaagctttattgatgatccaatctaaagtcttgcctattttattctacagttcttgttacatgacaattttgagtttgcatttatttccagcctcttccatccacacagagaaaattagaatataaattatatgaaagcaaaaagtgtgcaccttgtatactgctgtatcgatcacttagaaaagcacttggcacacagaaggcacttcagaagttcatcggtgggtgggcagaaaacttagtaattatcatcatcatacccttcgttaccttctagattttaaaaactgtggtcaaatttgtggttttcaacttttcttctattacgctaatcctctcctccacctgccagcattcagaagcctcatgttagtcctatgactcctagtcagtctcttccagccaatggtgacctttcttgttcctcaggccaaatgccagcactgagtgataatacagaacacgtgaatcatggcctcactagtcttacaacttcttgatgaattaagcattatcaaaaacctttgccttgtattgatatcctttcctttgaagaatcagccaccttagaagctcctaggaggcactgcatcttgttacacatctggcatcctccaatgttaatcctgtaatggacagtacaatgcttggcacataactgatacccataaagtgcttactgctgtaataatatcattcatacagcctttgccaaactttgctccctgatatcgatctagaatcaagcagcaaaaagcctcttctgcagcagagattcgagctctaggtttaaattggaatttaggactttgtatttttatgtttctaaaaataatctactcaagtggcttctccaatttgtaaagtttaatctgctttgtctataatactattttcaaactttaggctgcaatcaggctttgttaaactgaagctcacagggaatccctgcctcataaacatgtgaacgacacccaagaatctgcaggctagcttcgttttatttccttccttaagatgctacctaaccatgtagccccagctgccctgcaatttattattcattcaggctgaccctaaacttacgacccctttgcctcagcctcctgactatctgggattatacgcagggcagaatgtgcagttctaagttcctggatgatgcaaatactcctgggtctggggagtccacttctgttctggaaaacaatactacatatagcaaataggaagaaaattaccagcccatgaaatcaagatggtaaaatgtaaagtatccaaaaaaaattaacataggcagaagtataggaaattgtcaaaaggagattttctgtcctggggccatttaacctagagcacacctgtgtgtggctgtcgttttccctttaccattctgttgcttcattcacattgggttgaaggcagccataggtcctatatgcacatcactctctcattcctgagcttgtcccatacaaaagataccacattttgtaaatcagttgatcagtacagaaggcgaagtaatgtttgcctttataaacagcagtgactgtttcatagctctttgttttaacacttgatccaacctcacgatttgtacctcatgtggacctagtcagtagagttaacacgttgaacaaaaaattgtgtgagagatactggagatgagatgctttggagttcccccagttgcatttgcttctctgtgttcaatattcttagtttggtgtatttttagaccctttatcttacccttcctctcattcccctagttagcatatgttttaatataatagttcttttgataacacttgttcttttagtgtgtgtttgttttcattcatttgcattttgtgaggtagagaatgcttgtttgacaccacgaaggtgtacatacacataaatgcttctttttatgtgatacgttctcatttaagcaaatgtttaacacagtgagaatggagtggtggcattgagcgtcttccctccaatgctgccaagagtctaggtccagtgaaaaatgtcgaggtaggcttggtagagaatggtagcgcactgcttaccatttgtgaggctctgggttcaattcccagcactacaaaaggaaaagaaaagtattttctttctttctttcttttttttttaaatcattctttgactcactaatatgagtgatttagacatgaaaaggttgattaagtcagaagatattcaaaacaaagcattttctccaaaaatcttgtgtaccgccattggtgaattgaaagtcagattggcagttgatgaataagggaaaaggtgccatccacttatttataactttcttataatgtgacccaaaacaaatacattcatctggccattttaaggaaagggggattacttctcaatcttaaatcatgaaagtttgattattattattattattattagtagtagtagtagtagtagtagtagtagtagtagtagtagtatcatcatcatcattattttattaccttttcatgtttattacaaatctgccttttttagaaacgtgacaaaacttggtgaaaactacaaaaataaataagagagataggaatttgagaggagcattgcagcctgtatcctgccagccctgctgaggggagacagtcaggtactgacgaagatgggctttcgcagtagtaaaacattgggaatcccttgttggacatactgacaatcgcgtctaaaaactgctttcctggcctcttcttactctatttctcacgaaggcggtgtggctgtgcatccaaaccagtatggcctcattagaacaagcttcagagttgatgtaattgctgcactgacgagcactccacatggttctgtgtcctctcaccttccccagctacattatcactttgtctcctctaacacagtagtatacactccttaccatccaaggccgcttgcttgtgttccaccttaacatgtctcgggactctctaccccataactccatcgctcctcttggaccaccaggttcccaccacttccttaacaatgcctcaacttccagcagcaacctgcttgcacacacttttcatttctctctgtctgtctgtctgtctctccctccctctctttctctgtatgtgtgtgtgtctttctctccctctctgtcttggtctgtctgtctctctctgtctctgtctctctctctgtctctctctctcatacacacacacacacagataacatatttatttatctacttcatctctactagactctcaactccttgaaagaaagaatggtgacttggccacagtgcagtcctccattaggaggctcacaaagtagactatacattgcagatttgaggaggtcctagaagaacatttgtcttattctgtgccttaattacctagctatagtttctgttttcaaagtatatttctctaaaacccaaggcaaaagttaataataatcatttgttcccattagctatatttaacatttctcagtacatatggagaatgtgtatctcagtttgttataaaaaataatgtagaatatggattctaaaaaatgttgccaacaaactaccgattttatttagtatgtatgatttataaataagtacattttgatggttgtcagagtaacacatttatgtaggagaatgttatcaactgtatctaggtataaaggaatattgaaaaaaatgttaagtatagaaagtctctattttccttctcttttgaacagtgcacacataaaaaaaattaatcgagaatatacactaaacctttagatatttaaagtgaaaataacagaactgtaaaggcaaaaaaaatcagattgtaaatgttaacactatctgatttttttagttaaaatttttagaatattatttatatgtgggccatggtgtgtgtgtattgtgagtgcatgccatcatgagggtatgtgcactcatgtgcttgcacatggaggccagaagaggataccaggtgtcttctactgttctctgtcctaattccttgagacaaggtctctctctctgaacccaaatgcagcatgtgctaggctggctggcaagtgagatttaagaagctacctgcctttacattgcagtgtgtgtgtgtgtgtgtgtgtgtgtgtgtgtgtgtgtgtaaggaggttacaggtaagaatttgaactcgggattttgatcttgcagagcaagagctctgacccatctcttctcccttgcttttctggttttgaagaaaatgtgtttatcataatttgcttgcattaagatgtagatgcagactcactggatttgtagatacattctggtcacggtcagaacatcgtggtcaatttcatgaaaattgattacatcctcagataccatatttgagaactttgtgaggtacaagaaactcatctgaggtactttgcgcatgtggcttgagccatgtacaaggtgaatgtgtagtgccattcattgtgattttttttccttcagctaaaaattttgaggcttcctgttggcttatagatatgcagtttatatttatttatttgtttgtttatttattcatgttattttatttatattatgaaatttatttatattattctacttaactttaaggagaggtttgcagaatccattttcataaaaccatttccttatttttcttagcccttttcttttaacatccacagatcaaaaccctaagtcattaacattcacatcggtaggtctcatttgaagcaatttcaactggctataaccatgctactttctttcattagtcaatattgagcaaaattttggtaggcacgaggtgaacttcatcatgtagatgacttaacagttataaattaagacagtaagttgaagtgagtgtgcacacctgtgtgtgtgtgtgtgtgtgtttcatgatgggctgaggaggtagttgggagcactgccatgggagagggaaacagtattattgctttcctaggctctgagtttacctttgcttgctgaggggtttcctctcctcagcactgaactacctggtgaatagcaccaggaaaggaatttgtcaggcccagtgtggtatcaggagttagataggaaaatagtaatgcaccctaggaaaataaataagaattagttcaggaaacccaactcaaacagctgcactggtaagatgtgaataataaaattcctagtcatattttgccataaatagaggtttgggaatttgtcattcaccttatttaaaattcagaaatattaaaggtacaggttctctcattacggaaataatagaattccagctattaccaagttagggtcatttaaatggatatagcatgcattgtatccataagtggaacatctgtatcaaatgtccacctgctgatcgactactctgctccgcacacaattcagtgaacagcacttaatcattttaagacttctcctaatgaagccttatctagattaacattttaagcacaaatactttcaggcattaaaaccctcacactaaatgaaattgcattgtcttgtttacccttgttgattaataagcaatctgttaactgttagaagcgtccaattgtggcagtagagggagattagtaattcagtgatgtttgtgggtataatcatcgtttctcctgaaggctttgaattagaatatcacttacacattatccataggcaagggaaggatataatatttttagacatgttgtacccactattttgcttcgattgttcagcttagggtcagtgcagcaatacaaatgtttctggggggcaaaatgctatttttgatgcatgcatatcctttttaaatagtgtgagtgtctattaaaagacacagagcagacagcaaactgtgcagtaataatccagtatcttggatgctgttataagaacgttattgctttgttaatcaagcattggaagagaaatattgcccagtgtttcttgttttttagataatggagtttgtatatgaagattctttgcaatattatttacttttgccaatgaaatattgaacttttccccccaaagaatctagagataaatgtagaagaataattacatttgggggaaagattttctgcttcttgtgtttcctttgaccttgaaacaacactccagtttgtttgactgggactcatagaacctaaatgatttcatttttcaccatgtgagaaactcttcataccaaggtataaaagaactagtttagaaagataaatcagcggaaaggggaagaggacacaaaaggtcctaaaatctctagcattggtcaactacgtattgtcggccaccaatctcaaggaaactgtaggtctctttccttgcccttagtgttacaagctgagcatatccctacaacgtgaaattatggtggaaatactcacttcatggtgtcagaaagtcagtcctacaaacacacacaaactgatcttttttctgcattgcagtcgctctgtcatgagatcaagcagcggcgtagaggagtggcctccattctgaggttgtgccagcaccttctggatgaccgggacacttgtaatctgaacgcagatcaccagcccatgcagctgatcattgtaaaccttgaaagaaggtgggaagccatcgtcatgcaagctgtccagtggcaaacacggttacgaaagaagatgggaaaagaatctgtgagtgtcttctgccagcagaatcagctcgctctttcacaaacacatacccctaggatttgggcaatacattcaacatataccctggggtttgggcaatacagtcatcatataccctagggtttgggaaatacagtcttcatcatataccctagggtttgggcaatacagtcttcatcatataccctagggtttgggcaatacagtcttcatcatataccctagggtgtgggaaatacagtcttcatcatataccctaggatttgggcaatacagtcttcatcatataccctagggtttgggaaatacagtcttcatcatataccctagggtctgggcaatacagtcttcatcatacaccctagggtttgggcaatacagtcttcatcatataccctagggtttgggaaatacagtcttcatcatatactctagggtttgggcaatacagtcttcatcatatacacttccttgcaaactagaggcgtgactatgcattaaccaaaactccattcattgtaacacagacagttactcactttactgacattcattttagcacatctcattgtcttttgaaaaaagccacatgcatgttttggctaatgttaccactaaggatagtaatccttttatttattccttcaccaaacatattcatgaagtagacaatcctccaaggatattttggtaggaggtatattaatgctctgagtgtgtggagcagtgtgcatgttctgtgtgcagtgtcattgctgaatatctattgtttatctttccctttaatgaggagatgacaccatctgtacacctgtccccactggtcctgcttcgagtgtcttctgatggattactgagagctgtcaagtttcttcctagagtttaatgcagtattcatagtagggggtagtcattcccattaacaattttccagatttgacagtgcaggtttaagtagtttttagaagaaagaaacatgtagaggtaggagttgttttactatactatagaatatacattttctctggaagccttcatattcttaggaggagagatagtcactgaaaagcatatacttctgaaatgaccttgacatcagtgtttatcagttgtagggacaatttctacatttgaattacataagcgaaatacatatatagaatggggtgaggtgtgtgtgtgtgtgtgtgtgtgtgtttcagctcagcagggaaagttcagaatgaaaagaagggaaaccaatataaaaatcttgccattgaaaatagtttcacatacaaattctattcttaacaaagccataggatttactctctggtttgttttatattgaggacttgggtcaggaagacagcgaatcattcgacctatgtgtctgccccctttccctttgaggcaatgctgaatctaggagataattcctctcaacagctctcttcaagtgatcttagctgaggttaaatgtcttaagatctccaaattattgtccgtaaccagagtcaacataatgggatgtattttcttgaaataacatttttgttgtgaagctgtttaactaatatgttttcttccctcccccttcctcttctttttgataatgtttgtaaaggcaaaagaggttgttattcttccctctacttttcaatgatgatgataatgtgacttaattaagcactagtggcattttagagtattcaactggttgagcaaagacaagtaatcgtcttccagggtttatttgtttatttgaatcatatgattaggaatgctagattgggctgtacacactatatgtagagaatgggtatttgcttgtgtgtgtgtgtgtgtgtgtgtgtgtgtgtgtgtgtgtgtgtgtgtgtgtgtgtgtgtgtgtgtgtgtggtgtatgagggagtagccacaagtgtccttgagtataatatatgagggtttgtgcatgtgtgttatgtgtgtatgccagtgagcctgcttcccatggggaggcaagagaaggacatgtcctactgtcactctcttattcccttgatacagggcctcacagaatctgtagctaagctggctatcagcaagccccagtggtcccttttctttccactcctcacagtactggagtcataggcacaccccactgtgacatgtctgctggggatctgaactctggtcctgtcacttgctcagaaaacatattttttgccaaggcatctcccagtcctctggaatgttttacctacatctattataaaggcaggttgcttcttggaaacaagaagaggttatatactttgcagagaggagtggtgtagcatgatgaaggtagtaaatgaaattgtttatgataaaataggctgaaagttactcccaggaaaggagtggaaaggtggtgagcagcctggagttaacaacacagtgaacttgggggactggtatattgtgggtgtttctttgcttctggaccctgtagttgagtgaggaatagaaatcgtttttatgatcacacaagtatttcaataatgcaagaggtgacctttgccaaaggccaaaggtctgcaagtggcctgttcacctgcccacaataagccaccactcccctccatttcctgatttctactgctatatttccaaaacttgccatatattttgcatacataggccctgggtgaatatttgctgaataagtgaatatatggctttgtttatgaaatttctttcattcagcattggtataactatatactatacctattctacattttcatcttttacaaaagaagtcagtatatttctgagagtcatgctttgggaatcatcttatttctgtaaggatattttaccttcataagctaacttttaaccttcttttcttatctaacaaggctttctcagactccttagtctattttctcaattcaaggaaactttcagcctctgcatgaaatatgaggaggccaacatggcgaaatcactgtaagtctttagggtgccagaaagcagaaggttccacagtcaggaagctccagaactaacaaaactatcatctgaggtctccagcaggaagaaagtactgaaaaaaatcaatttgtgacacttctatgaagctaaaaatagttccctttttgttcagttgcattagaaaatgtcactatcagagtgtgatgtgtcatctcagttgtgaactggatgggatctaaagtcacatgggagatgggcctctgggcatccttttgttttccatgacagggtttctgtgtttagtcctggctgtcgtgggacttactctgtagaccaggctagcttttaacccagagatccgcctgcctctaccttccaagtgctgggattaaaggtgtgtcccacaaccggtggcctctgggtatatttataaaaagtgatcttgattaagttaactgaggtgggaagacctactcagtgtggttggaaccattccctaagctgagataaagtgagctgagcactagcattgctctctgccttgtggctttggacacaatgggatcgtccatctcaagctcctactgccatgactttttccttgttacatgcagacacgatcaggttgataagaaccagtgttgggacagcatcttcaggcagctagaggagggatgagagagaggtgggtttaagaagaatgactgccagcttcttgtcagaagcaatggatgtcaggagatggaaaaggtggagatggaggtgaagcagcgatgtaaggaaataacctagacttccctaacagagcaaatgacatccagaaaggaaaagaaagacgggttctaaatatctatggggaaagcagtcatcaccagtttacttatactactagaagtgttaagggaaagccatcaaccaagcacaacttacacccaataggaacctggatgcgcacagaggaataaagaacatggaaatgataactgaggaaatgagaagcgctttccctattatttcaatctctttaagtgttaatagactgtttaaatcaagataatagcagtgcatggtacgattgatagcacagaggataaaatgtacaacaacagtatcacaaaggccggggagcagaactgccatggtgctttgtaccgtttttattttatgtgaggtactagaacatactttaaagggaggccgtgataagatcaaatgtgtatgtggccattacaccttaaaaatacagcaaaacaaaacgctagagtaagacacaaaaggaaatggagcaggatcattttttaaattcccattttaaaaagaagacgaaaataagaaacagatgtaataaggttttttttagaggcaagatgaagatttaaagtggccgcatcaatagtcctagtgaatgaaacagactggaaactgcttaaaagaaagtaattgttaaattaggtaaactcaaccacacactgcctccccaggaatggttagagtgagtatattaatattaaacaaggtagatttcagagcaacaaaatcacaatgtataaagaagggcatgtcttcaccatgggagttccaatttaccatgagcacaagacatttataaatgtctaggacagcttacaaatacatcacacagaaaaactacagtgctgtgaagaggcaaaaaaccccagaacatcaaacagggtttccaacagtttgtctcaataactgatagagcagaaagtcagtatgaacagaagaagacatgaatgatagtttgagacagcatgaccaaactgaacactgcaagtcttaagaaaaaggcaagatggtatagacaaaagctgactccgtttaccgctggtgggaaggttgattgctgcacctgtggaatatgatatgaaagtccttgaagtatttgaaaagagaattactgtttgagcccaaaacctctggcctgggtatgtgccatcccctcatttaggagcctgtagacccttgttcttcaaacattatccaccatagtcaaagtgtggaatctgaggtgatcactggtgagtgaattgaggaaaattattatgtttatgtttattctttatagattctgacatttacaacaacatggaaaactctagtgtattagtcagagttctctagagtcaaagaacttaagagtagtctctatatagtaagggaatttgttgatgacttacaatctgtagtccaactcccaaacagtggccagcagcagctgggaatggaaatccaaggatctagcagttgctcagtcccacaaggcaagcaggcaaagaagagaaagtgaatcttccttctttcaacatccttatgtaggtctccagtagaaggtgtgtcccagattaaaggtgtgtaccaccacacctggatctgggacttgctttgtcccagatgaccttgaactcacaaatcttcttgccttagtctcctgggattcagagccactatacttcaagatctccatgccaagatccaggtcagaaacttgtatctcctagccccaagatcaggatcacaggcgagccttccaaatctggattgtagttcattccagatacagtcaagttaaaaaccaggaatagccactacacctagacagcaccataatgacatttaacaagtggacaccaaaaaaaaaaaaaatactagacaatctgatgtgtatgtggaatcttagtgtaggaacagaggagaatggtggttgccagggcagggcacaggaaacatgagaagacatcaaagaatacaatttcaattatgatagaatgaataatctggagatgcaatgtatgaaaggatagatgtagttagtaatattgcctttcatactctcttggtggtaagagagtaagttttaggcgttcttaccacacacatatacaaaagaaactctgagattatggatatgtaaattatattgactattatattcgctttactgtatgtatgcatatcaaaatggttaaactcttatacacacacatataattgataagcatgtcatctaataacaagatgacattattttaaatgtatataggacatgtatcaaaactcttctaaatcacaaaccaatttttaaaagaatttatattacacaggcataaccaaggtattgtagattacagctgcaatgcttacttaacaccaagtgtgctccttgtctatcacagaattagtttaaaaatatacctgtatttttcacataaatgtaaaataacatacttaaagtttctaccatatccttgtcccatgtttggaagatctttgtggacaatccctctcttggttttccaattcagtggtacagctatttggggataacaggccaaatcatgatagaaacaaagccagaatcttctacaacttggagctgtctgaggatgtaatttcagaagagacgagctggaggagatcaagatatcatttcagaatggccctgacagaatgctacatcatcatgaccactgggcacttcctagatggctccaagattttggaggacagtgtttgggagttgatcgtgaccactgagtatgctgaccttgaatgaagcatcatcctatatgggttttcctacaaatgccagtagtattccccctgggaaacacttcattctgccaagattcggactatccttattttcatattcattctgaggacagatgtcttaaaatatgcctctgaaagacatttactctagctttgcttagccttgctaagagatgcaaggctttttctacagtgcaacaaatattttttgtttgtttgtttgttttgtttgttttttggtgttttttgtttgttttgttttgttttgttttttttgagacagggtttctctgtgtagccctggctgtcctgaaactcactctgtagaccaggctggcctcgaactcagaaattcgcctgcctctgcctcccaagtgctgggattaaaggcgtgtgccaccacgcccagctgcaacaaatcttttgtctatagaagaagttgtgaattcaggaggggcgaaggccctggggcagtgggaagagggagaagaatgataagaaatggtataacatatctgtgtaatgaactctcagaaattaaaatcagctaaatatttaaaagaagaaaaggagaagggggagaaggaagaggaagaggaagaggaggaagaggaggaagaggaagaggacttgtcttgacaggcatggtagcatgagttataattctagcactccagatgcaaagacaggaaaatggagagttagaagccagcccgagctatatagtacactccaggcggcctgtgctactcaatgagagattgtctggaaacacagcaaaaacataagaggaatggaaggcagaagaaaattttctttagtatctgttttcctatcagttttaattttttctgagagctgtggatgattctatcactattttcttaggcaacgtcatcgccaagagtaaataagccacacttgcttttcaaacaaatgtttaagcagaaataatctagggtcctttgaactaccttgctgtatggaagtgccccttcaggttcttgatgggttaagggttgaggttttattttcacctgcacagttttcttgcttctgctctgatcctccagagctctgctgagaatagaactttgcgtccagcaacaccttacacgtctaatggccttgaaagtatacaacacatctagccacataattgaaaataataaggccacgataaatgggatggccccagggtaaaacacccaagggattcaatcggtgtcactttgcatcaacgtccgtgcatcatggtaattgaggtaacatagccaattaccacattttaattagagttctaagaacttgaggaaaattgcaatgatgagcccgctcactttttaaaagaaaagaaggaaggaaacaataggagaggaacctgacacgttgcgtgcgtagctcaggctccttacaaggggaggctatagaaagccattggcctcttctctctctttctcctcctttttctttctttttctctgaatactttcccatttgctctttactattactggtgatacatcttgaaaataagaacttttaaatgctattttgttttacctaggtgatagtgtccccgccctgatcttactaataattttacaatgttattagtaaagaaattcctcataatacaacctcagcttataatttgactttccctgggtgtctttcacattgtaacctgaagagctgtcctaagtggtaacgtactgatgaagtacacatttctctgactctggccaccaaacaaaaatagacttagattccacccccaccccacccccacgaacaaaaattaaatgcagaaagaattactgcatttagaaaataaatttgacttgtggcaattatttttataaggctagagtttaagtgagaaacctcctgtaaaattttactgctgctacataatcaagtaattatgtaattacttgtacttaattgcttacaagagagatggttgttaaaaaaaatctttatacatgtcaaaaacagcttccttctttagaatatttctacccgggctcccaatatcaagaagctttccccgtaaataattgtattccataaatctcttgttattttttctaaagatatgaaaatacatcatatagatatttacatgccctctctcttatttctacttatggtcagagagggctggggaggagaagagaaaaggagaggggagtaagaagaggaggatggaggaaaagaagcaaaagtagaaggaatgaaagaaggaagaaataattttaaattataattgaatattaaatatagaagacgttgagctgaagaacttaacatgggcagaaatggattacttctatgaacgttacaaacaaatgctgtgactaagagtctgtccattagttgtgttgctgtggcaaatcccttctctttgtccacctccatgtcttcatctggaaggcagagaggacagcactgcttgcctctgggttacagaggttaagggaatcatgtgcaagacgtttcttccaacagttgtgagcacatagccagtaaatggtatttgctgttggcatttatcgtattgctctaagaaagtcttacttttaaagtttgaatacttattcagtatcctgactgactgactattgcctatgacaatcagcatcgtggattaaagctgtctatactgaaaatctttgttgggatgctttccacattctgcagaacagaaactaaaattacctgttgtacaatagtctcaagaacagtcctggaggcattttgaccatacacatgagtattgtctaataaacacatctctttgtagtggctggaccccaccaccatgtgtcttgactgagttcacagatctgtcatatggatgttgtatgtatgcatacatgttgtatataacctatagcctcctgtcactccttttacgttaagcttttcctggcaatacacatagcttgtggacccaccaaaggaacattacattttgtgacttagcaaatattggcctccagtaccaaaagttccagaacctctgcctcaaagtttcctctctttgtaggtccaaaattttaagaccagatattataattgttttaattataatagctcccccacctctaaaattgcttacatcatcactagcgccattaaagtcacccacactgtcacaactaccacagctgccaccaaagccaccatgaccaccaaagtttcttctatgacccaaattgtcattgccaccaaagccacctccatcatcaccaccaaatattctgaagcacgctgacctctctggctggatgaagcactagccatctcctgtttccatggggcttttcttccttcacagtgtggccactcataatacggtactttcagatgacagtcttatccatggaatcatggcagtcaaaggtcacaaaagcagagcccctctgctttctactgtctctgtcaattatgagttcaatcactttgacacccccccccccatgttcaaaataatctcacaggtgttctttagtgtcttccttaatgccaacaacagagatctttttcagttagttacaccacggcaacctggattttgagaatcttctgacacggctctctttggctccacaactctaaccatcacctcatgtagctttgcattgatagattcatcagcttctgcagactggtatacacaacaaatccaaagcccctggagcatttggtatttggatgtctcatcaccgcacagttggtgagaagtggtccccattgcccaaaatgctcctcagactcatcatcgggtgttctgaaactcagctgctgagctgacgagcattgacgagattacctggctgttggagctgcttaagtctgagacccctgtagacttgaaggcagggaaataagagccttcagcaatgcttcctctgacacatcaatggacagatgggagtaagccaatgagcgcattcacaagccttactgtttgtgccacactgcctgggctagcccagttaatatatttgtgcttaataagaaatcttttctttttgttcctgcttaggactttattttaaaatcttttttatttgttttttattagcatataccaattcataacatagtgggtttgattgtgctattttcatatgtgcatatgatacagcttgatcacacccatcccgcatcaccttttcttgttcccctgcctcctcctgctcttcgctttgctcttcccaaacattcttccctgatattcaaagctcagctttttaaggtctagatcccatacatgagagaaatcatgtgatgtttgtctttgaatatagctcatttttaaaaacctgatgatggcacttttcttcaaatgacattatttcatcctttatgaacgaatatttcccattgtctatgtattacacattttctttatctgcttgatcactttctcttggcacttctggtagagattttaaatttattattgtctactctcattgatcctttggctgtctctagtctaatctagtcctttaaagttttttttttaattagatattttctttatatacatttcaaatttcaaatgctatcccgaaagttccctatactctccccctgccctactcccctacccatccactcccatttcttggccctggcattcccctgtactggggcatataaagtttgcaataccaaggggcctctcttcccagtgatggccaactaggccatcttctgctacatatgcagctagagacatgagctctgggggtactggttagttcatattattgttctacctatagggttgcagaccccttcagctcctttggtgctttctctagcttctccattgggggccctgtgttccatcttatagataactgtgagcatccacttccgtatttaccaggctcagcctcatatgagacagctataccagggtcccttcatcaaaatcttgcttgcatacacagtagtgtctgggtttagtggctgattatgggatggatcctgggtggggcagtctctggatagtccatcctttcgtcttagctccaaactttgtctctgtaactcctttaatgggtattttgttccctattctgaggaggaacgaagtatccactcattggtctccccttaatcatcagggaaatacaaatcaaaacaaccttgaaaaacagtcagaatggctaagatcaaaaattcaggtgacagcagatgctggcgaggatgtggagaaagaggaacactcctccattgctggtgggattgcaagcttgtacaaccactctggaaatcagtctggcagttcctcagaaaactggacatagtactaccgaaagatccagcaatacttctcatgggcatagacccagaagatgttccaactggtaataagaacacatgatccactatgttcatagcagccttatttataataatcagaagctggaaagaacccagatgtccctcaacagaagaatggatacagaaaatgtggtacatttacacaatggagtactactcagctattaaaaacaacgaatttatgaaattcttggacaaatggaggtacctggaggaaaacatccttagtgaggtaacccaatcacaaaagaagtcattagatatgcactcactgataagtggatattagcccagaaacatagaacacccaagatacaatttgcaaaacacaagaaaataaagtttttcttgattttacttacagttttaagttttgtggtttttgtttgattatttgtttttttaatgtgagtacactgtcactcccctcagacacaccagaagagggcatcagatcttatcacagatggttgtgagccaccacgtgcttgctgggaattaaactcagggcctctggaagagcagtcagtgctcttaaccactgagctatctctccagcccccagttttgagtttttatttgtagcatttaattttgcttactagtgattctttctcttcttgttttacccatgtatgtgtgttattgatttctccattggaggtgttagtacattaatcatagttacttagaactttctggtaattctaaaatctgtgtcatatcgaggttatttttgaggcttatctcattagactctttccgagcttttagcatgtcttatgtggcttatgttgccttttaaagatgggcactgtgtgttaaccaataaaaactaagtttaatgggctcttcatgtgaattttatattgatctgtctaggagttgagctgtatctcatatagccacagctatggtccttttgtgcagagctctcagctccttactgttcttgcttttgtttctcctcttatcattgctcttatctccaggatttcctaagagtcttctgcaaacatcttttaccgtttctagctctaacccactgttatactggaaccctgttgagcgagggacttgacaaagggtgagggagaaggtgcattctccggcactgacagttgtttctaaatgtgtttgtccttgtacttactgtcagcatccctctgactcttagcttgtccacctgcttagttaagataggaaggctagaggggttgatggcagagaaatggcctttttcctcctggaagaatcccaatggtagactagcttcctttccatgctagtatgcttgtctccaagtcctgccctctagttataagagtgtatggctgaaattactgtaattattcaacctcctcatgtaacatatattataattccatgtttagaaaccaaaatccataacctcccaagccccgactgatggaccccactgtaactgcagaaacattttacacctatcttgttctaaatccttatttttaaattgccaaaggatatggccagacaagtctataaataaataaatatcagtaaatatggtactaaataaaccatgcacgagcatccaacctaacaagtcagagaagacatgcaaaggatcactatcagtatcatcaaaatatttatctgtttaagactttttctggctgggcctggtggcacacgcctttaatcccagcacttgggaggcagaggcaggcggatttctgagttcgaggccagcctggtctacaaagtaagtaccaggacagcccaggctacacagagaaaccctgtctttaaaaaataaaaaataaaaaaaaaagactttgtctgcagatagcctaagctaatcctatgacaatatcctcatggcatctataaatccatgcccaaagtggaagtaatatgaagttctaaaaacacatgtttcctggtgattctgactaggagtatttagcagggtggccttcctggagcaagccatcactttgagtgtatgttctctctattcccagtgtgcactctgctttgtgactgtgctgtaagacttgagccctcggctcctgctcttggtatccagttcctgcttccaactccccctatcatcacagactctgatcctctagaaccataaacccaaataaagccttacttctgcaaaaataaaataaaatataataaaataaaaataatacatgtttccagtagacttttaagaatacctaaaatgattaagactcaacattcctcatgagtattttatgatctgggaagtttgatacagtgcggagacagcatgtgtgtataatgctgatcatgtcacgaatgcataggacagttctgaattttaatatgtttttatataatatgttttatatgtcagggattaagtaaaatggtaagtgagttatgttaaaatttttatattattattttccttatatttgttttgatttaaaagaatttttgtattataatacatcattttatagaagaatagtttttctaaaaatgtcctgcccagctctccaaacacttcccttgccagcttcagtctgagcactctgggtcacattgatctctctcccctttctttattcatcctgctccgcctggctttcaagtccagttgctctttttatctcattcttctctctaggcaatctcaccccacccattgcttcaggaactccagacacacaaagtcaggactacaactctctggagagctccccgaggcatttcaaactctgtctgttcaaaagagaaatcctaatctttcctgacaaactgatccttctccagtatagatctcaagaaaaaaacaatcatctcttcagtagtgtaaaggcaaagaaggggtcctcagtcactcttcactgtatcctgggcatccggctgatggattcactgtataaagagccctgtcccctgatgcaccactgccactgtagtccaagctgaattaagctctagccaatgattagtttgcataaagtacttgagcgattcccggtacacaaagccagcattcagtacacatgagttaggcttgctcttagccgtacctctgtcttcctcatattgcctgtgttctctccaccctgaaggctgtgtaatctgttaaaagtactaatctgattacttctgtatctgcgtgtacaggtttgcttcccttccaatctctgctctccctgggggccagaccttctgtttgctgccaaaccttttcgctcagaccactccctttgcactccctaacccaaagcctggtgctttctgccttcagggtgcatccatccctcaattccctccaaacttctcaggagatcttttcctgaccttctagaagaaattgaacctcttccctatatcatataacagacaataactgatccactggctgcaaaacatatctttattttctttttactttttacctagtattcagtaaatttgttgaatatataaacatatttgatcaatatatgtttatagcacagatgaatagagttgtctaaaaagatagtcataacttgccttaggctattacttattttcaattgtatcccaacctgctgcctagttcttataagtctacctcttcaccttctgacacgttcatgttttaaccagccaaagaaacctcttgtttccttgtgaagaagtctgtcttgtgttctgaattgccagccatgagctaagccattaagtctttataggtcaggagtcctgggaagagctcagactagtaagtagccttttgcaatgaacaactacttttttcctttcccctgccatgcaagctctaattttctctgttatgacttgaaagggaacaaaaagtatggtctagaaatgcaggcattaagcctcggtactgatctgttgatcatgaagtcgtattaagttctgattcgagagaaaacggttaagtggaaatgccactagtgtcaaataattgcctcctcctgctccaggaagattagtcttatcctgactttcttttttactcagtctaatatctaggtctgttgtttctcctggattgtgtttacaattttaagcatatttatggctgagtttgctgaatatcagataaaaatattatgtttaagtcacaggaatttgaaattaaaatatcaaaattgaaaaggcaattttttgtgtataaaagaaattacatagaacattacaggtataagcccataggctcaagatatcaaagctaaagctattttaacacagataaaaaaaatatatttttctcatagccataatgctgccagtttattactgttggctcacaatgtgcattgtattccgaatggttaatctatttgcccacatggtttttgctgattccactgggttatgggttaggagggaatgaaactactgataatctagaaacacctcgtgagtacctggggcatgcttgtaactctggctttttcctgcagaaaatgatcttcactctcagtgaactttcaagccatatatactgacagtactgacatagacgagacaataattacatcaaactgtttgggatggaaatgacagcatctgttacaaagtcagctatgagacactgtgagatgctttctgtgtgtttagtgtctgggcagtacggtgttaggttcaatgaatatatgttaaataaataaatgattatgctaaattataggactctatctctaatgtaagaatcaaatgagagagagagagagagagagacctttgagggctaagtgattttgaaattattctttaaaagaatcaatgactgtattttaaaaaaattcggatgaagaaaatagagcccacatctacccatctgttcattcacttgaaaatgctaatgagcatctaccaagaacaaaggtacatcttctaagatcttcaatttctttcttcagagacttgaagttcttatcacacagatctttcacctgcttagagtcacaccaaatattttatattatttgtgatgattgtgaagggtggtgttttcctaatttctttctcagcctgtttatcctttgtgtagaggaaggccactgattttgtttaagttaattttatatccagctactttgttgaagttgtttataaggtctagtggaatttttggggccatttaagtatactatcatatcatctgcaaatagtgacattttgacttcttcctttccaatttgtatccctttgatctccttttgttgtctaattgctctggctaggacttcaagtactatattgaataggtagggagagagtgggcagccttgtctagtccctgattttagtgggattgcttcaagtttctctccatttagtttgatgttggctactggtttgctgtatattactttactatgtttagatatgggccttgaattcctgatctttccaaaacttttatcatcaatggaaggataggcccttggtcctgtgaaggttctatgccccagtatagagggatgccagggccaggaatcaggtatgggtgggttggtgagcagggggagggggaatgggagaggaagttttcagaggggaaaccaggaaaggggataatatttgaaatgtaaataaagtaaatatctaattttttttaaaatgtaaaaaaaaaaaaaaaaagaacaaagatacagagccattcattaatgaggcaatcattgcagtgaatgttagcttcacaagagggctacagatagaatgcccttcttatatctaaccagattagggaaggtcttcaaaacctcagtaatttagaatgactatatttattgaaagctgtgtgtgtgtgtgtgtatgtgtgtgtatgtgtgtgtatgcgcgtgcgtgcgtgcatgtgcgcgcacacgctcgagcgtgtacatgcatgtgcatgtgcatgtggttttgtgtgtgaaaaaaggtggtttggttttatgagtgaaacagtaaaatgcaaggacttattttaaggagtttgctttgaaagtgatgcaggactgtagtaaacacgctattatcttcagtttcatttaaagttttatgatgggatttttttcataaattcacacaagactgtttaatggccttctaagtagggttttttcttgtgcatttgtgttattcaggctttgttatgtggctctggcaaaggactgggatgatcaaaggaagaaagatttattttggctcatggtttcagaggttctcttcatagtcagccaacctcattgttcctgggcctgcagggaagcaaaacctaacagcagcagagtgccatagagcagaactgcttgccttgtgttgaccaagttacagagagttcgaaaggaaagcggagcacatgacatagctcccaggcatatgtccaagactcctcctgtcaacaaagtctcatctcccgagtgtctgtcactgcccgagaactgttgaattatgaacctactagcatcagtcagaggtcacatcatagcgtcccatcgctgaacttacctctgaaccagacctttaacacattgttacaacagggtcttgccttctttttctggatgcaatgtagttctatctcttgagtatgcaactgtggaaatagagggtttgccatcgtcctagggaaagtcattttttttttcacgtggtgtaacatctccaactcccttgtcctaaattttaaagaccattctacaataaaccttaatggtatttagctgattagaagaatccatgggccctgatttctccccgttggcccctccccctttagccttaagcaagaggagctacaccaattaatcctggaggttaaaggtctagaagctactaaaataattcatctcgagagcatttttgcatgtaagtcaattttgttcaattcgggataaagaattttaatatgatggggaacaaagtgtcttatattccctttatccctcatccattcccgatcatctttatccgcatcacctttgttggctcttcttacagcatttgctttccccaaggctggggatggggaaaagagttgcagcaatacctatcctcttccctaggccacccatctcactgagatttaaaagagtcaaccggatgcaacctgcttcatgtgcagagatgaggaccaaaacatatcagctaaggatgctaggcaattcctcccactgcacatggtgtacttcttgaagcatctttactggaccttcacttccaccccctaccagggactgcaacccaattgaagaactcagttttagtctgaaataatcaaggtggagaaggggctagatggggattcaggtagctttgcattttaaaggatttttaaaggattcttgtaagatcaccaatccaccacatctaaaccaaggacattaaaactgttttaactgacaaagcaaactgggaggatgcgaggggtccgactcatgcctctctgcttccttcttttcttgcattagttagaaagagcccacttcacatagagaaaggaggccaattttcaaaatgcagccaccccccccttttttttcccttaacagcactcatacagtagcaatggcaaaataaacaacgatgtgttggattttgtttttctttatctatatgacatttgtgtcatcacaggagccctaatccatattcaggtcttcatgtttggtgtgcagtaatatgtaaatgatctcgccagctgcatggagcagtgtttgttgattctatttcttttggcactgcacagaactgaatttctgccaaaaacggggctgcttcagggagcgctggtgctccaggaggaagttttgaaaggaaacgcacatcataagtcctcactctgtgaagcagaaaaatcaaaacaaactcgctgtttactaaaatagcggtattatgaatgtaaaataatgtgtttgttaaaatataatgagcacactgcccatctccgggatgcatggcgtatgtgggctttggaagcgagggcacaacgttgagaaagctggtgcattttgattcttggaaagaaaataggtgaaatgagatagacagagacaccatgtagaagtttaaggaggaaagaaatattttagcatgcatattaatctttggaaacacatggcatatacatgcatttaaatgtggacagctgtggcgtttaagtgttaaaaaatttcattaatgatgcatagagctatctacttctgttggcaggcctttcagtcttcaatctgacacttccttttttatccagcaagctaatttcccctcttttgtgaggagtaactgttttcacactactgcttacccagcaagcctccttattgtttcatggctaattatcttctccagcttcaccttccccagtgaggagagcagggcagtttctcccagcactaatgaaagctaggtttttatgggtacactgtgtaaataaatgtaagctctgatcaggcaacataataaatgagctcctaaagtttatggagtcacagctcacctagtactttgctaaacaactaagcaaaatgattaatctggtgaaggaggggactttaggtgttgaggaaaaaagtgacagctctgtcaatttaatatgggagctctctgcaggaataacacaaggaatctctatccatctggatgtccctggtggtccccaatagcacagcttacaaggaagtcctttggaaactatggctgatctggtcagaggtggagatcatctggaattatatgtatgtttctgattacttccaatgtattaacgaaaaagcaaccaccaggatccgtgtaatataaaatgctctctaacacactgaatgcaagcacagcagagactccagccacaaaggctgcattgccaacggccttaagggagtgaagccagcaggtttggtgtaggtaattagccctgctggcagcccagagtcttgcttatgtgtagtatgaactcagtgtattctgtaggtagccctcctaaggagccacattcgaacaacttagagcacttagttatagttagcccaaaaggggggaaattaaatacaccctaacccctaaagagtgcattttatttttcttttacaaaataaatttatatgtaatctaattttctctgggtttaaattattatttccttgacatagaaatctctgctttctgttactgtgctgacatgtaaaatcggactgggagcctccacttttgttgctacgacagaacactggaatgaatcaattgcaggggaaggaactcgttggttcacagtttcgtaggtttctgatcagatacgattggctccactgcttttgggcccaggtaagatagaacatccggactgggaactcgtggaagagcaaagcagcccagttcacggaaggcaggaagtggagagaaaaagatacagccttcagaaacaagtcccccgtgacttcctcccaccagagaggctctccctccattcccggtgggtcaacccagtaatgaggttcggatcctcatgatgacccatttactttcctgccgccagctgaggaataagctttcaaccctcagacctttttatatccaaaccacaagacccaggaccactgcttttattccaaacaagatgagtttttaaatatacggggatttcagaaactttagtgttcttctcttaaaatctcaaacataattctacatttttagtacatctaaggattctgtatcatgaatcagaagtataaaatctcatggaaacctttatcaaaatcatttgttacctgctagaagcattcatcctgaagttttgaacaacctgtgcaacatccattgtggtttgtgaactctcccgctgtttttgtggcgtgcacagtaacagcccaagagaggtatccttgcaacagtccagtccccatttaagtaaggaagcaacagcataaatcaagcgaggtatagtaggattagatacaagggccaacctacatcaagaaaacgagtcaccagcttacctatctgttaattaaccttcaactttgagtcaatgaaatcataaattcgaggaaagaggttttcattgactatttcaggtaagatggcgcagagacaaaatgggagctgtagttttgagctgtagttaatttactcgcatatactgcccactttatattcttatttttcccctctgaattacgtgtttcaatcattaacttagaattttagaagatagaaagaaagccatagcttgtttatccaggaggaattaagatcagtgaggtcacagtgttggctgtcactgtgtaccttctatggaagtgagcagcaataggtaaagttctctcaatgaatgtggtaatcttccttcttatttcctaggaatatgtttcaaaacccctcgcagatgtctgaaatcctggatgctaagccttatgtgtttgagtagcatcttgtgtccctatacacacgtaggttagtggctctcctccttaaggaaacactgatcacaactgtagctataacttctgtcgttggggttttgaaagcaaaactagcacacattcccttttcctttgcaattccaaagttagatttattcttgtagtacatcttaccaacctcatattcaactttgttttttctttcttcactgagaactttcagttttttacttgaacaaagcactgcatggtttctctttggcaagttcacaatgccaggatcaagtacccttgtgacacgaggctcttagacactaataaaataggagttagttacttgagcataggaaactaaaataataaaggtgtttactaagttttcaacaggtgggtctcacatacacagtggatgtctagacaggtgaatggtttatatcaaggaagcatgaagcagggtagagagatttctgttagactactcagaatggtgttcaatttaaattctatgaactgtttatatctagagtttcccatttaatatcttcaggcctcaattgaccttgcattattgaaaccatggaaagcaaacctgcagaggtggagacaaccatgtgtactctgtaagggcagattccaaacaagagtagactcttatctgttacatgatgaccggcttctcgctccggcagacgtctgagtgttggcaaagctttccttggatctcatgaaacttctggattattctaagaattttacgttatcattctatgaatttaagttctcatactcagaatgcaaataccaaacagcaggaataagccagaaaaacgaagtgagatgttatccttgggggcgggggtaggggcactcctatatccagctggcatgtcctccttagatttccacaaattgggtaaagacagcaccgttatttggctccatctgggatttctactgtttcaacagtgttttgtttttgtttttgtttttttgaacttccccttatttcaggtctatattgtttgcaagaagtaggaaagaagaaattcctttaattaaaaaacctcttagtttatatttatattaattttaaacaattttaacattggtactgttttgaaacctggaaggaaatcccaaggacacacaggaaagggactgagaggagaaacagatccccttcctattgagtctatttggagtggaatgaaaatttccgttgtttgcatccagagtaatgggcaagatgaaacagtttatttgctggtagaagtgggttattttgtagtttctcctagtacattattcagatgagacagtaactctgtcttgcagtgaggggtagcagtgaaggacacatagggggcacaaaatgccctgggtgccagtgagctacttgggagactgaggtagaaggatccctggggtttggggacagtgtggccaacatcctgagatcctatggccatgtaaaaagaaaaaaaaaggcaaaatatgagaagttatgtatgcaagaattaagaagaacaagattggtactggcattgatttattgccacctggctttagtattacccaaaccgaagtcagacacttaagctctgtatagagattacataataatctaaatgtccttaattcattggcacacatatactgcttctccataagaaacatggtttctctacatataaggcttctggtagcatatttataggagttttttacctcctagataacagctgggtgtcccttaatgcagttctgacactttcttcatggcagttgtatcagacccaggagggaacggtcagcgtcagaggactgtcctcatacagataccaacgctccctcctgcctcctgcctgcctggtgggtgggctttagagcgcctcaaccgtctccttggcttccacaggtttctagaatggtctcaagcttggagaaatacttgactcacatcttccagtttattataacaggtgcaaatccagaattccaagtgaaagatctgcataagttgagacggaaggggacctaagcctccgagtgtgtcggggtacacggttctgattgtaccctcagatagccagtaaccggaagctcgtccagtgtcattctttacctgtttgagtttgaatcttcagtaccatcttcctttctaggtggtccttagagaggaaggttgagtgtcatacgtatcccttggagttttaggagggcagccacagcctgaggtgattcggggccccttcttcaattgtcttatcagtgtacattcaggcctgttcaagaagagtcttcgtgaaaacggaaaaaccattgccgtcactcaggttttaggatctctatggccagaacctaaaacaaggacagaatatgatttgtataagtcttggctttgtaattgaaacagtacttttctggggcagccccgaagtgaaactgaagtggcagagagaagggatagaggaaagtgttcaggttttatttggttgattttttgttttgttttgcttgtttttcttggtgtgtgtgtgtgtgtgtgtgtgtgtgtgtgtgtgtgtgtgtgtgtgtgtgtgtgtgtgtgtgtactgctgcttccttctgtagaattccctcctacagcctccaggccactttgcttataggacatcaaagttcttggcaatctgtttttcataaatgaaatagttgaagcattaaatgggttgtttgttttatttttttaattgttaaataaagacactgttgggacgtgatcccatgtctggagtagtaagagaaacattagggcaatcagagctggccatgtagtctgaggctgctgtggtttctccagttttagtcttccaagaccagtgtgagaggtcaagacaggagacaggcagcctggcgagtctatgcccaccatgagactgtctgtgaatctgtgtcctaaaggttacttttcaatgcttgtatctctatgtgccagcctgtaggatctggtatctctaagttaactctgtttttgtctatctgtttttaatttagtgaatttttcttaattcacacagaagtgatcatgttaaagtgaaccatttcatggtctttagtatagtgaaaatattgtatgacttctatctctacttttaatagattttcaaaattcaaagaaaattactattaagaaattcctcaaaagaaattcctattaagacctattaagcccgtggcatcttttcttccctgctaagagcccgtggatatcaacgatctgcattctgtctctgaatatgcctgttctgaatatttctgaaattgcctatttctaactatttacctattctggtaataaatgaaataatatgtatgtagcctgcccttgacctacacacatagatccaaccagacatagataaaaatatttggggagacaaaactgtctctagcctaactatgtgcagaagcctgtcactttcccccaaacagttcagtgtggcagcctcttaccgtgtgtccacacaggaatggacatcggaagatgatttaaaatattctgaatgatatttattatggaagacatcattttatacaagacgcttaggactggaagtgtaactcagtgggtatcacatgtatgcaaggccatgggtttgacccccagcactggatgaaacagagcatcctcaggttttggtctccagagcacttcctggaacatatcctccatggatatcacctgacaactgatcttgactttttctgtctcatgcacacgttctgaggctgttggttttcataactgagcagagccacaccttcttcagaagtcagcagctctctggatggttttgcacagtacagtttaaccccacaacccttttctctctctaccacggtctgtgaggcaggaagtaagcccttcttctttcagttcacttgacaatgttattttgagagcctgttttatatcataaagtgttttctgtgctggctaggctagattcctgtcctcgtgaagtttatctatggaaggaaagactctcgtctttctttgctgggttctttggagccatatctaatagattttttgattttcagcaactttagattatgtttgtattggttaattttctgttagctgtgataaaatacctggatggaaagcaacttatggaagaaaggatttgttttggcttaaggttccaggaggatagaactgatcatagtggggaaggcatggcgactgtcagggaaagcagtgcagcacagccaaaaagatggtggaacatggtttcatctgcgcacaggaacacacacacacatacacaggagcacacagacacacatcacacatacacactcacacaggagcacacagacacacatcacacacacacacacacaggagcacacagacacacatcacacatacacacacaggagcacacagacacacatcacacatacacacacacacaggagcacacagacacacatcacacatacacacacacacaggagcacacagacacacatacacacatacacacacacacacacaggagcacacagacacacatcacacatacacacacaggagcacacagacacacatcacacatacacacacaggagcacacagacacacatcacacatacacacacaggagcacacagacacacatcacacatacacacacacacacacacaggagcacacagacacacatcacacatacacacacacaggagcacacagacacacatacacacacacacacacacggagcacacagacacacatcacacatacacacacaggagcacacagacacacatcacacatacacacacaggagcacacagacacacatcacacatacacactcacacaggagcacacagacacacatcacacatacacacacacacacaggagcacacagacacacatcacacatacacacacacacacacaggagcacacagacacacatcacacatacacacacacacaggagcacacagacacacatcacacatacacacacacacacacacagacacacacacacacacacacacacacacacacacaggagcacacagacacacattacacatagaaagggcaggggagtggagagagaacaggaagcaggcaaggctatcatcaaccctccaggcccatgcccagtggcatgtttcctacagcaaagctctcccctaatggttctgtgacatcttcaatagcacaacaaactggggaccaagtgttcaaatacacaatcttgcagtgaatatttctcatgcaaaccaccacagcaagcatagaaatacgttcgtcccaacactcatttcagcgagatttgcgaagggctggatcttcacttgtctgttttgagcttctgagcagatatgtcattgaaagggaacattcggaagaacactttttgatcattagtgtgagacagacttccaaggcatttttttttttaaaaacaggttacttgaacattcttgtcagtctggtagtgggaaggatttgattgctggaatgtgtcagctgggatagaattccacagaaaatagccccgacttttaaagaaaaaattattttcaaagaaatagaaagaccttgaactatgggcctgtctggggatgctcaggtgtttttctcctttggtttgtcctggaggatgaacccagatgtagtacagaaaaaccgaaagcatcactacatttacaacaccaatgcagtaagggacctcgtcagtgtctagttaaccggattctgtgtgtgtctgctagaccagctgtggtaacgtgaaccttgtgacacttacttaactttaagtcacatcctcatcttcttactgtggcagaatgaagatatgttgagagtttccagtcattgtctccataggtctgcccataggcattcccataaatgctcacagcagtctatggaaccgatacttacaaacgttagatgccttatacgagaatgtaagctaacacagttgttagggactcaaacttaacgtctcttcatttctaccccaggcttcatacagctgataaacaggaagcagctttcttttagtcttatttgtgtgtgtgtttcttatttactttggaatctattttctggtcaataagaaatagggcaatgcaaactcagaattattttacaattatttctcttctttacaagggcttgttggtatttttaaatttcatttatatctacatttactctaaaaaatgtatttctaatgcatttgggttaaaggtaggagttaagaatactgtataaataaagaattgtagttattatgttttgctatttctcctgtttgaagtatattttcgcagccatatccctacattctctcccctctctccatattattccctcaaatgtccggtcctctcttgctcactaatgtgaacactgatcttccgaggtccctcacaggctcctgctctggggcctgttgtttatctggggctcctgcttatgaggagaggctgtggagcatgtaagaaggatggcccagatgaaggaagtaggtcactaaagttgaacatctgaaggagctgctgggcccttgattcctgtcatgttctttgctccccacttgctatgatgtgtaccacctctgtcatgctttcctgctgccacagcctggtctctgccatgccttctctatcagggaccagtgtctttaaaactgtgagccgagagcacacttctccatttgatttatttctctcagctcttcctgaatagtaactaatatagcttaatataatgcccatttttcttcataaaaatcccccttcctagatttctatgtgtagttatgctcaccgagctcaccagctaggtctagaacaacagttttcaacctgtgggttgtgacctctttaggagtcgcagatcagatactgtgcatatcaggatttacactacaagtcgtaacggtagcaaaattacagctatgaagtagcaatgaaatgatgtaagacttgtccatgagaaaagatctcaaaaatataaatgatataatacaaaactagacagaatatttctatcagaaaatctcgtaattttcattcacactgtttattctagatcagtgattttttaacctgcctaacactgtgaccctttaattcagttcctcatactgtggtgggctccacaactctgcactttggttggctgtgtgtgtgtgtagtttttagttttctattgtcatgaaacagtcatgtcatactgatagggaaacaggtaattaggctccaaacataaaggtctgacaagggcctacaaagcagcttccctgccatccgaggattgcaggctgccggaactctcaccctcagacactagcccagtgccctccctccacaacacaccccaccaaaaaaaaaaaaaagttcctgctacacagcataagtcacatatttactgtgggtcacacattaactgggcccattgtcaacaatggcaaaacataatgtaagtcatgggttaactaggcctgcttttgtacctatgcaagccctcattttcccttgaacttaaaagaagacaccttgtttcctgggccccacttcagggcctgtgttgctgcaggtattagcaaagctcttcctgaaagatatgaccttttagcacctcacacctctggaacctcctctccttccccacctaaaacctagctgagcaaatgtgtcagtgaaaggactataccagaattagggctctccacaggctcttcatttgctactcactggccatttggcgttcttcaaaagctctagattttggtgcgaatcaatttggacttaccagtttgacaagtatgggaatatgcacttttttttttttttttttgctaagcaattcctttacaaattacaaatataaaaataaaataaatccaattcttaattagtttgagcattattgactacgttgaagtgccagccaagaagatgacagttacatcaatatgggtgccatattcctccccctgacagtcgcacagaaggcaaatgtttaattatatcagtgtcctcatatccctccccagtgccccagtgaatggtttaggttaaattccaaggaaatggagattttatttaaaatgctgacagaatttaccatagaacaagaaggtccaggctgccctctacctgaaggataatgtagagtcaagagtttctgtgaaagaaattggcatgtgcaaagttggccataaagaagatggaggacatcgctccttaaagctctattttagggtctgaggttgagcgtacttgtctagggagggcaaggaatagatcaggaaagtcatatgctgaaagggggtctttgtcatctacaaagtctccccacctcacacacacacttcttcttcagaacattataatggatgttcataaagctaaagtctcagcagtggggagcattagagagcctcaaaatgttctgggttctgtaaatctaaagaatgggttagcaattaacattcttaccatttaggtgagccatttcttcagaatacaaaatgtagggcaagagggaggaaatctcagcccttcggaaggattaagggcagggcaagggaggggaggnnnnnnnnnnnnnnnnnnnnnnnnnnnnnnnnnnnnnnnnnnnnnnnnnnnnnnnnnnnnnnnnnnnnnnnnnnnnnnnnnnnnnnnnnnnnnnnnnnnnnnnnnnnnnnnnnnnnnnnnnnnnnnnnnnnnnnnnnnnnnnnnnnnnnnnnnnnnnnnnnnnnnnnnnnnnnnnnnnnnnnnnnnnnnnnnnnnnnnnnnnnnnnnnnnnnnnnnnnnnnnnnnnnnnnnnnnnnnnnnnnnnnnnnnnnnnnnnnnnnnnnnnnnnnnnnnnnnnnnnnnnnnnnnnnnnnnnnnnnnnnnnnncaaactttatatgccccagtacaggggaaccccagggccaaaaggagggagtgggtgggtagggaattgggggggtgggtatgggggactttttgggatagcattggaaatgtaaacgaggaaatacctaattaaaaaaaataatgtaaaaaaaaaaaggaaaatgactgaggctgagtgcaggcttctttaatatgtttttttttttttttaattaaaagtgaatgatttccaagtagatccagtcagatattccctggaattatcatacaagggagttttaggaagttttaaataacaagagacttgaggggaacataaaccaggtttaatcctttcctatggaaatattttaccccaaccactttgagttgttccttcagtacccctgagttctgtccttccacaggcttgaatctgtaaacccacaaaacagtagccgaccaggaccgtgtccagagacaggctaagctgcaggcatcccttaggcttagctcctggcacaagatggcacagttgtcgagtcccagcttttgagaccctgttggaaaatcctgtgctgtcacttgttaaagttgatcagagttacaaagcgcttctctgaatgcctggtttaattatttatcagcaccgtcagtacagtgtcaggcaagggggtgtttgaaattaatacactatttgagtggactgattgattgctcctacagctagagattttaacattcactagctatacagactggtcattagtcctctcctttatctcttagcaaagaataaacagaaattgtaataaaaattcatcacagtgaatggacttggtatctaagtggctgtgataactggccctgtactagattgactgctagaacactgacagcagggaagatctcttttagaaggaaaattaaaaattatcccctaattaatgtttgcctttataactgaaatctttttttaactaaattgggttatacagagactctcctccatatccactataataaagcacacctaatttgtttgtatggcagtctttaagcattaattgtaggaaggattgaggctttacaaatgtgccctaatatgctccaggtgaggttttcttcctcccactaaagaaagaaagctgagtggcctgttttcaaccagacagttgagataatctgatttgtaatgagaaaaccctgccttcagagctatcaccattctctttacctaccagatcatggtttgtttttgaagagtaaattggaagggatggtaagaaggagatatagccaagggggagtcagggaacttatgagcaactctacacatcgtaagaattagttaccaaatattgactgtttccctgggcacttataattattttacatttcatccaagagtgattttgaagatcaatagagctgtatctatcttataggtgatgatgctgatactcagaaagcttaaataactcatgcaagctaatgaagctggtgagagcagccaggccattggcttgttggctagttctagagtcatggtcgtccatctgcctccttggcatgagtgtaggtagagctgagaatgctctatggttctatctgtaggagaagttctcagggcccacagtgcatttttcaccttccttggctccacaatagaaccagatagctgggtgagaaatgagggtgccgaaagagccgtttaacagctccatcccatagaaggccaagagaatactgagttctcatgaagacaggcagagcacagaagaagggcacctaggctattgcatccctgggagtcagggaagtcttcagacagttagaagcataggcaaaccaatagtaatgatcaacaaaagtccaagtgatatctctctcacaaagaaaagataaagaagaaagggagccaggaaacaatggttaaggagctgcctgggaactctcaggaagatgtgggcattgctcatctcagccaacaggaggcaaagcctagttctcacagccaagaccagaaaagaaagaaaaatgaaggtgtatacactgttataggttcctgggtaaataggactttaacctaaaattagaggcaagagggttatgacgcacagcaacagatagtattctactagagacttagggaggaaattgctatgagaatatatgtaccctacaatatttcatggattctaccttttagtcttcatttagcagttttatttttagctgctttagttactttcacataacacaaccaaaatattgacttaagtaatttaagaggaagggtattaaatgcagacactattgtatatgccagcaagattttgctgaaaggaccctgatatagctgtctcgtgtaaggctatgccagtgcctggtaaatacagaagtggatgctcacagtcatctattggatagaacacagggcccccaatggaggagctagagaaagtactcaagaagctgaaggggtctgcaaccctataggtggaacagcaatatgaactaaccagtatccccagagcttgtgtctctagttgcatatgtagcagaagatggcctagtcagccatcattgggaagagaggccccttggtctcacaaaccttatatgtcccagtacaggggaatgccagggccaagaagtgggagtgagtggataggggagcagggcgggggggagggtatagggaactttcaggatagcatttgaaatgtaaatgaagaaaatatctaaagagagagagagagagagagagagaaagagagagagagggaggaagggtatttcttttggctcatggtttcagagggtcccattcatagtcacctggccccatgccctggggcatgtaatggaggagctttgtctgctctgctgtgaagaaatagcagaaaaggggctaagaacagttcatcccaaagagccaccccaagtgacatacttcttcctgctcaatcttacctgcaaagttctccagaagctccccaaattgtgccaccaggtggggagcaagctttcaaaacatgagcctgtaggacacatttcatatccaaccctcaataatcaacccaagctgagatttgaaacatagcacaatcaacagcaaatggttaggaccataaaggatcatgtactagtatagtgattttatatttgaatctacgttaatgcctcagtgacagtcactattgataatagcccacccctacagtgtttggatattatctcaaggagaactagagttcttgatgctggtaccttccaatctgcacttcagttttgtgttctaacttccaaggggtcctaatagataacaattttccgattatgttctctaattctcccccccccctctctctctctctctctctctctctctctcctcccttctattacaggagactctgaatgtgattgaccctggcttgatggacctgaatggaatgagtgaggatgccctggaatgggatgagacagacataagtaacaaactcattagtgtgcatgaagaatccaacgaccttgatcaagacctggagcctatggtcccaacagtgaaacttgaagagacacaccacaaggactccggttatgaagaggaggcaggtgactgtggagggtcccagtatacctcaaatatcactgccccttccagcccacacatttaccaagtgtacagtctccacaatgttgagttccacgaggacagccacactcagtttctaaaaagcagccccaagttcacaggcacagtgcagcccactgttttaactaagagcctcagtaaagattcttcattttcatccacaaaatcgttaccagaccttttagggggttccagcttggtgaggccttactcgtgtcagagtggagacttgagccagaattcaggcagtgagagtggaattgtcagcgaaggagacaatgagatgccaaccaactccgacatgagcttgttcagtatggtcgatgggtccccgagtaaccctgaaacacaacatctggacccacaaatgggagacgcagccaatgtgctggagcaaaaatttaaagatgagggggagtgcattaagctttcaagtgtctctcaggcatctgtctcaccagtgggttgtgtaaatgggaaagctggggacttaaacagtattaccaaacacaccactgattgtttgggagacgaattacaaggaaaacatgaggtgtttacattttatgactactcgtacctccaaggctcaaaactcaaattcccaatgataatgaaacagccgcagagtgagaaggcacatttggaggatccccttcttcgtggtttctattttgataaaaagtcctgcaaacctaaacatcagacttctgagtcacaaccagacgcgcccctccatgaaaagatcttggcaagtgccccccacgagatgggtcgaagctcatacaaaagtagcgacatagagaaggcactcacgggcatccagaatgcccgacagctctcccttttatctcgtagctcatctgtagagtccctttccccagggggtgatttgtttggattgggaatctttaaaaatggcagtgacagcctccagcgaagcacttctttagaaagttggttgacatcctataagagcaacgaggatctttttagctgtcacagctctggggacataagtgtgagcagtggctcggttggtgagctgagcaagaggacattagatcttttgaatcgtctggagaacatacagagcccctcagagcaaaagatcaagcggagtgtttcagatatcactctgcaaagcagttcccaaaagatgtccttcagtggccagatgtcactggatgtcgcatcctctatcaatgaagactcgccggcatctcttaccgaactgagtagcagcgatgagctctctctttgctcggaggacattgtgttacacaaaaacaaggtcccagagtccaacgcatcattcaggaagcgcctgaatcgctcggtggctgatgagagcgacgtcaatgtcagcatgattgtcaacgtctcctgcacctctgcttgcactgatgacgaagacgacagcgacctcctctccagctccactctcaccttgacggaagaagagctgtgtctcaaagatgaggatgacgactccagtatcgcaacggatgatgaaatttatgaggaaagcaacctgatgtctgggctggactacatcaagaacgaactgcagacgtggataagacccaaactttccttgtcgagagaaaagaaacggcccagtgtcactgatgaaataaaggtcaataaagatggaggaagtaccgagagggccaatccctcggacaccctggacattgaggcccttctaaattgctccataaaacgtctctctgaaaacaatgggaatggcaagaacccacccagaactcatgacttaggaaccaaaggtgaaaataagaaaaatacgtacgacgttactaaagatccacatgtggccgacatggaaaatggcaatgttgaaagtactccagagagagaaaaggagaagccagagatcccagaggcatcagcgaaccttgcttcaaatgtgaaaaagatttctgaatccaagcacgacgagtatgaagcattaatggatggttctgatgattcaagtgtcactgggaaggaatttggtcccccaaatgataggcatcctccacagattggtgccgatccccagcatcctgaaaggggtgactgcacatcagtccagaactcttgctcaggactactgttggaaaccggtggcggaagcagacaagatagtgatggactcaaatctttgtctaatgatgcaccaagtgtggctagaaacgctgctggttgctgcctactcgaacaaaatgagacagaggaaagtgcttctatcagcagcagcacttcctgttgcaactgcaagccagatgttttccatcagaaagatgatgaagattgttcggtacatgactttgttaaggaaatcattgacatggcatcaacagccctcaaaagtaaatcacaacctgagagtgaggtggccgctcccacgtcactgacccaaattaaggagaaagtgttagagcattcgcatcggcccatacacctgaggaagggagatttttactcctacctatctctttcgtcccatgacagtgactgtggggaggtcaccaattacatagatgagaagagcaacaccccattgccaccagacaccgtggactctggcttagatgacaaggaagacgtggactgcttctttgaagcttgtgttgaggacgagcctgctgatgaggaagcccgtctctccagtgcccttccaaatgaatcagaagtccaggatgaagctgctaagccagaacaaatgacagccagctcttctgtgttccgtgatgagacagacacggtgcctctttcaggactttcccctcagaagggagctgatgatgcaaaggaaggagatggtgcgtcccacacttcccagggctgtgtggagagcgcagagcctaccacccccccaggaaaggccaagagagaggggagttcaagaaagcaaagtgtatcaggaacgccagaagaaaacgctgcttcagccaaaccgaaaattcaagctttctctttgaatgcaaaacagccaaaaggcaaggctgcactgtatcccagcccccaaactttaacctgcaaagagaagctcgtaagctttcatgaagatcgacatagtaacatgcataggtagaatgtaatgcccccaagcatggaactcatctcattgaaaggtatgtatgagtatttctgctgtgtgtgtgtgtgtgtgtgtgtgtgtgtgtagatatgagtttacattaatagatccactatagaagactggtcagcatgattagctgtgacacatacacatctggataagacattgagtagaaacacagcagtggtagtcactgtgaaaggcacaaggggaccagtggtgacattttgacatttcaagtgacattatatttattccatcattttggcaagagcaatacaatatttgagaaaccagctgatccatttggggttttaattcctctgactagaggagaaaatgccccgagagttgcaggcattccttgagatcaaaatgcacgttcagtagctgtattccttactgcagctcctatttagaactgccccgtgatgagcaagggtcagactgaaggctgtgcctccttccagacatgggttttcccttaggcttctgcttcatagaactagcatcccagtcactccccttaacacggcctcagaatccaaacaggagcaaaaagttgagggaaaagaagaggctcctatttgtacacacacagatgaagcaccagcgcaaaacgcgcatattgggaggatacgtgacaagttaatggcgtctcgataaaaacagaatttttgaattttgcctgaaggtgacaggctgattgccatcaatttttttttgagaaattcattccacttttcatatttaataagacagctattgattgataatcctgaggtggtgatacagctctagaagcgatacggagactctgttatctcccatttctaagacccagtggtgaatgcacttgctcaatcaagtttaaagagaaatttagctttcaaacctgagagttgtgtttcaccaaagtatgaggtgcataacgcccctccacccccactacagaagcctaatgccgtaacctaaactcgtgctataggaaatgaattacagaagcaatctaccctaatttgttaacttattcaaataacagttattatacttaactatgctaaagattatcttttttgtggcagattgtttatttttttgatgagcctaattactgattttctaaaagtaatttacatttattacaaatacatcttttaaaatgtgacagataaatgttgttcccataatgtattatgaaaaaagttactatttaaaaacacattatttaatttgaaagatgaatggcaaacatcattattttttttcctgcaacacctgtgccctgagctcattaaaatgtgcgattctatgttgagctgctagaatgtggtgcgaggggggaatctataccatatatataccctaaaaataaactcagtatgcaaaactgaagaaaggcatcctacttactgatgtagcttcactaattttctatttcagacactatttacaattggttgcaagtgagaacaaaagagggagagagagagatgtgttttctgtgagttgtggccaccctataatcacaccctccatcagtatgcagtaaaactgaccattaagggagagtaaccgggataccataagccgcctcagaacaggttctattagaactgattggatgcaggctctgcccgcctctgcagaaggacccagaatgcctggctgattttgttttctgaaaaaggataaaggcttgaaagcaacagcgttgtgagcatgccaccctgtgactgtgaccctcaagtcagcagccctgctgagatctggagcagagacgcgctggccctagtgaaggctctgggatgcattctccctgtttgatcctctgggagtctcttctcttcctcacacagagaaatggaattgaaatgaaatgtaaatgatgagcaattccattttttgacttgaggggaagtggtggtgctgatagatctgtgtaattgttacattttacaagcatagatggtgtaaaaatatatcagccacttgcctgcccatcagaagggttctcttgtgccccacaccaggctgtactgtgggcaaagggaacaagcagccagattttacttctgtagaactgacatcgcccccaagtgacttgttataagcctagagctatgtgaacagccatagattgctcctatccacctttgagggtgtgtgagcacaagtgtgagtgcttgcgtgtgtgagtgtgtgtgtgtgtgtgtgcgcgcgcgcgcgcgtgcacatgtgcatgtacagtgtgaatgcctatgtgtacatgtgtgtttgtgcgtgagtgtatgcatgtgtgtatgtgtgtgtatgcagtgtgaatgcatgtgtgcatgtgtgtgtgtgtctatgtctaagtaccatgttaacaaaacatgtttgtgcctgatcttttgcttagttataagcactgggtgtaaatttgcacggacctgtcaggtgtcgaagtgctgtcacctgagaagttattcaatctgaaaaggctgctaagctcccagaactccttgtcagggtgtgtactgaagttacatcgagactttacaaccacatgaacttaactgtagtcagtgttccttccactctgtccaaaagcggcagaagttcttccttttaaaagccatttgggggctgtgagatggcatggcctttgtaccaggacatcacaattcacccaagccaatttgctggcgctcttttcccagaaatagattatcagatgaaatgactacaagtccattcgaacgtgtttacaatgtgtttagaaccaggcagatagtctgcaaccagaacagattcttttcaaagagttctgaaaattattttatctactgtgttctaattaaaaacctctgaactcatctgagaagatttgctgtggcctaacagtggtgcgtttgcacgtacttccagcacactgctcgactcttcactgtatccatctgtgtgaaaatggagaggccagttagaatcacatcaaaggggaggtaactggctagatccagctcttcctgcctaatttggagagagcacgtggtgtaggtctggaattcctcctagggcctaagaaatgtagtttgcactaatcttttttgctgtattctgacagttatttcttcataaccctgatcataagcctgtgatctttgatgaatggtttaaccctaaatttcaggctggataaagtctgcagtgtaaaaagttaactcctcgcatccagccagtgtgtagtttcgtgttttctccttgttcatctaatggtttaagggtgtgtgtgtgtgtgtgtgtgtgtgtgtgtgtgtgattacttcttttggtcttagtttcattgttttgcctacttcatcagtctatatgagtaatggtggccacagagttttcggtttgagatgactacttgtgttgatagctgttaacacaatttagagtgcagcgcagcttttataagttgggaaaatggttggagccgacacttctcaccacacacaacctctcattctcttactgggctgacactggggtttcccaaggctggctaagcagctctaggaaactccattgagggtttgtatattattccttctctcgacactacacgtgtctataacatttacctttaaatcacctttgtaacccaagcttctgctggataataattgggcacttctgaataacttgctaggctatataaagattttattggataaagtcagtctctgtctgtctgtctgtctgtctgtctcactctcgctctgtctcactctcactctgtctcccctccctctcttacacacacacacacacacacacacacacagagagagagagagagagagagagagagagagaggatttgggcttgagcccatttggcctgacttgttcccaagtgtgccaaattgaaaggattgattacccggagggaattcattcaaatgccagctctttactaagatgggattggcttcaccggaggattcccttgcgcagcacagcggcagattcccgatgagtcacatcctcagcatgtgagcaatgcttccctgtgctttcttgaattactgcattattttactgtaccaaattttgttccatctgcctctatctgtctcccccatccctgttaacttcccgtatcttctcaacatcctgtttgactgtggtggaactacggttggaaaactttttctgacttgtgcatgaagttgtaagtttatagaaagagacaggaagacacggaagaatatttgcttctaagaggtcgagggggagggaataccctgatagagcacttcggaatttagattaaactcaagcaggcagagacctgctttatttgagagctggtctgagaactgaaagtactttgtatcctggaatttggttgtctctcagatttgatcagtttttgtagccatttagaaataagtaggacagaatgagcttggaagaaatttgtaccaaatcatcacacatacagagagaattgagtcagttcagtttcctggacctaaaatgaagcacggtgatagttgagtggtgaattctaattataccctttcctaggtaaggaccgaaagctttaggggtcatcataatgttgtgagtgttccaccgctctataatagaacgtcccacgcagaccagtggaggaagtgtcagcctgggagccaggtatctcctggcttgtgttcgtacatcgttgcattctttggtactgactacctgatattttcttatgggtttttttaaaagaacttgataaaattgagaccatccccagaagaatagatgaattgacgacccagagaaaagatcatgtgcttgatttttctttttttttttttgaaaacatatgaacatactaaggcatctatataacttactgaactgaaaatgtgtttgtgtgttctgagctagtgaaagtcacatttcataacttctcatctcagatcgctagcagatgatttcccctccccaggcagcttccagaaagggcttcatcctgcgagtaacagccattgctgacacctttccctgtcaccgttttctttcctgtagatagcctggctgaagctcggggctggcctgacccaccctgggctggtcttgggttccatcctgttatcatcactgcctcctgccacgttgacttcctgaagacgaaccttccttctgaatgcggtctgtccacgtgggcctcccgatatggatgtgtgcattgctcctcttaggtgatcgtcttagttcctcaaagctgcttgttctcccgtggattcctgtcccaagctacctctggcaaccctctctccagcaagacttctattttccctctctcctccctcctccttttaaagctctgcagttcaccaaattgatggtccattaaacccactgtctggaatgacacccctcccatcggtacttgaccaattttatgttttgctctgaaatttttcatgatattatgcctatgtttattgaaagagatttacctaaaaagccatcccttgatttgattgtagtatagaagagacacattgatccttatgacaaaattaagtgatgttttgaaagtgccattttaattatttctttttaataataatctatgcagcacttcaagaaacaactataacagtgttgtataaactggtacattctactattaagtttgtttttggtttctatgcttcttgaggtggtaatgagaaaaatgtttgtttttttttttaaacggtgtgccttgctgtatttcttataccatttattaaaaagctgcttttgtggtaatattatgttggtttgaaaggaggaaatagcaaggttaagatgcgtgaataatttctgtatatatgtataagctaatacaaacactgatgtatgacagtataaaatgctttcatgtttgtgatgtccagtgatgtggagaatataagccttaaacccgttcgattgcatggtaattaaaattggcataataaaaatagcttattgggggaaaggaaaattaatgatctcttctacctgtgttctttaccaaattcttgcatctggttctagaaaagaaaaaagaatcaaactccatatattagcttccaaaatatccatattgcacagaaggcttacattgcttagactacagactaggcctgaagccttcataattttcaaaaatctttctgtttcactataaacatcctgaaatagcaaaggtttaaaggccatttccatcaacaatgttttattctaaatgtttttatttctacttgctaatggtttaataatagttgtatttggagatctcttacatgacctaatttattttaaatatttgaatggttttggtggatggtatagaaaatttgattattattttatttaaactatagatttcaggtatatttattttgttaagaaaaatcaacagaggaatattccatttggtctttttttttttttgacttgaagaattcagcttttaatttatatcataactcctactaaagtgcctgacacacagtaggtatttcatagagtttcctgaatttgagtattgagtggggttttacatatatatatttatatatgtttcctgcattaaaactagaaaaagacgtgcaaagtgaagcacatctataatcacacatttataatcagatttccaaaagccaatagaacatgacagacatatgtagccaccgaaatgacaatcattcattcaatagattactcattagcatcttttgcctgcaagtcactattctatattcagggagagcagctatgaacgatgcactgcctttggaggtttatctatgtttgagacagagtgactgaccacacagacgtgtgtgccataacgtcccacagatgaggaagaaagcaagtgtagagaaagagtcacaacgagagagacagcggtgagaggctggggcaaagagaaaggctatgggagaagaggggttagcagggcttcactacatgtgtgaaaagagagaaagccaaatagagagacctgcaagatgtttacagagctgacatggagcgtttgtgtgctgtgtagtaggtataggagacccagtagcttgtgcggggctttattttatcccacaattggaactttactggcgtcctcccaggaacacttaaataattttgcgtggattttgccccttctaatctttgctgcacatatttttaaatggatggctcattctaggcttttgggtatgtagtgacttcttccaacggagtcttagagagacatctagttatagtgtttatgaggatcacaaaggggagatgttagacataactatgttgtagggggaaagaaaggggaaattagctagatttaaggcaatgacagagtgcacagggatcgtagcctgaaatacagagaaagacagatcttagagccctgaaaagtatttgaacatttttggacctctgttaggatatggcattattttatatactgagacaacctgaatttctcttagtaagtaatgtcaagtctaagtctattgaaaagacattcaaaaaattaatggaccatgctggactatttgcctcttttgtactcatgaagacttagaatttgaaaatatttattagttatctgcttaacactaacaccaagttgatcaggttgactcttgagtttattgatgccttttccagccagaagagatggaagagcctcagtctcataccctgtgtagacactaacttcccatctgcatttgaaaacagctcatttggtttgtattgatttgatcaacactatctacgcatgtcccatgacaattgtttgttatttgttaaggcaaagtatccctcttatgggcatgtgtttctgttagaatgtgctctcttaggttgctaaataaagtccacagggtacccctccccttttagtttggtgtattggtcctatgcctgtgctgcagagaggcccttagaagattcctggtccctctgtctcatggccgcccttcaggtaattgagaacagttactctctttcacaggcagttcctccaactgcccttcatatatcatgacttcagatccatttcaacctgactgaatgttaaacaggcagaacccttgatgtcaagggactgtcttcatcctacatgtagagaggtgtgtggacacttaagtgataagttttctcaaaaatatattcaagatatatgtttattctactattgtaaatttcaataaataaacaaataaacaagtgaataaaataagaatccatgacttccttctgtggtccaggctagtgctggagtcatcttgaatcttttccttatgttggattcaaacccaacatttccatggaaaacagatctgcctttcctatcattcacccactaatttattcaatcattcaaacattcatagagtagccactagtgtgtggcatagcattgtctcacctacacaaagacaactgaagcatatgtgcttagaagtttctctctgatcatacccttgaagataataattatgacatttccccccagattaattttccccagacccacttactttgcctcttatctatatgtctacactatcaaaaatcaggtgagcaaattgatatgtcctatggtctggatgaaactgtgagaagaagtgaagtggcttagtatttttcagatattttgtttgtttgtttgtttgttattcaacaaatctgcaaacaagatagcagtctgaatctggggcctgtgacagcccaggtttgattatcttgttgcttggttcactcgacttggcttttcaccataatagctgagaagagagtgggtgcaaatgtcaaacagtgaggtgagccagctggctttcacagggagagctgtgctctcttctgaatgaaacagaaatacctgaggttccttagagtaactaacccccgagtatcagcacttgtgaagtagaacttggaccaccaaaacacctcttttcagatacacatagcacatagctttccacatttttattttggtaattttagacttatggaaaagccaagtggaacaagaacaatgtctttgcacacttcgcttagatacatttacttttggaatttgtatctctctttctgtccatgtcacaccacatgacactcacacacacacacacacacacacacacacacacacacacacacagacatgcacatacacgtgtgtgcacacacactaccttcttgtatgattgtaccattaaaaattcattttctgcgtacaacacttcatttataaagatgagctactatgacaaggagcaaaggcattttctacaagtctgtaatactttacgataatacgtagtaatccttattacagtttctctactttttttttcttttacatccaaatttaatttgtatcagattctgtgacacttttctttttttttttttttttttacagtttctctactttaagatatgctttgtgtgtgtgtgtgtgtgtgtgtgtgtgtgtgtgtgtgtgtgccctttaccttcaacctagtgcccaaataatgaccagataggtgttttagctttgtatcttcttgatctgaaacaggtttttcattctcttattccccttttggtcctcactgtattgacatttctgaagagttcagatcagttttgtagaatgagtcataacttggataagtcctgttatcttctcgttgtaaatctcaggatgagctggttttgtgactatagcttatgagtgatggtgtgttcagatcatggatggagtgggagtggatcacctacattcttgcttcacatttttcttttgttttctcaggcagaggtcagcagatcatggcccgtgggcctgatttaaccccctgcctatttgcgtttgtcctgggaattaagaatgacgtttacttttttatggggctgaaaaacaataaaaagaatgtttttgtgaaaagtgaaagtgacaagaaatgaaaatgtttgtgtcagtgactaaagccttcttggaacacaaccacacac

SEQ ID NO: 306 - DNA, 6245 bp, Mus musculus
gacccagaccccatggcgactgatgcctcgcccatggccatcaacatgacacctaccgtggagcaggaggaaggagagggagaagaggccgtgaaggacgtgggtgctgagcagcagtatggaaagccacctccactccacacagcagccgactggaagattgtcctgcacttacctgagattgagacctggctccggatgacctcagagagggtccgtgacctaacctactcggtccagcaggatgcagacagcaagcatgtggatgtgcatctagttcagctaaaggatatttgcgaggatatttccgaccacgtggagcagatccatgccctccttgagacggagttctccctgaagctgctgtcctactcggtcaatgtcatcgtagacatccacgcagtgcagctgctctggcaccagctccgcgtatccgtgctggtcctccgggagcgcatcctacaaggtctgcaggacgccaatggcaactacaccaggcagactgacattctgcaagcattctctgaagaaacaacagagggccggcttgactccctcacagaagtggacgactctgggcagttaactatcaaatgctctcagaattatttgtctctggattgtggtattactgcctttgaactttctgactacagtccaagtgaggatctgcttggtggcctgggcgacatgaccactagccaggccaaaactaaatcttttgactcttggagttacagcgagatggaaaaggaatttcccgagctcatccgaagcgttgggctgcttacagtggccactgagcctgtcccttccagctgtggagcagccaatgaggactcatctcaagtgatcctttcagaggaccacagaggtggacatgaggaagatggcgctcttgaacctggagagcagctgggctcaacactggagacgtcttccttaggggacacactgacaaacgctgctgaacaccctccggagacagcaaaccaagactctacttcctctccgcagcttggtgcgaaaaaatcccagcctggtccttgtgaaatgatgactcccaagagatccatccgcgattgctttaattataacgaggactctcccacgcagcccacattgcccaaaagagggctatttctaaaagaaactcttaagaacgagcggagaggcagtgatgggaaggggagggtggttgacctgaagcctgagctgagcagaagcaccccgtccctggtggaaccccctgacagatcgaagctctgcctagtgttgcagtcttcctaccccagcagcccttctgccgccagccagtcctatgagtgtttgcacaagaacggtcaggtggtggaggcctggtacggctctgatgaatacctagcgctgccatctcacctcaaacaaacggaggtgttagctctgaaactggagaacctaaccaagcttctaccccagaaacccagaggagagactatccaggatattgatgactgggaactgtctgagatgaattcagactctgaaatctatccaacgtaccatatcaagaaaaaacacacaaggctaggcaccgtctctccgagctcatccagcgacatagcctcatctctcggggagagcattgaatctgggcccctgagtgacattctttctgatgaggacttatgtatgcccctctccggcatgaaaaagttcactgatgagaaatcagagagaccttcatcctctgagaagaatgagagccattctgctacaaaatcagccttaattcagaaactaatgaaagatattcagcaccaagataactatgaagccatctgggaaagaattgaggggtttgtgaacaagctggacgaattcattcagtggctaaacgaagccatggagaccacggagaactggactccgcctaaagccgagaccgacagcctccggctgtacctggagacacacttgagctttaagttgaacgtagacagtcactgtgccctcaaggaagccgtggaggaagaaggacaccaacttcttgagctcattgcgtctcacaaagcagaaggactgaaggacatgctgaagatgattgcaagtcaatggaaggagctgcagaggcaaatcaaacggcaacacagctggattctcagagccctggacaccatcaaagccgagatactggctactgatgtgtctgtggaggacgaggaggggacggggagccccaaggctgaggctcagctctgctacctggaagcgcagagagacgctgtggagcagatgtccctcaagctgtacagcgagcagtataccagtggtagcaagaggaaagaagagtttgccgacatgtcgaaagcgcattcggtgggaagcaatgggcttctggactttgattcagaatatcaggagctctgggattggctgattgacatggagtcccttgtgatggacagccacgacctgatgatgtcagaggagcagcagcagcatctttacaagcgctacagcgtggaaatgtccatcaggcacctgaaaaagacagagctacttagcaaggttgaagctttgaagaaaggtggcctttcactaccaaatgatatcctggaaaaagtggattcaattaatgaaaaatgggagctgcttgggtcgctctgtcatgagatcaagcagcggcgtagaggagtggcctccattctgaggttgtgccagcaccttctggatgaccgggacacttgtaatctgaacgcagatcaccagcccatgcagctgatcattgtaaaccttgaaagaaggtgggaagccatcgtcatgcaagctgtccagtggcaaacacggttacgaaagaagatgggaaaagaatctgagactctgaatgtgattgaccctggcttgatggacctgaatggaatgagtgaggatgccctggaatgggatgagacagacataagtaacaaactcattagtgtgcatgaagaatccaacgaccttgatcaagacctggagcctatggtcccaacagtgaaacttgaagagacacaccacaaggactccggttatgaagaggaggcaggtgactgtggagggtcccagtatacctcaaatatcactgccccttccagcccacacatttaccaagtgtacagtctccacaatgttgagttccacgaggacagccacactcagtttctaaaaagcagccccaagttcacaggcacagtgcagcccactgttttaactaagagcctcagtaaagattcttcattttcatccacaaaatcgttaccagaccttttagggggttccagcttggtgaggccttactcgtgtcagagtggagacttgagccagaattcaggcagtgagagtggaattgtcagcgaaggagacaatgagatgccaaccaactccgacatgagcttgttcagtatggtcgatgggtccccgagtaaccctgaaacacaacatctggacccacaaatgggagacgcagccaatgtgctggagcaaaaatttaaagatgagggggagtgcattaagctttcaagtgtctctcaggcatctgtctcaccagtgggttgtgtaaatgggaaagctggggacttaaacagtattaccaaacacaccactgattgtttgggagacgaattacaaggaaaacatgaggtgtttacattttatgactactcgtacctccaaggctcaaaactcaaattcccaatgataatgaaacagccgcagagtgagaaggcacatttggaggatccccttcttcgtggtttctattttgataaaaagtcctgcaaacctaaacatcagacttctgagtcacaaccagacgcgcccctccatgaaaagatcttggcaagtgccccccacgagatgggtcgaagctcatacaaaagtagcgacatagagaaggcactcacgggcatccagaatgcccgacagctctcccttttatctcgtagctcatctgtagagtccctttccccagggggtgatttgtttggattgggaatctttaaaaatggcagtgacagcctccagcgaagcacttctttagaaagttggttgacatcctataagagcaacgaggatctttttagctgtcacagctctggggacataagtgtgagcagtggctcggttggtgagctgagcaagaggacattagatcttttgaatcgtctggagaacatacagagcccctcagagcaaaagatcaagcggagtgtttcagatatcactctgcaaagcagttcccaaaagatgtccttcagtggccagatgtcactggatgtcgcatcctctatcaatgaagactcgccggcatctcttaccgaactgagtagcagcgatgagctctctctttgctcggaggacattgtgttacacaaaaacaaggtcccagagtccaacgcatcattcaggaagcgcctgaatcgctcggtggctgatgagagcgacgtcaatgtcagcatgattgtcaacgtctcctgcacctctgcttgcactgatgacgaagacgacagcgacctcctctccagctccactctcaccttgacggaagaagagctgtgtctcaaagatgaggatgacgactccagtatcgcaacggatgatgaaatttatgaggaaagcaacctgatgtctgggctggactacatcaagaacgaactgcagacgtggataagacccaaactttccttgtcgagagaaaagaaacggcccagtgtcactgatgaaataaaggtcaataaagatggaggaagtaccgagagggccaatccctcggacaccctggacattgaggcccttctaaattgctccataaaacgtctctctgaaaacaatgggaatggcaagaacccacccagaactcatgacttaggaaccaaaggtgaaaataagaaaaatacgtacgacgttactaaagatccacatgtggccgacatggaaaatggcaatgttgaaagtactccagagagagaaaaggagaagccagagatcccagaggcatcagcgaaccttgcttcaaatgtgaaaaagatttctgaatccaagcacgacgagtatgaagcattaatggatggttctgatgattcaagtgtcactgggaaggaatttggtcccccaaatgataggcatcctccacagattggtgccgatccccagcatcctgaaaggggtgactgcacatcagtccagaactcttgctcaggactactgttggaaaccggtggcggaagcagacaagatagtgatggactcaaatctttgtctaatgatgcaccaagtgtggctagaaacgctgctggttgctgcctactcgaacaaaatgagacagaggaaagtgcttctatcagcagcagcacttcctgttgcaactgcaagccagatgttttccatcagaaagatgatgaagattgttcggtacatgactttgttaaggaaatcattgacatggcatcaacagccctcaaaagtaaatcacaacctgagagtgaggtggccgctcccacgtcactgacccaaattaaggagaaagtgttagagcattcgcatcggcccatacacctgaggaagggagatttttactcctacctatctctttcgtcccatgacagtgactgtggggaggtcaccaattacatagatgagaagagcaacaccccattgccaccagacaccgtggactctggcttagatgacaaggaagacgtggactgcttctttgaagcttgtgttgaggacgagcctgctgatgaggaagcccgtctctccagtgcccttccaaatgaatcagaagtccaggatgaagctgctaagccagaacaaatgacagccagctcttctgtgttccgtgatgagacagacacggtgcctctttcaggactttcccctcagaagggagctgatgatgcaaaggaaggagatggtgcgtcccacacttcccagggctgtgtggagagcgcagagcctaccacccccccaggaaaggccaagagagaggggagttcaagaaagcaaagtgtatcaggaacgccagaagaaaacgctgcttcagccaaaccgaaaattcaagctttctctttgaatgcaaaacagccaaaaggcaaggctgcactgtatcccagcccccaaactttaacctgcaaagagaagctcgtaagctttcatgaagatcgacatagtaacatgcataggtagaatgtaatgcccccaagcatggaactcatctcattgaaagg

SEQ ID NO: 307 - protein, 2051 aa, Mus musculus
DPDPMATDDMAINMTPTVEQEEGEGEEAVKDVGAEQQYGKPPPLHTAADWKIVLHLPEIETWLRMTSVRDLTYSVQQDADSKHVDVHLVQLKDICEDISDHVEQIHALLETEFSLKLLSYSVNVIVDIHAVQLLWHQLRVSVLVLRERILQGLQDANGNYTRQTDILQAFSEETTEGRLDSLTEVDDSGQLTIKCSQNYLSLDCGITAFELSDYSPSEDLLGGLGDMTTSQAKTKSFDSWSYSEMEKEFPELIRSVGLLTVATEPVPSSCGAANEDSSQVILSEDHRGGHEEDGALEPGEQLGSTLETSSLGDTLTNAAEHPPETANQDSTSSPQLGAKKSQPGPCEMMTPKRSIRDCFNYNEDSPTQPTLPKRGLFLKETLKNERRGSDGKGRVVDLKPELSRSTPSLVEPPDRSKLCLVLQSSYPSSPSAASQSYECLHKNGQVVEAWYGSDEYLALPSHLKQTEVLALKLENLTKLLPQKPRGETIQDIDDWELSEMNSDSEIYPTYHIKKKHTRLGTVSPSSSSDIASSLGESIESGPLSDILSDEDLCMPLSGMKKFTDEKSPSSSEKNESHSATKSALIQKLMKDIQHQDNYEAIWERIEGFVNKLDEFIQWLNEAMTENWTPPKAETDSLRLYLETHLSFKLNVDSHCALKEAVEEEGHQLLELIASHKAEGLKDMLKMIASQWKELQRQIKRQHSWILRALDTIKAEILATDVSVEDEEGTGSPKAEAQLCYLEAQRDAVEQMSLKKEQYTSGSKRKEEFADMSKAHSVGSNGLLDFDSEYQELWDWLIDMESLVMDSHDLMMSEEQQQHLYKRYSVEMSIRHLKKTELLSKVEALKKGGLSLPNDIKVDSINEKWELLGSLCHEIKQRRRGVASILRLCQHLLDDRDTCNLNADHQPMQLIIVNLERRWEAIVMQAVQWQTRLRKKMGKESETLNVIDPGLMDLNGMSEDALEWDETDISNKLISVHEESNDLDQDLEPMVPTVKLEETHHKDSGYEEEAGDCGGSQYTSNITAPSSPHIYQVYSLHNVEFHEDSHTQFLKSSPKFTGTVQPTVLTKSLSKDSSFSSTKSLPDLLGGSSLVRPYSCQSGDLSQNSGSESGIVSEGDNEMPTNSDMSLFSMVDGSPSNPETQHLDPQMGDAANVLEQKFKDEGECIKLSSVSQASVSPVGCVNGKAGDLNSITKHTTDCLGDELQGKHEVFTFYDYSYLQGSKLKFPMIMKQPQSEKAHLEDPLLRGFYFDKKSCKPKHQTSESQPDAPLHEKILASAFMGRSSYKSSDIEKALTGIQNARQLSLLSRSSSVESLSPGGDLFGLGIFKNGSDSLQRSTSLESWLTSYKSNEDLFSCHSSGDISVSSGSVGELSKRTLDLLNRLENIQSPSEQKIKRSVSDITLQSSSQKMSFSGQMSLDVASSINEDSPASLTELSSSDELSLCSEDIVLHKNKVPESNASFRKRLNRSVADESDVNVSMIVNVSCTSACTDDEDDSDLLSSSTLTLTEEELCLKDEDDDSSIATDDEIYEESNLMSGLDYIKNELQTWIRPKLSLSREKKRPSVTDEIKVNKDGGSTERANPSDTLDIEALLNCSIKRLSENNGNGKNPPRTHDLGTKGENKKNTYDVTKDPHVADMENGNVESTPEREKEKPEIPEASANLNVKKISESKHDEYEALMDGSDDSSVTGKEFGPPNDRHPPQIGADPQHPERGDCTSVQNSCSGLLLETGGGSRQDSDGLKSLSNDAPSVARNAAGCCLLEQNETEESASISSSTSCCNCKPDVFHQKDDEDCSVHDFVKEIIDMASTALKSKSQPESEVAAPTSLTQIKEKVLEHSHRPIHLRKGDFYSYLSLSSHDSDCGEVTNYIDEKSNTPLPPDTVDSGLDDKEDVDCFFEACVEDEPADEEARLSSALPNESEVQDEAAKPEQMTASSSVFRDETDTVPLSGLSPQKGADDAKEGDGASHTSQGCVESAEPTTPPGKAKREGSSRKQSVSGTPEENAASAKPKIQAFSLNAKQPKGKAALYPSPQTLTCKEKLVSFHEDRHSNMHR

SEQ ID NO: 308 - DNA, 523643 bp, Homo sapiens
  misc_feature (1)...(523643): n = A,T,C or G
ggtggtgaatgcctatagtcctagctacttgggaggctgaggtaggagaatcttgcttgaacctgggaggtggaggctgcagtgagctgagatcaggccactgcactccagcctgggtgacaaagtgaggctctgtctccaaaaaaaaaaaaaaaaaaaaaaagacattaagccaagtcaacatgccagtaaaacaggtcctgaattgttttaatcttatagtgttgggaaaaaggttgatctctttggccaacttccaaataagagctgggtgagtaagcactataaatatagaactgagtaaagcaatgattttattacttgattttgttctttttatatctcaatgtatgtattattgtatatgttctttttgtgacatgtattatatatttacttttatgtttgtgtctgtgtaatctttttcagaagaattctatgaacaataatattttgtattattgtgaaatgttttcataataagtatattgacagaatgtttatttcagtagtaaattagtaaacaaatgtaaaatgatgtcattagtatgagaaggaaagattgatattatatgcaaaaattcattctcacatatatttttaaatctatatgtgcatgtgtgtgtatttatatgcacacatgtttatgtttgactgttgactttggaatttttaaaatatgagacagagtcttgcactgtcacccaggctggagtgcagtggcacaatcacagcttactacaacctctgcctctcgggttcaagtgattctcctgccttagcctcccaagtagctgggattacaggcatgtgccacaacacccagctaatttttgtatttttagtagagacagggtttcaccatgttggccaggctggtctcgaactcctgacctcaggtgatccacccacctcagcctcccaaagtgctgggattacaggcatgagccaatgcacttggctggttttggaatttttgattgcatgtctttaactggccaggggtggagaataggagggaggattaagttgctgagtttggcaaactcagataaaaacatttactaggcgaggtgcccaacaagtgcttgctacacaacctatgctactctggaagacagttcttgacccaaaggaggttgaagttgtttctgtgacagacaaacatctgtttagtggaatacaaggcaggctgatgtaaagtctcagctagaggtaaaaggaagttgatacttatcataggatgtaggatttcagctcttgtttatttcatagaaccctagcaaatggaaagacttgtgaatagtgtacaaccctacacttcatagagctgatttttaagagtgtatttgtcaaactggattattcactaaagaaaatgtttctaccccataagtaaatcttttttgttagagctgctgtgattttgttgtagtgtaccctttaatatattaattactgaaggatttttaccttgtaagcatgatataattattttccttagaaaaaggaacgcctttaaaattatcttggaaatttccatttttctataatgtaatttgtttatgctgggagactatttgtaaatgaggattgattatcaatattttttctcaggtaaggggcagagactaaattgaaagaacttgtggggtgaaattgctgtgttagttacaagacagttgtgaataacttgaaaacaggtatcatgagcaccactttatttcctgcaaataagaactctgatgacacatagtaggtgttttcttgctgacttgctttgtcattttaggtctaatcttttcagtagcaaattatattttggtattttaggcagtaaaggaagggataaagatttacacatataaaccttagtagaatcttacaacgtttcaaacactggggtgataaagagaaagcttgcaggaagcttatcattgcctggaatagaaataatgctatttttctcaaataattaagaattaagaaggacttattaagaaattgcttatgcctaggagtgtgaccaaaatagcagtaccataaagagctgtgtacttgaggaggcaagattaagacctatgaaaacatcgaatgctaaaacaggaaagccccagttcaaaaagcttgtaaactcctgtctaatatgttcgtcctcagtgttttcctttgcctgtataaattagcagcacaattgtgcttccattaacacattaaagccagtaggttccatgtcaaatgtttgtgtttgtagttaaattcaaaatgaaacagcaaaacactggtcggccaggtgtggtggctcatgcctgtaatcccagcactttgggaggctgaggtaggcagactgcttaagcccaagagttcaagaccagcctgggcaacatggtgaaaccctgttctccaaaaaaacacaaaaattagctgggcatgctggcatatctatagtcccagctactcaggaagctgaggtgagaggatcacctgagcctgggaggttgaggctgcagtgaagtgtgattgcaccactgcactccagcctaggcaacagagtgagatcctgtctcaaaacagcaaaacaaaaacaaaaacaaaaacaaataaaaacactataaagttccataaagtcagacaagagaaaatcttgaattcagaaggacgtcagagaaatctctgaactggttagggcaagtttctatgggcaaaatcaccccaaggtctatttcagattccaaatctaatgttcattcaagatctgatctaccctccctgggcttgttgaggttttcgtctttgccaatggaaattttgcctgggaaaggagaggaatggaactcaagctcattgagatggtggtcactatcataaatttgggaatgttcaggagtaagggaggataatatcttgcatctaccttgtgagtaggtcttaccagttctggccctgaacctaaccctttgaagggtctcagctctgaggctgtgaacccctctgggacctaatagcttttcttttcccttcctaggaagctgcatgctactggtgcctacttatacattacacaatttctcagatgactttgtgaatcagttaggcctctgtttactgtgactgaacctccaagccatacactgccttaagcagaaacagggacttttggactcataaccaacagaaccagagtaaggctgatttctggcataagtggtgagaggaaagtgttcctttctctcaactcagctctgctcttctccttgtgttggctttattcttagacaggttcttcattcatgaatacaaaatggatgagcaactttagacttgacatcctttcctattcaaaatcaggagccaatagtgattttcagtaaaatgtttcattgcttctcagtggcttcaatggtatcccatgtacacctctgaactaatttccgtgggtcatgggaatagtaataaactgattagcttaagattgattgggtcacatactccattcctttcgttagattcccacccaaagcatgtaagtttgagtgtagaaaaggtgatatctaagaggaaataataaatgcaaaaattaggtaacaaaataactgaatttgtataccattattgctgctgcaagttctgttctgattgccaatgattgataatcatcaggtaataatttcttctttacatggctacctacataaagcagagggatgatgagcattcaataacaatagcagccacacaaatgcactgtgcctaaatatctgatgtccaaatatttttggcctccaaatactctcagaaaacatagaaagtgtatgggttgaagcagcatccacagtcagcatgggcttatgatcatataggcatgtggttagagtgtttgaatacttttctattttgtgaatgaaggtcttttttaaagccaaaattgggcgctattggtagaggattcactaaaccctttctccttctgcataagattttgacgtttggttaactctgtaactctgttcccttgaaaacagtaaaatgtcaaccatgttattgggtaacattggttagggtaaaaatgacccttggttagtgaaaatgactgccttggagaaggggaatttacctggtctggccctgactctgctctccaagacgggctgtttgtttactctgtcatagccctgttccattcattatattccctggctacatctgaaatgggagatgaggagtaagccctccttagtagctagtttgagataactataaattctaagaagaagctgtagttttgggcttctctgagtgcaatgactcttgtaaccaggtgtgtctcttggagggatctggaagttatgcctatgaagttgttacaaagatattggttcctgtgaggaatgaggttttcaaggccgggcactcttgaacttgcctaatgtgttcttacctgagttcttaaactgtcaccagggggccagatagaatagctttggacactgtatagattgttccatggattaccacaagactccagagaagaggaatgcctgatgctgctctgttggcaaactctctgagtaggctggtgccaaatgttgactgtgatagtcttatacacctgaacgttcagttgagcttcagaagactcagtgaaggtattgcagacacataggtaaaatgcagcctgaagcaaggatcatattcctgatctcatgatgtggcagaactggataactatgcattttagctgtttccttttctctcatggcacaaagctaaattctattttccagcttatcttgcaataggtatggccatttgaccaagttctaaccagtggaatgtggggtggaagtgaagaagggtacttccagacctagcccatgaaaacctcccctataccatctcccatctttcctcaattggtcaacttatgcccaggaatgtaaggcattagaggaaggtgaaacctcaagagagaggtcttgaataaccacatagaaggtcatctgcagtcaggaatattcagttagagttcaaatgaataagacatacacaactatatttagccagagtaatttagcagcttagctgtgaaatccattagtacttccttaactaacagacacattcctcagatctacaaattttctcattgtataccaagagatgcaggcctgctgcattttcagaaatggctttaagattttttaaaaccctagcatgcaaacacaagatgtatgtttacatcatgagttaatgatttggaaataatactaatttgcttttgaaataataagaatttggaatacaactttgtctttgttcatattttgctgctataacaatatctaacactgagtaatctatatacaaagaagtttatttgttctggaggctggaagtccaagatcaaggggttgcatctggtgatgaccttcttgctgaatcataacattgtggaagagatcacatggtgagagggtgagaatgcagagatggaaaaagggggctgaactcctgcagtcactaaattactcctatgatagtggtattagtctattcacgatggctccacctcttaagtatcatcacaagggcaattaagtttcaacatgagcctatagttccagctacttgggaagctgaggcaggaggattcattgagctcaggagtttgaatccagtctgggcagcatattgagatgcctcctcttaaacaaacaaataaacaaacaaacaaacaaaaccaaacccagaaaaccaaacccatgaattttggagggaacactcaaactatagccaatgcctacttacaaataggaaaaaaatgaccaggaggaaacatttctataaatgttgctgtctgcaaatgatactaccagatttctgtcttgtcagttcaggatggcagagaaagattggaggcagactgagttgtgctgaaggtgagagaagttttattttttccttcttctgcagccgcaggctgaattggaggtttagtggtgttctagctcattgctgtttacagtcatatttactatgttgcagatggacacccaatggaacattagtctatgaaaaaaggattctgtgattaaatataaattaggaaaatactgcatactatatttctacaggagagtctcaatgcatattagcagattgaaaactcttagaaaatctgcaacctatttaataaatgctgatgggaaaactggctagctacatgcagaaaacagaaaccggacccctttcttataccttatacaaaaatgaattcaagatgaattaaagacttaaaaccatgaaaaccctagaagaaaacctaggcaataccattcaggacacaggcatgggcaaagacttactgattaaagcaccaaaagcaattgcaacgaaagccaaaattgataaatgggatctaatcaaactaaagagcttctgcacagcaaaagaaactatcatcagagtgaacaggcaacctacagaatgggagaaaatgtttgcagtctacccatctgacaaaggtctaatatccagaatctataagggacttaaacaaatttacaagaataaaacaacctcatcaaaaagtgggcaaaggatatgaacagacacttctcaaaagaagacatttatgtggccaaaaaacatatgaaagaaaagctcatcatcactggtcattagagaagtgcaaatcaaaaccacaatgagataccacctcacgccagttagaatggcaattattaaaaagtcaggaaacaacacatgctggagagcctgtggagaaataggaacgcttttacattgttttggggagtgtagattagttcaaccattgtggaagacagtgtggcgattcctcaaggatctagaaccagaaatagtatttgacctagcaatcccattactgggtatatacccaaaggattataaatcattctactataaagacacatgcacatgtatgtttattgcagcactatttacaatagcaaagacttggaaccaacccaaatgcccatcgatgatagtctggataaagaaaatgttgcacatgtacaccatggaatactatgcagccataaaaaagaatgaagctggaagccatcattctcatcagactaacacaggaacaggaaatcaaacactgcatgttatcactcataaatgggatttgaacaatgagaccacatggacacagggaggggaacaccatacaccagggcccttcggggggttgtgggcaaggtgagggagagcattaggacaaatagcgaattcatgcagggcttacagcctagatgatgggttgataggtgcagcaaaccaccatggcacatgtatacctatgtaacaaacctgcatgttctgcacatgtatcccaggacttaaagtaatataaaataaaaaaagaaagtctgcaataaaggaacatgtttttaacactgtcactttatcataaataatgatatataatataatcttgttagaaaatttatattttattaaattataattttatctataaatggataatttgttcagaataaactaccccaaaatcttggtggtgtttgtttctcactcattgcagcccagtgtaggtcaataggtagttgggagaggatggttgagctccatgcagtcattcagggacccaggctccatccacaatgtgtggccattatctttctgggcttcagagttccactggattctttgcatccagctagcaggacaggaaaacatgaagaagagacacttggtcttagccacctttggagttgatggtttccacttctacttccgtttcattggtgagtgccattttgtgggcaagcaatttagctagtccaggttgctaaaagtttgacctggcctcaggtttgatgagccatccatttcttcccatcaaatgattgacttgcttctggcaaaaaagattaacaagattcttaccatcttgagaagccatattcaaatctggaacacctgctcccaccctgtcctctcctctttatagcatgtggatttcagctctggaaagactaatcttgttctgtaataggtccatgtctctttatcttctccagagactgaagggttcttcagaggtatcttaaagagtcagcttacagcaaatgaggttggaggcagtggttgagaatggctcatcagtctgggctctgggcttcttatcttgcctcaaccaaggcagtccagctttgatctgtatcattaaaagaaaggttatattactaatgaaaaacctgaaaactatggttattagctaaatcaatcatctctgcagatgaaaaacttgaggccccaagaagttaatcaattggcctgatatcacacagatgctctaggaggacctgacatttacagttgggtttcctgactctcagatctgtactctttgtactggggtagctgcctgctacttctccccttgtgtgtggcatgtggtctgaggtctaagataaagggagggagtcaggctctgctgatgccacaaaggacctaagcaggcagattcacctcctgcttttggtctcttaattcctctctagatgaagcaagaacaagtctgtcttcccatctagggcagggttgctctgtgcgaggctgatggtgcacgctgctgggatattggcacttctcaggcattttattagctcctgtttacagagacactgcctgaattccttctgccactcatcccacaccgcctatgctggtggttaacagtgccattttaaaatctcaagcaggaggagacaacataattgtctcatgttttaagcttttggaatgttgttctttttcagagttgtgaagacggagtggatacaggtcaacttgattctgcttttctctatcaatggcctgcaaatattaaatatgcaaaacataggctgctctgtccatatctccttctccccagttctcaccacatgacgttgatttctgctcaggactggaaagaagtgattgctttagatttgcttttcttttaccaactggagaaatgccttaccgtgtcttgtttaaatgtggcttttcacacagttccagcttttggggttggggaggggcacaaataatctgtgtggtaggcagttttattgttcagaaaagaagaaaacagaccccaatgtttggaatgccaacgatttaggaagtttctagcaggtctgctacttgttccaaccactaggtttgatcccagaaaagactcacatgcgttttggccatgagaaggaggggttccctgcaggccaaaggaagggtcagtagaagttgagggtggtgtgttgtgcccctctagattccaaacttccctttgctgcctatctgatgaccaggtgaaagctgggtttattctgcatgggaaggttctgtgggttggtgttcatcagggaaaataaccaggacagacttcattggccaagggtttgcccatgttttgagaattaaaacttgtttacttgagagttagagtcatttggtcagctgtttatattccatttttaattatttttgtgctcgctgttttgttcttttggtctttgacagatgagcaaaaattctttttaataacttttaaaaagctatcccagtgctgaccagggaggaaaaagtgatcaaattgtctaataaggaaacattgtacatttcagtttttatttgcttagtactaattctattttctcctcccaccttttttttctaaatgtataacaacaaagggggagataatttttgttttttccaaaatgctttcagggaaatcccttttaaacctatggattttagtccaatgaggaatcctcttcctttggtctaaattttgcatatcgtctgtttcttacagggcttccgtattgtctcaggctccactggaaatgcagcaaggattcctagcacatcccagttgccatagcaacagcagtctttcccataatgagctgcatcatctgaactgatgtcacagcatcatgcagcaggtcaaacaaggcatctcctagtattgcatcctacagatgtgctgtaaacatcaaaagaagacggtgggatcaggagatggtgagtgttaaatgtctgggccttaattgcacggctgttttgttggttagtcggtgtctgctaaggcggagattgggggatgttgtctctgcttaaaatggactggggaaagaagggctgttttacctaaatcgtttttcaggctgccgggttaagacaaaggcctgtaagagtcatataggaattaaaatatgtagaattattcttgctccagctctgtctgttatttttaagtgttcttacagaatttttcataaacataagatgatttttcaattgcaaaaccccagataagctttaaaatgagtagttaacagtatttaagcattgtaaaaatatagatttctttttgggaggcagagctaattggccccctctttgctcttgtgaattatgaaatattcagtgatttgcagtatgaaattcattatttacctcggttgggtttcagtttcttcatggcaaggaacaaatgctgaataagcatttgacataaccctgatgtgaaaggggatctcttgcatattcaagacagaatttattaaaagcataaaaacctaaaccaaatgaaattatttgagccttttgatctatatggtagttcttcaacccatgtccttcagagttagttgaaagactgccacatatttttccatctctagctagtctctgaaatagctggagttgtttgcaggctgacttgtaactgagaaaggaacaagtctcctctctgcggcagttgcagtgaagggtaaccctgggagagcctctgaagtggcagtggtgttgccatcccttgcttaactttaacaaaaatctgggtatgatgaataaatatcagggtcctcagtggttgtagggattacagacctctggactcagtcataacctcaactcaattccaaaactctaaacacgtatcattttcatttcaactcctagctctgtttttaggcatctttattattattattattttctaaaaaattagtctgacagtgtcagataaggagcagaatgttgccttttgttttgggaaatgaaatggatttccctggtacagctgattgctactaggggagagaaaggaggaggcacatgtcagttcaattgatcaatatgtccacttagaatcagggagtggtcttgtggcttaatgctgccaaattgatagtttttactcaaaaagtcttacacgaaagaatggcaaccattgaattcctcttctttcagtctgtttattggggctaaagagatatatcatggaaagcaggaaaagcaatacctttagctagcttggagtgattttttttttttttttttttttttttttgcacagagttaagtatgctagtcccattaggcaccagccagaggaaaggcctcaggttttaatttgtttgtttataccacatcacgcacatgcttgctactctcagtcctttaagcttatgtttctgacatgcagctgtataggatgggagaggtcagctcagcctggctttatcgcaagcacttagaagcatgaattgttcattgcctgcttttttatgtcatataatgtgagcagaaagctctgctgggactgctgggtgtgaacacatctaagtcgaaagctctaaggtgacagggaagagtgctagatggtgatgggggaagggaaagtatgtcttgtagctagattataaatctggataaaatcacttagtgccttttagaattttcttaaagtattatttctgaagaagagcaatgaagaaagacttgtttggtaacatgaatttctaggagtaaaaaaaagcaaaaggcagcattgtaatgagttttctgtttgcttaattcttgtctcttttgtttaaagtgctcttcagctgcttcatcatggttgatttgttcaattactggaagtcacaaaagctagattccttaagggcagtgttagaaaaagtggagtcatgctttgagggtggggaagggcgctggtgggtgtggactgacgcagttatctagtggaacatcctcccggttcagacaaccctgtaatttttccccccgcaaatgttcaaaatgcaattacagttctccaactttatgcttttgtgctctttttgctccaggagaacaaagccctggtaatgagagctatcatcctaatgttttgtttcttcgtttctttgtagagggccacagcctgcgctgctctctgattagctgcatgtcttaattactggctaaggctatttcagttgtcttagttttaatatatccccaaggggtagatggtgtgtgtgtgtgtataggggaagggagagatttctctatggctgtatttattggtgcctcactgaaactttctacagtttaaggaattttgtttcacagtaatgatagatcatcaagaccatgtttattggacagagtttaggccatggaagcctcacaagaagttaatgtcctctatacttttggtcatggctttcacaaatacattacaaagttacaaagaagttaattctttgccgataactaggccgcatagggatgataaaaataataatcataataacaatcatagctatcatttattcagttcttactgtgtatcagtactgaattaagttttgtgtatatcttatttagcccttattattattatgaagtagagagtaataatctcactttataggattaggtgttattattcacattttgcaaaaaccagtccttagccaggcgaataaacttggctaaggttatgtagttaataagtgattgggccaggattccaaaccattgcgatctggctatgcagcacacatgcttacccacggccatctcagttttatgacatctttactgtatataccatacagatcagtcatctatactctatcacacgtaccccacccctcctcattctaattggaaaatcagatttcatatgtagaatgaaatgtcatttgcaacactaaggttgatttcactgtaaggatgagcatgaatcttgatcagatgtgaatatttactttgtacccagagatttaagtaatgaagagttgatgcttagacttttgccactgcccttgcttgatataactttctagcaggatctctgtatggaaaatgttacatcaataattgtgggcatgatggagttgcactcaaagcaggtcttacctgagtcagtaatgattcagctttgttataaacctgtcttatcagctatatttgtggtgctttgttaactttaagatgtttgtattccctgctgttgcaccaggttctgttctcaacctggtgttgagaacagaagcagaaacttctctcacagtctggaaagtgtaatctgaatctatctcttaggttaagaagatagaggatttattttgctgaatgtatcagtggctgaaaccaaactctgtctatctctgacaaagtacaagaatgacagtcttgtgtaataacctggaagccttgtgtttgaggagagctgatatagtcatttctgtatcatcttgctcatccccagctatccacgcccagcgtcattattgggctctaagggctgttctttgtttgagtgtggggctaatgcacacactgacagcatgttgatattgattcctgtatggtgaatacttagaaatattattccacagggctcattagccttttctaggttccaggaagaagttaacctttgtcctaacctgctccaaagaggcccaagcttgtgtctgcatgaggtacaggaatgagaggctgatcagaaagcatcaaagctgctaggtacaatgactacaggagttaggttccaattaggaaataaaatagccagtggaatttagggaagttggtggtcttgctacatgtctctgattttcttctatttataatcctagaacccatgaatggcagtttgttttgatcgcatggattcaattcaattcaataaatatttattgaatatctcctatatgccaggcattgtcagggaatctatagcaatgagcaagacagatgcaaatctcttccccagctacattctagaggggaagggaaaaatgggtaaattggtaaaataatttatttcctctaatactgcaatactatttctatttactttttattccatgtgttattagagaagcccattatctgtgcacatttgtataggtacatatagctatatggtttatatgtggaggtaaacttactgcattaaataataacttttttttttcttgcatgggtttggattagaatctttctggatgtggacaagaccaatatggcaattagtatttttttggtataaactattttgagaaataaaattataatcagtcaaatagtgcatgtctatctcagttgacaaacttgacatatggaaatatgaaatgtgtgtggcagatcagttaaggagagatatttttgtttttataaaagatattcatcacctttaaaaattgtccagagagccctctaaattgagcattccagccagcctgctgatggaggtatgtatcatacaaggtaccaactacacacttagttgtacaaggacaggtataccagttaccttcagtctcatctaatcgccctagtgtgccttacagtattgctttaaatgggaagcatttctcgaaacaatcatattgactgaactctgtagatgggccctgagtgtggtttttcagaggaatagcaatccatataggactttggccatggcaacagagttttaggtacagtagccccttccgcgcccttatttgtgatttagccttttgtggttatggttatccgtggtctgaaaacattcaatggaagattgcagaaataaacaataagttttaaattatgcgctgttctgcatagtgcagtgaaatctctcaccattactgttctgtcctgcctgggatgtgtatcattcctttgtccagcatatccatgctgtatatgctaccagcttgttaagtcacttaatagccgtcttggttttcagatcaactatctcgctatcataatgcccatgttcaaataacctttattttacttaataatgactccaaagctcaagattagtgatgctggcatattgttacaattgttctgttttattattagttattgttaatctcttattgtgtctaatctataaattaaactttatcacaggtatatatgtataggaaaaaacatagtatatgtagggtttggtgctatccatggtttcaggcatccactgggggtcttggaacatattccctgataatgagggggactattgcagtttgaattaataaggcatacagtttcttctccacgagcacataccggtcagtaattgaattcctgagttggctttaagatttggtgaagataaaggacagactttgttttcctcataagccaccagccatatttttctctgttcttcagccatggggcatgctccaaactcttccagccatcttgcagtggtgtgctttgagtcacaagggtaagtagggagagaatgtggaacctttattttattttcagatttttttttggagacagggttttactctgttgttcaggctagattgcagtagtgcaatcattactccctgcagccttgaaattctaggctcaaacgatcctcccacttcagcctcccaagtggttaggactgcaggtgcacatcaccccacctggctagtagagcctttagaatggggtctcaaactggctaatacatgagctaaacctagcctgcagcttgttttgtatggctgctgggcaggctttatgggtgtgcaacctgtgtagttgcatagggccctgcactgagaagggcccacacttagtttaatactctgctgtaaccatcttggaattcttaataattttttaataagaggctccacatttttattttacagtggaccttatgtagccagtcccatatggcccttttggtgcccccactgatactgcctgagccctgtagatgtttgagtttcagactccccacttcctcctactctggaacaattcaaatagaaattgtagtgcttagaaaaactaagggaccattgtcaaaacaacccagagcaaggcccttgtagatggtaattcagtggcatgcaaaggaactcagtggcatttcttttataggcaatgggggatatattacattatacttgaagatatttggtaggtgaggtttatttgtcaccaccattgctttcaggggagaaatcaaatcttctttgcaaagcaagctaattaaccatcctgttggttcaatgtttatattaattctcttgccctttgtttactacttgattacttttatcacctgctttgtttaactctcatttaaattacacaacatatttatgctgtctgggtatttttttttttaatactatccttttctccttttttttttttttttttttaattctctctctccaggaggccagagggcctataattcgaggttatattactacaggaaaagttcatttttttttttcaatttaaaagggaattatagtcaatatttataatgaacccttctccagcaaggtagttccagccatgctaatgttcagaagtccatatctgccattactgtttataataatgagatgctggtgaccaactcctggaccttatggtgggtgaaacattcccacccatcatgtcacagtgagaagtggctgtgttaatctattaatctacagatttgcagagagttgttagaaaatgggtatgaatgatggcacttgctgcacaggaaaaaggtaagttttttttttttactgtgtgagtaaacaggaacctgacaaatccagaaagggctcttgccacctcttagaagcctaagaatagagtcttcttcaaggatcaagccccaggaatacaagaccttgtacccctgaacaattctgatactcactatgtccatcactgtacaagctgtaaaactatctgtttcagataatttcaccagtagtcaacaattgacaaatgcatcagatgtctaccatgtacaatatcatatgctaagagaacaaacattttacaaataacgatgactataggcacacacacatgtatattacttggagaacttgacatacatttaacatggtgttggctgggctgtgcatacagatggtcatgattagttcttccttttttctgaacataccttgacatggagctccaagcatatctgtggaggctctctcatcttctgttctcatccaatttcttgatttaagtgtttgtctaataactcattacttttgctggcccactcaaaattcttgtttctcagccctttctcagctttctccatcttgagtgctcatagtttgttactactccacctcgtctcttatcagtgttaccttctgggactgttctgaactcattacagtcctccccaccagcagcccctgaggccctcatctccctgccactgtttattcctattacattagcataaaagtagcccatggaaaaccaaatgacactgcagtttctctgatatgtcccttggaagaaatccgcttgcttttagcttttaatagttaattcaaatacttccttgtatttaatctgtttttgtctttgtgtgaattgaaagggaatgaccttttaaaactcctattagtcagtcttgcaggcagcctatatggagaatcaactagaaataactgaaacagcaggggaggtggtatatgatgtggtagaagactatatgcaacaatgaaaacaggcgtgcaagtacagtttaaaaaatttgtcctttagggttattggtacatttcattttaaattaaaagtaaataagaataagggggtggtgatgagaagatgggcagcacaagaagaaactgaaggatgcacatttcttcaggcttggctagtaggagcacacagcttctagaacactgtagaggaacacctgcctcagaagggcagcttctccaagaaaaaaggacagatctgaaaacaaaggtaacaataaaaactaccacaaaaagatatgattcctctgagaacaaataaagaatcagattggtgaattaagatgttatggtttatattcatttagtaataaataattgataacaggatttttttaaaaattttattttattattattatactttaagttttagggtacatgtgcacaatatgcagatttgttacatatgtatacatgtgccatgttgatgtgctgcacccgttaactcgtcatttagcattaggtatatctcctaatgctatccttcccccctccccccaccccacaacagtccctggtgtgtgatgttccccttcctggataacaggatttttaaacatttgaattttgactaaactgaaaataagttgaaaggcagaggatggagaaaaagataacataaccagcataaggagagaaacaggcctggcatggtggctcatgcctgtagtcttagcacctcaggaggctgaggggggaggattgcttgagcctagaaggtccaggctacattgagccatgattgcatcactgcactccagcctgggcatcagagcaagaccctggctcaaacaaaacaagacacgttttactctgttttttttgtgtttgtttggttttttgttgttgtttacttagagagtttttccttttgttttttgctttagttaatatcatttggttgatttgttgtaaaggtgaatatacccatatattttgtttttctttaaaaaaaattctttaagaaaataacataaattattatctttggtatgatgtttttctctggttcttagaccttaacaccatcctgcctaaataccatatatgctcagatacccaaacaagaagtagtaaattgagtgccatcaaccagcttgaggagaaaacaagctttcaaaaaaagtctactctagaaccttaaatggtggtggaaatgttacatgcccaaatctaaagtgatatttttgcaatagcttgcatcaaatagggggtttccattttggatttggaatcctaacatccagcaatttatacatatatatatatagactgaaattctctgagcaagagattagtggtagggaaggtgagcagggaataggcagtaccatgagaataatcatcatgtttcccttcttgacttactccatctcctgacaccctatacctaaacactgaacaaaaacagagcctggcagggtggattttggagccaggtatatttacctttgaatcttagctctactataaaattattagagttatgatcttaaggttcttagagcctcatttttccccatatgtaaggagaatatccattttacaggatgaaatgaagtattttatgtaaagtttttggcacaaagtgagaatttgataaatgaaagttattgtttcacatacttagaagtagtggggtaagattattactctctcaagaagaaaatgcaatttctcctcaactccagccctgaaaccaagaaaatcattcttagagcttttaagagaagaactctttaatatattttaaatatttatactgtgtcaagcatatatattatttcatttaatttcctgtctctgcttaaattttgttcataacacttatcaccttctgcaaactaaacattttacttgtttgtttgtttctccctggtataatataacttgtataagggcagagatttttgtctattttgttcattgatgtttccttagctcccagaatagtgcctggcatatggtaggtgctcaataaacatttgttacgagagtaaatgaatccacataaccctgtgagaggaggccacatgattgtattcagtaataaaaaattaactctcttttgcagtggtccttttcaaggtataaacacccttgagttattcttgctattccagatagcatgccaagaaattcttgtggctgatggttagggtatcatgtaccatccaattattctaaattcttctattggaagcagggatattgcctgggaagctctgatgtcctcctctctaaagggtttctatgaggaagctggggtttcacaggtcatttgaaagatacattgattcttttactggtggttgtctcttcctttctctctttagtgaatttgggtccccttcaggaacagggttatttattctcctttaaatcatgaatccccagctgtaaatctcagattgatggattggtggaatttgaaagactctttgatgaaagtttcagatagggagagtgataagccatgacagtcagcccttctctgttgctattaaaaatgctctaatgagaaatagagcaaagcacaggaacacaatgatacagttgtttcatgaagaacatacagcttcataaatgaaggaataattaagagagcctaattctatacttattttgaattagattcaaaacaatctttgaagtggatatctgcagctgaattttgtaccaaaggcatattctaaatgtcatacttttgaactgagtatttatttctcagggagcaggtgttagggttttttttttttccttgaaattcaaaccattttgacagtatcctatttttagaatgcctttttctttaaaaagacaagcaatatccaaaagcagtagaaagacatcttgggagaaggcagtgttctggttataccataatcataacaagctgaataagaaaaagtaatgctgttaaaatttaaaactcagtgtttttattttatgataataaaacatatttgtttttattaaatgttatttaatatattaaataaaacatatttaatatactttcaacaaccttatgctacaaaataaaaattatacctcatgaaaattttcttgcatctgcaatatatggcatggtcagttgcaatgtacaaatacattactgtgttcaaatagcatgttattctaatctatttcagagagcactggactgggagtaaggcacctgaatttttagtccctgctgacatactcttcctgaatcttggtttcctccacagtaaaacaaaagggtaaaatttaaatgatttttgtttcctgatagctctagtattttatgcctcatttacagggttctccatatttctccattgtttgtttagtcttaggattttccaaaaatctgttccacagagtattttaaatttccttagtgtgctcatgtacctgaaaacatattttaatttattatcttagttcatttggagtgctataacaaaataccataaactgggttgcttgtaaacaacagaaatttatttctcacagttccggaagctgggaagtccaaggtcaaggtaccaaagatttggtgtcaggtgagtccactttctggttcacagctggtaccttctagctgtgtgctcacataatggaagggataaagagtctctcttgggcctcttttattagggcactaaccccattcatgagggttccaccctatgatctaatcacttcccaaaggccctgcctcctaatatcatcaccttgggggttaggattttaacatataaattttgggaacgcaaaacattcagacaatagtatttatataccatttatatttcacacttgtgtgttttattagcttatatttcataatacttttggtggtcaacctaaagtcaacacataaagtttcgcttaaactaacaagctattatctttcacaagaaaatttttttagagtttccttatcttgcaaatttgtgtttctatttgttttttctctttttagccacaacatatttttgctgttaatgagttgggtgaagtatttggttcccctctacccttcctattgggtatagaatttctttagaaatttacactgctgctgtagacattcacataaaatataagtgaaagtgctgttgttaggtcaaacggtatggaatttccattgttgttgtcaaaaaatggccaaatattaacagtttcatgatactttgataacagtttccaataatttgttcattatcatagcaatgttagtctttactatttttataactcagtgatgagagccagtccctaaatgaactagtgaagtagtgcaaagagcacacagggtccttggtgaaagatagattggggattgaattctgcttctatactgccaacattgtgaccatgggcaagttgctgagttttgttgagcttcagtgtccttgtttgtaaaataaaaatgataatgcctgcctctcaagcttgctgagaagaatgcccctggctcccagaataatgttttattttgtctaaaatgactctcaggctggatgtggtggctcaggcctggccatcattttagggaagctcaggagggaggattgtttgagtacaggagttcgagaccagcctgagcaaaaaagtccctaaaaaacaagtaaaaaattagatgggcgtagtggtgtacaactgtaattccagctactagggaggctgaggcaagaagattgcttgagcccaggtgtctgaggctacaatgagctgtgatcatgtcactgcactctatcctgggtgacagagcaagtccctgtctctgaaaataaatacataaataaaataactctcttgagtccatgagtctggtaccagactggaagggacaaatctttgagtctctaccttttctctggatgatctatgcttgttgatggcttcttctatttccatgtgctgatgactcataaattcagatttctagcctctgattattttctcccagattcagacttgtatttctcctgctttctgtatgtcttttcctgaatcttccacaggcacttttcacttagcacacctgaaatgatctcatcctttctgaacttcctgtctggaattaagaattgtcttcagtccctgcccttagggtggagactgggagtcatcctaagccctctcttccatgtctaccctcacctaagtcctgttgagtcaccaagttctgttttgtttctaagtgactgggatttggtaaaaatgagcttaagatcaccccatataatttttgattgtgtgatagatctaggtcatgctcttctacttcctgccttccctttctctaaaccatacaactgatattattagacattttctcatgaagcccctcctatctccatgatctttctgctgctctttgaaccttttccagctttgttaaagcccatgtctaggacagcctcaagtatccagtgtagctagtgcactgtggtaaagagaggaagaaaatgcagtgtcagcgctggatggagactctactgaacaagagatgtgttatcctagacagaaagggtttgttatttttttttaattttgaaataaaattctgtctgatcggagaattctccaaattgatatgtaaagttactacatcctaattcaaggggattacatagtgctgacttcagtaccagaatgtatttcttttttgcacaattatcatttgtctttggaattaattccagtaggcaggagccagttttaactccatggcctacaaccctggcattgttatgcacactaatgttcacaatagaacaaaacagcaaccttttttcccgttgagaatttaaaagaccttttttccccttgacgattttcccatgaggaaggcagataggatgttggtaagcttgggcttggggccagttagatcttctgggttcaaatctcagtcccacccccactagctctgtgcccagggaaacttgcctaacctttctgggtcctattttcttcacggtaccttccttgtcaagtataccttccttgtcaagacttagaaacaacgtgtgtaaagcacctagcagagtgcctaggatacaggaggtgctctggagtggttagtggagacccagattattcagaatgtaagcagagggctaactggtggtcagcctgccttgccctggttttaggagagtttctgttccaattccagacctgtggcatatcggtggtcaagtaagtcttgtaccataatctactccagctgccctgcttcctccttaaattagacaggaaccccagcactttgggaggccgaggtgggtggatcacgaggtcaggagatcgagaccatcctggctaacaccgtgaaaccccatctctactaaaaatacaaaaaattagccaggcatgatggcaggcgcctgtagtcccagctactcgggaggctgaggcaggagaatggcgtgaacccggaaggaggagcttgcagtgagccgagattgtgccatgcactccagcctgagcaacagagcaagattccgtctcaaaaaaaaaaaaaaaaaaaaaaaaaaagaaattaggaacaactgtatcaactgtaaagaactggggagactagcagtatctctgcttggcccatgcttcacaccccattaaaaccccagtttcttcttacaacctttgccttttctctagctctctgtggtcataacgttctctgaattcctaaagcaataatgctttttatcatgatttactacttgttcatatactctgaggttgtttcacatgtgtaagtctgtctcctcaagcaattggaagcacctctggcaaaaactctggctgttgtattccccaaggagctggcccctgtgcgaaactggggacaggtgcagtttgacctactctccctgtgttcccagtcccttttgctactcatggatgtctagaagctctttctggagcctgccatcaggcattgcccaaggccatgtcccatgatccatccatacagtgttgtcatcattctagctgtgatgttctgggagctgtccagacaagtagtgattataagaccaagagattcttgcagtgtcctgaatataacaccaatccaacatgcattgatctaatgcctacatagtggcatgattgtgccatgattgtgcagaacatacgtagctgagcaagataatggggagtcagagaaattataaaaccacctaattagtcccagtaaatacaaagagctatgggaaggtcgatgagggtgcagttaattcagtcagggttcagggtctaaacaggaagtaaaatctgacctgagccttgaggagtgactgaggatttcagctgggtatagataagggcattcctgagtatgggtgaccactgtgttaagcaagtggagtataagagtatatacataaggaggcctggacgcagtggctcacacatgtaatcccagcactttgggaggccgaggcagtcagatcacttgaagtcaggagtttgagaccagccttgccaacatggcgaaaccccgtctctactaaaaatacaaaaattagctgggtgtggtggcatacccctgtaatcccagctactcaggaggctgaggcatgggaatctcttgaacctgggaggcggaggttgcagtgagccgagatagcaccactacactccagcctgggcaacagagtgagactctgtcttaaaaaaaaaaaaaaaaaaaaagagagagagtatatataagcagaatgatggtatagagagtacgtgtttaggatgaggctcagagaggaggcttggatgggatttggaagggcatgtcaaaaaatggctgtgtaaaatgaatatttatatatcaaattttgttttttctatgcttcctttctaatttggggaaatgttttcatagaagggattttagggccaatgaatattaaaattcatagttaaaacacaaggttgtcaagggaaattccatattttaaaatgtgcatttacttctctaataccgattcagttcacacagtctatcacatacacaggtgttaaaatgctgtatctagttaacttcacatttttcccacaggtattgaatgtgtaagcagacacaggggtaactctcaaggaacaaaattgcctgaaggcttttccacaggtacaggtaaaaattgccttggaaatgattacatgacttagcaatgaggggttagtatttctttaggctgtcagctgtgatgtagccagtagcatctgagcttgaattatctccatcactgagcctcagacatgtttgggcatgtctgctgaatgtctgccctgtatctgtgatgagttggtggtctgtcccatcagtgtattgatactagagtcaaaagcggttcctagagagaaagtatcctaagaaaggtggagtcagccacagtaagctctgatcaccagagggtggagtgattctgatgtcagtttctatgtgggtcatgaggaagtgtcctgtctcagccattccctggactctggcctgagtcctagaaaagctggggaggggtgagtgggctgaatgtaagagctcttccactaaagaatctgtatgtcatttgagcacaagaccactgctgcaatagccctcaggagagtatattgtataagagggagaaaggcatatttccctctatccacagatgcttgaagccagaggtttccaaactgttttgattgacatatttatctgttaaaaaatgtctgagctctctcatgtattaatgtcttacatattttacaaaacatatagaagtaaaaatctgaaaggttaaaataaaaattaaacagaagttctaatattttcatcacaccccaaaggtttgccttgcatccccctttatgatgagtcccccatcatgaagaccactactctagagcattagtgggaggggcctggcagtgcccagaaataacagctcttcctggtaaaggtgcccatgatgcagtgagtgtgcatacatgtgaaattcatgctggagcttcatgagattctacttagggccctgttttcagggagctaagactctgataaggaggttaaaataaagatggagagaaatgtagcacattaccaaaaatgttactccatttgaacttccaggctggtgagccatggaggaacttgagttgtacaaattaaacatctttctgagacagtatgtttgtattgcattttagaatttaccaagcactttcacttgtaacttcccaaaaactctgtgggatatgaaggatggaaattgagaatgtcttgttttattttatttattttttttgagacgaagtctcgctctttcacccaggccgaactgcggtggtgctatcttggctcactgaaagctccgcctcccgggttcacgccattctcctgcctcagcctcccgagtagctgggactacaggggcccgccaccgcgcctggctaattttttgtatttttagtagagacggggtttcaccatgttagccaggatggtctcgatctcctgaccttgtgatccacccacctcggcctcccaaagtgctgggattacaggcgtgagccaccgcacccagccagaaattgagaatttctttaagccaatttggttacactcagatttcagcttcattttggaaatcacagtaaccacccaaaaagtttggggtggtgatagttacttcttctataggcttgataccaagctgtaatgaattcaagccttagaccaaaatatcatatagagatatttattagactagcattaatttgcaaagcaggcacaaaatatttcatacagtctgtttgatagattgatgaactctcagctctattttgttttaggtgctctaactatatattaagtaaaaaataaaaagtaaaagctttgctctatttaggattctgcatcctttgtatgtaaatcagaaatccttttaaatcaatggttggagacaaggacagattagggattaagtctcaggcaacatcactcaagggtacaaagttgaggcatcagagaagtcttgcccttttttcttacacatgtttctaaattattttagctaacccatatgtcttgaatacgtttaatttcaccaggtaaaacccatttctaaactttcagcttgctaaatggtaatggttattgactgaagtaggagtgagtccatcccctttctgatgtattgttgcctgacacacacacccactttcggactgtacatttcaggcattgctttagctgactttgcctagaaatgaaacttaaattaattgtcacatatatcaaaccaattagaatgaagtatttaaaaataaattacagagcttgtaacattggattatcattttacagacactgaagcttatgatctatgatttgcctaaagtttttcaatttgtgagtggggataagacactgaacccaaatgtaaatgactctcaattccatgctgtctttgtaataccaatgcccctgactatatggtcacttccaatgctgacctcttgggattgaggcactctggcccttggccactttttaaaaagcctaaagtttaattaatagtaatagtccaacgttaaaaagtaaggaatctgtgtcttctgttgacctggttcctcctgtaattcttcctgaggggaggaaagacagtatgtatcagatttatgaggctttgcttagattttccaaaggtaacttcagttgctttagttcttataactcttttcctcaaggaaatcgggatacattttctaggccctgagggacatttgtgtgtagccacatggaccctgaaggccatgacccaagggcaggggctgctgtggatagtaagatacagatgaagtgctgggcaggtcaagaacctggaagacacagctgggtgggaccatgccaggagcaaaagtgagaagttcaaggtgggccagaccagaaatatgctagacaggtaccatgggattttaaaggttccagcctatggcagggatcacctggccttgcccagaagaatgtaggttttaggatagagcaagaataaccagtgtaaaattagcacattttaagatactgggcgcaaaaagcaggaatcccaaactgagaatgtttagtaagaagaatgtggatactgaagaactcaaaagacttttgtctgaatggggttctttcttttcttttgtttctttttttttttttttttcagagttttgctcttgttgcccaggctaaagtgcaatgacacaatcccagcccactgcaacttctgcctcctgagttcaagtgattctcctgcctcagcctcctgagtagctgggattacaggcgtgctccaccacgcatgctaattttgtatttttagtagagacggagtttcaccatgttggtcaggctggtcttgaactcctgatctcaaatgatccacccgtgttggcctcccaaagtgctgggattatagacatgagccaccgtgcccagccccatcgtgtttcttttgcagtgcttttgccctggaccctctaggcttctgatacatgctaaaccagggtgctttttccacattgctccccacccaacactctgcagggcccagataactccctgagaggtgccaagtggccctaaattttttacttattcctattcttgtgtgctgaggccagcctgtgagtcccagggtccttttcacagatctctcagtactcccatctggttcctataccgtgggattcccggcagcccctctaaccagacagagtgcttgaggtagaggcaccatttaaatcaccctctaggacctttgttactggtttataattcataaaagagattctctagtacttattactcaataagaacaatgacattggtgtttgacgtacaggatttgtttaaaggggcattttatagatctgtagggcaatggccatttccaaagcaatgacattgtagtatttcaaaacaaaagctattttggacaggaattcaaaactgaactctgtagatccaaagagagtttgacttgtgtataggagttttttttcttttctttttagtgcctttcaaaacatttcatttaaacttaaaaactaaaagatcacaagagatgttttccacaaagctcttttgatttcattgttctgcatagatgcttggaaaggagggaaaatgttttatggtgaaagaatgcagacttccggtccagaggatggagagcgtctatttcttggccttctgtggtccttagcctcagaaatatagaaagaaatatagaaagatctgtggacatgtcagggcttgatgcagtgagtaatgggatacaattttggattagcagctggaaattccaaatttattacaaatgtgcataaaaataataacaatgatggattctttcatttattgagtgattactatgtgtcaggctctgtgttaggaagtgctcgatatacactaactcgaagcttcaacaaactttgagggtagttgaaggaacacattaatgcccagaccttggtgctatacaccattcatcaataaaaggaatcagggctccttcaagtaatggctaatactaggggcagggaaacattttagatgtgtgttagtgagtatcatgtagttcaagaatgtaaggaaatgttcaaaaaacaaaaggatggagctgttgaagagacataggagccaagctgaaagagcttctactggccacacctaataaataatgtagtattgagttaaaatataaaataaatatacatgagtgtatactaatataaatgaataattgaataaatagataaacaggagaagagatagatctttcttacagaaacttccaaataatatgtgtaaatactcccatttctaggaggaagagtttaagccactcctgagggtgggctagacttagtgacttgctctcagaaaacaggatatgaaagtgaacaatagtagctttacagtagtgaaacctggtaagtataaccctaaccaagtgatgaaggttgatgtcaccattgatgttgtgtggatattgtatacccctaatgtgatgtggtgagaagagtactacttcacctccatggtattcttctcaaatatccataattcattttaattatcagaaaattatcagataaaccgagactggggacattctagggatacttggcctgtatttctgcagactatcaaggtcatgagaaacaaggaaagcctaaaaggctattatagaccagaggagactaaggacatatgacaactaaatgtgatgtggtactcaagattaggtcctgggactgcaagaggacattaatgaaaaaactggtgaaatacaaataaagtctggagtttaattaatagttctgtactaagatcagttttatactttttacatatgtaccttgataacatgagatgttaacaatggaggaaacagggtgagaggtatgggaactctctgtactatctttgcagcttttctctaaatataaaattataacaaaataaaaaatgtattaaatgaataagtaaataaatatatatatgtataaatagttgaagatttaacagggtaatacagatttattttttaaaaatcagaggatggtaggatgagaagtagaacttctctgagtaggaactccaagcctaccccattctaatagcacaggtaaatagcttaacaatttggcatatgttttcccagatattttctatgatgtgtaggtacatattttaaatctggaaccctgcttttcattctgtcctatggcttatttttttgtctactaaaccctgaatctcgaacttggttttcagacagaatatagtgattttccagatgatttttaaatgtttgagagagaatattgcttccacaaaggtatcaaactgtcgagtctacatcttactttatttttaagcattttagatatatatcttatagacattaaatagtttttcatttcttctaacctagaggtctaaaagaatcatttaggtgttcctaaatttttgttatattagtcaaaattattacctgggccaggcatggtggctcatgcctgtaatcccagcactttgggaggctgaggcaggtggatcacccgaggtcgggagttccaggccagcctggccaacatggcgaaagcccatctctatgacaaatacaaaattagccaggtgtggtggcacacacctgtagtcccagctatttgggagactgaggcaggagaatcgcttgaaccctggaggcagaggctgtagtgagtcgagattgcacaccactgcacagcctggatgagacagagcaagacttcatctcaaaaaaaaaaaaaacaaaaacattattacctgctgtgctctaaacatttggaatggtagatttttagtaaagactaagaaaagaaatgtattaatctttaaatacatagaattatgaaagatgttgctggttgatctttgttgatgaatgctagctagccgaagttgttagtgatagaaattgaatatatatgtgtgtgtatgtatatgtttatatatacatacacaattatatctataaaatttaaaagcattcctttgctctggctcagacaggataagaatggtaaccactgattatctgatctcagatccaaataaattactaatctaatttatttggattaacaggttttctttattttttcatttctccttgtaacaggcagagctgtgatttgaacttgggtttgtctccagtactcccatgcctgctggatagccctgatgtagaagctatagagagtttcacagctgtgggcactgcttttgtgtagtcttgggagaccctgtgtgtgtgtgtgtgtgtgtgtgtgtgtgtgtgtgtgtgtgtgtgtgtgtgtgtgtgtgaagggggtgggtgtctaggccctttctcctatcatagccagttctctctcattcctagcccagattgtaacagtctttcattggttagcttcactgtgcctttcccaacctcccatttctttttttttttggttttattttatttttaattgatacaataattatacatatttggggggtacagtgtgatgtttccgtacaagtatgtattttgtactgtttaaatcagggtatttaaggcatccatcatctcaaacatttatcatttccttgtggtgagtgcattcaaaatcctttcttctagttattatgagatatacaagattgttaactagtcactgtactgtgcaatagaataccagaacttattccttttatgtaactgtgattttataccccttgaccaatctccctccatctctccctccctctctctgtcctcagcctttggtaatcaccattctatgctgtacttctatgagaccagctttcttagattccacaaatgagtgcgatcatgttgtatttgtctttatgagtttggcttacttcacttaacaatgccctccaggtttatctatgttgctgcaaatgacaagatttcattttttagtggctgaataatattccattgcgtatgtgtaccacattcattattcatccattgatggacacttaggttgattccgtatcttggctattgtgaatagtgacacaataaacgtgggagtgcagatgtctctttgacatagtgatttcatttcctttggatgaatacccagtagtggaattgctggaatggtagttctatttttaagtttttgaggaacttccatactgttttccataacagctgtactaatttacttttctaccaagagtgtatcagggtttcctttctccacattcataccagcattttttttttgtctttttgataatagccattctagttggggtgccaacctcccatttctccaccagtggctggcacttacctatagagaacagtgaagctaagtgataggaatcccttccatgtcctacctccttggtacaaacctacaaattggtacacccttctttacctcctttctctgggttttatagaaagaggaaaaatattgttaaaagtatggctttttggccaggcgcagtggctcacgcctgtaatcccagcactttgggaagccgaggtgggcagacatgaggtcaggagatcgaaaccatccggctaacacggtgaaaccctgtctctactaaaaatacaaaaaattagctgggcgtggtggcgggcgcctgtagtcccagctactcgggaggctgaggcaggagaatggcgtcaacccgggcggtagaggttgcagtgagccgagatcgtgccactgcactctagcctggtggacagagcaagacacagagatgccctctcaccactcctattcaacatagtgttggaagttctggccagggcagtcaggcaggagaaagaaataaaggagattcaattaggaaaagaggaagtcaaattgtccctgtttgcagatgacatgattgtatatctagaaaaccccatcatctcagcccaaaatctccttaagctgataagcaacttcagcaaagtcttaggatacaaaatcaatgtgcaaaaatcacaagcattcttatacgccaataacagacaaacagagagccaaatcatgagtgaattcccattcacaattgcttcaaagagaataaaatacctaggaatccaacttacaagggatgtgaaggacctcttcaaggagaactacaaaccactgctcaccgaaataaaaaaggatacaaacaaatggaagaacattccatgctcatggataggaagaatcaatatcgtgaaaatggccatactgcccaaggtaatttatagattcaatgccatccccatcaagctaccaatgactttgttcacagaattggaaaaaactactttaaagttcatatggaaccaaaaaagagcccacattgccaagtcaatcctaagccaaaagaacaaagctggaggcatcatgctacctgacttcaaactatactacaaggctacagtaaccaaaacagcatggtactggtaccaaaacagagatatagatcaatggaacagaacagagccctgtctcaaaaaaaaaaaaaagtaacaatttttgcagggaaagctacctgttccctgctctgccactatagctgtgtgaccttggacaatttacttaaatcttgctaccccattctgtgaaatggggataattatactacctaaactggcagtactaaaagataatgctgatgaattctgtttagcgtggtgtctggcacaataagtgcctggcatggtaagcgacaatggtaatttctttctatgcaaattcaacccatcttccagggcttatccagatcttaaacttatcctattgctctggctctttcctctatctgtaagtatgctcaaatctttctttcaaccctcccttgatcttgcattcctttcttattgttattctatttttctttctcataatcaagctttttgacagagtgggattctctgccttactttaagtcagctcgtaaactaaagcaatccagatttcatgcccccttacactgaaactgctgtcataaggttgccagtaggacctcctgaagtggacatgtgcttctgtttgcctagtgtccttttgccttctggcagcatgccatcccggggagttgccctcctctgtggatcctggtgtaactaactgtcagttcagttcaggtgccctgctttctcccagcccaggggtggacatatgaccctgagtcaggccaagctgacaagtcaggggaacgacagatggtgacatttcctgcttgctaccctagttctcctggacatcctcatttcctgtcctttctatggactaattctttgatttttccttggagtctgtgatctacctcatattccttcaatacatttctttttacgtaccttagatggctgtgttgcttacagaagaaggattctaactgatacaaactataattggtaaattaaagggaaacatttcaatacttacataatttattttcttatagtatagaccatgtcatccttgaaattttctgttgttgtatgtaaatcctgcaatgttgcagtgttttggttcttctcttacctctctacctcattattcttagtcccctcaccggctccaagccctactacataaatgtttgttccctaagttttctctcttggtcttgttctcatcccagatgttcttgaattgtgccacagaccgtctggcaggacggggaggcctctaaatccctccagtgtttctaaatgttttgaatgaaatgcatagaattacaaaaaaatcaaaatatgctgaaatgtaattagaaaaatatttctaaaaattgtgatatagtaatatttgtgcttttttattaacacaatagacaagatctagtggtgggcctaacaactaccataattttgaaccaataatgagtataaatgctatttcaagatagctttaataactttaatgtgatatgaaaatatctgagatttctgttggtgatcacaggtattgtgatttcttttcttttcttttctttttttttttgagacaagttcttgctctgtcacctaggctgaagtccagtgatgtgatcacagctcactgcagcctcgaactcctggactcaagtgatcctcccacctcaacctcccaagtagctgggattacaggcgcctgccaccacacccggctaatttttatatatttttttcgtaaagacggggtttcaccatgttgcccaggctgatctcaaactctgggctcaagtgatcctcttgcctcagcctccaaagtgctgggattacaggtgggagccaccatacctggcaggtattgtgatttaatcacaagtactgctaatacttctttgaattgtttcctatattaataattgagagaaattttagttcatgaaaacaagaacatatttttttccccttcacattctcagacttcctgaattctatccatagaatcctcagcagtcctaggactctaggtgaagaatctttgcctaagtcctctccttagggtttctcatccataccagggcttgctcctactatccatgtcttgcggactcacaggtttatatcctcagcctggacatctatatacagagaccttcctctgtttgtctcacaggcatctccccctctacacgtctacacctgcgtttgcttcttatacctcttcttcctgggggtttctcatctctcatctgctctgtggttaacttccagtattgttcccttcagtactcccttaatactgctgccagaataattctaaaaagctggtaggttctaaaatctgagtgtatcatttccttacatgggaatcttcaatgactctcctttgcctacaggttgcaattcatagttcattgtatgtcataaaaagccctccacaggcaatgtgatgggttccatctcttgcctctttgttctgtccatattccctttactctatgccttctgcttgcactacttgctttaaccatttaaacatatttggactttctgcatgtcgcttgatttttcatgccctaaacctttgcacaggctattatatcccctagccttgctcacttgctaatttgtactcatctatcaagatgggcccaagtgctgtctcctggggaaacttctttgatgcctcacatgtagttgacactccttcttcattcccatgcttgcaccggacatatgcctctagtaaaattcatattacagtgaattataatcatgtcttcatatatttctctttgccactaaagtataaaattcttgaggaaaaggaccatattctatttatttatgtgtttctagtttttagcataataggaactcttaccatgtgtagtcatttttgccaacaaatattttttgacatatttagtgttacaaaaaaatcactgtcatatagttcacacagagagtgtatttgttttaaggataagagcaaattaatgagtctcttccattctaaatttaggacaaaattttagtcttaccatgtaacgtaattggacctctttagtggagaaactaggtcgaggaactgttgctgtgcagggaaaatgaaaatgtagacatcttaaaagctggtatgagttctatatataaaagctcagccaaccatgtctgttttaaggttattgtttagttagatacattattattttgtatgatgttcttttctcccatatcacatctataaatgtttatcgagttgaggttagatttactgcaagtggaaactcttagagaaataaccaaaaaagtcaggaatatgtgcaagtctttactgtggactgatgtttaaaaatttagagacagaattactgaacagaagacaatcttacagcatacaatcaaatcttggctgctactaacacatgtggcacctttatgaaaattagaaaaagacgttcctttctcgaaacaccttacatccacctttaggaaattgtcataatagattgacttaattggaatagggtactttcaactgccatcttctggaaagtcacactaatttgcaaatctgtggtatctgtgatgtgaaggacatctgttagtagtggcgcccgtgtgtaatgcacaatctgcattgtagcatatatggctgccttagccaggggatgagcattctctccttgtatgtggttttgctaccagttatttattgttcaaatgatagtgaaggttttcagatgaaaaaggaaaaataccagctgcactttactgagaggaagaagaagctaactttcagcacatccaagtgactctgaaaccacactagaccattgtgtcctacagaattgaaagagggcatcaaagagcaccatctttaggttgttgcttacctggcttgaaaagtattaaagcctcaagggttctgaaacatcatgtgcattaactatggctccacagagggtataccttcccctctcaacttcctattctggaactctatgatatatttccaattacaaatgttaggactgtggtaaagcaccaaaagttgtggctagaatttggtctttgccacttcttacacttgcttagttcagaacttggaatcctgttcttgtgcaaatcctgtggttgatgctcaacacacaaaaccaaaaaactgtttgttcttggcataaaaatgaaatgaactcttgcttattttcttataaagaatgaagttttagatctaaaggaatttggatacactttatttcccttgtttttttcccagtttggtttctgacctgtgttgggtgggggggttaggtatgcagtgagccagagcagttgactgtaggtgtattctgatttttagcctctcaagaggactgtcataacaggatagccatgattccaataacactgggaggtggatgaaacattctgaggatacgtgcaggttgtagatgggcttgcttactttggagctcgggtggtgggtgggtttcctcaggggatagtgagaagggaggaaaaacgatgagatgtaagtcagattaaaagatgcctgcatcagcatgagaagcctactgctaagggtcaatcatcatacaggatgtattttcaatattaagcagatatggtagagatttcaatcattgttggactgattggccttagagctctggtaaaacgctgcatcagagcagagcagacacctgctgaggtcccaggtgcagaggaggtctggagaaatgagcatctggcaggctggtcccaaagccagggctggctcagggactggcctttattaggtttccttccatgacaaaaactcagctaacacttattggattctaagtgctgcgtgggattaaaagggcccttgcctctgtagagttgccaaaaagagagacgcataacaactctaaaataaagtaggataaactgagtgttacagtagagttttagtacaaaaaaaattttggggaagtacaggatgaagagcaatttatccttctgagaggagccttttccaaaaagttggtctttaaaaatgaacattttcctgtttatttctgatttttgaagaaaaacatgctcaatttaaaaacaatttttaaatagaagtgtaaaatacatacaaaaagcagaaaaaaggaaagtcatactttaaaaaatgttttattttaaaataattttatttatgaaagaattataaaactaataaagaatgctctcatatgtacccttcactcatcttcctttaatattgacatcagacataattatggtatatttatcaaatctaagaaattaatacattactattaactaaactactgcatagacttttttttttttttcattaataccctcttttctgttccagtatccaatccagggtcctacattgcatttagttaccctatgtccttagtttcttcaagtttatggtaatttgtctgtctttccttgtcttttatgaccttcacacttttgaagactaatggtcaggtattttgtaaaatgtccttcaatttgagtctgtcttgtgtttcctcctgaataggctgaggttatcagtttttgggagggtaacacaaaagtgatgtacctttctcatcacatcagattagagggcttgtaatagccatacaacatattactggtgattttaaccttgatcacacagttaatatggtatttgtcattaaaattcatatttttccctttctatgatctgtcccttagaagcaagtcactgagttcagtcacactcaagggaagagaaattgagttctacctcttggagggaggtctatcaaagaatctgtggattcctgttaaaagcaccatagtcattagtaaatctggcgggagatattttgaggatatgcagttatcctctttttcttttttctttttttttttcgagacaggggcttgctctgtcacccaggctggagtgcagtggtgcaatcttggctcattgcaacctccgcctcgtgggttcaagcaattctcctgcctcagcctcctgagtagctgggattgcaggtgcctgcaaccacatccagctaatttttgtatttttagtagagatggggtttcactatgctggccaggctggtcttaaacttcttacctcagggatccgtccgccttggcctctcaaagtgctgggattacaggcgtgagccaccgcgcctggcctatcctctttttcctaaaaattttacccattgattgtagcattcatcaatagatcttgcctgtagcaatcacctgttatattggtgattttctatttccctcattcccttacatttattatttgaaatttttctgtaaggaattttttcactcctgcatttatttattcaatcgtttatatcagtataggctcacggatatttattttattcttgaattataatccaatactatggttatttattatttaatacattgcccagattgttccagttttggccattgagtgtgtgtgtgtgtgtgtgtgtgtgtgtgtgtgtgtgtgcatgcattttttgagacatggttttgccctcttacccaggctggagtgcagtggcatgatcacaactctgtagcctcaagctcctgggctcaagtgttcctcccacctcagcctcctgagtagctgggaccataagcacgtgccaccatgcccagctaattaaaaaaaattttttttgtagagatgggggtctcactatattgccctggctactcttgaactcctgggctcaagtgatccttctgcttcaacctcccaaagtgctgggattataggtgtgagccactgcacaaggcctgaacatacatatatatatatatttgagaagctttggagggtcatcttagattggacaggtggaacctagtgagatcaaggaatcaatgtcaggctctgctataaatggcataggatgaggggaatgcggaggatgaggggaatgtggcaaatgaactctgtcagactcaggaaaagcttcagagagaaggcaacatttgagctggactcttatcccaaatagtagttttccaggaaaaggtgtgtgtgtgtgcatgcatgtgcttatgcttgtatgtatgtttgaggaggagagggaatagactattggtagtggggttccaggtaggatgaagagcacatgcaaaggcatggaagcatggaagcatcagtcagtgaaaaacaagttcaggaggccagtgctggaaaggaggtggcaaacagggaagttggtagctgttacaaagcacagtaagtagtgaatcaggggaacattaaagggaggccatctagttttttgttttggattttgctaagtatgatatgagggagtaattagctttattcattgcctctgaaatctttctccttcctgtaggggatatttctacctgcagttatgattaggattgaatttgtattggtttttattaaagttgctttgcactttataaggctcaatcccaacagagaccagagctcacttgggctacaggaaaaataatttgatttctgtttgttcatttattatcagttgattgctctttcccattcattgagaatcagtggggtgttgctatccttcactgcttaaaaagggctcccctcctgttgtgcaggcttattgttgaattgtatgccggttgcgggggctcttctgctgagtgagtgcaggaacttgggcaagtcttttctgagtttttttttttcagcattgaaatggaaataatttgcctacctctcaggtttgttgtaagaaatgaataaaatgattgattttaaacaattagctagcacagtgcttggcctattgtaggtattcagtaaatgctgtgagaatcagactagaactgagagggtccttgaaggattgtctagtctttccctctacctgtagaccagtgagtggccccagccttcaggttaaatgttttatatttaatttttgcatagttccaggcatgaagaccccacaacaatcttcagcagtggtaaaaacatttattaagaacctcctatatgtcagtactacatgacttgtgtgcgttacaaagataaacaaagtatatcatgggtaccagtaagtttacagtactgttaagggacacaggtgcatagacagaattaaaatgcagcacattaatacaaagtaatgtgggtaaaatgtggcaaatgaactctgtcagactcgggaaaagcttcagagagaaggcaacatttgagctggactcttatcccaaatagtagttttccaggaaaaggtgtgtgtgtgcatgcttgtatgtatgtttgaggaggagagggaatagactagtggtagtggggtttcaggtaggatgaagagcacatgcaaaggtgtggaagcatgagcaaacgtggcctgtaccaggtgatgtaactgaggtattaagtaaataaatagctggtagggacaggcaagttacagaggggaggtaggacatgggactggagaggtgagttggagccatcctaaggagttaagactttatcctactgaatagggaagttgcacaatcagatctatttttagaaaatcacttttttgacaacttgaaagatcagtcagtgtggggagggctggaagtggggaatgttataggtcaggtgagacaagacaagggctggcatgaggttgtgactttggggctggagagcagtagagagagccagtacttctgaggtatatgtcaagactttgatcaaagtaggactttgatgaaagacagaaaagcataagccaaagatgactttggggtttgtagcttttgctcttctgggcactggagctacagagagaaaacacatgttcccctcacagaatttactgccctaatgattaaacagatgcacaaaaacaaactaacaaataaaacccctaccaataactgaccatataatgtgtgctttgggtggtcagttaaccctctagactactgatcccatgttgactatgtactaagtgctgtgggaacatgggaaaacaagcatttaagtctaccagagggagtagaggaaggtttcacagaggagatgtgtattagtcagggttctctagagggatagttcaaataggacagatgtatatatgaaagggagtttactaaggagtattgactcacatgatcacaaggtgaagtcccacaataggctgtctgcaagctgagagcaaggaagccagtctgagtcccaaaacctcaaaggttggaaagccaatagtgcagccttcagtctgtggctgaaggcccaagagccactggcaaatcactggtgtaagtccaagagtccaaaagctgaagaacttggagtcctatgttcaaggacaggaagcatccagcatgggagaaagatgaaggccagaagactcagcaagtctgctctttccactttttttctgcctgctttattctagccatgctggcagctgattagatggtgcccacccaaactgagggtgggtctgcctctcctagtccactgactcaaatgttaatctcctttggcagcaccctcacagacacaccaaggaaaatactttgcatccttccatctaatcaagttgacaatattaaccatcacaaggtgccatctgagcttcaactaaaaaggcgaataggtggttgctagggaaagaagagagcagtgggcgttcattccatggtgagggagtaacatttgcctaggcaagaaagtaatggaaggagatgcattgtaaaggaattagctggtttcccccagtagactgtaagaaggatgaagtcagggggctgtgtgtctcactcagtatcatatctcatctgagtggtaggagagagaacaggagaagcaagcgtggcgtggtaagctgctttacactggggagaggatgtagagacaatgaatctggattgctttttgtaaaagctgagcaggaaaacgaaggaagaaaggagaaagaaggcaggttttgggggaaaataaattgatgtcaaaaatgaaatggatttggaacagttcattatagtactttctgggatttttctagctattgatacagagaagtttccattgtaacctcatattacattttaccacaaccaggacccttggaaaatttgactggcttgtagagtgtggttgctgctgatgggcaggggcagagtagtctatctgactgtagactggcagctgtaacctcagtgctccccctcagttccctacccaatttgttgaaaggggggtagtgggattattttggtgaatatctaagtaatttatccctttgtctaaggtaaattataatttttttgatctttcacactggaggtatttttcaaccttttatttatttagaccatatcctccctctccactccaatactacccatttcctatctcggcgctgtcccctgccccgactgaagtgtagatatttcaaggaaaggagatatgatttttactccaaagaaaaatcttgagaaggattttttaatcatttcccacaatttatattccagaagtcccagttaggaagactacttttttagatgacaattgacaacatgaacagcaaatcgtgacagccacagtggggtcccttttctaaatggtagatttaggttgccagagatgctttgattctggaatcaggcatgtaatttataagaaaagagttaaggacgaaattatagttaataatagaatcagggaatggcttagaaattagctagaacctagaccaacccccttactttacataagaggaagctgacactcaaggagtctaagctgtgtgcccaagttagcatattgaaacaaggtaggcttgcactgagtccccacctggactccctcactgttcaacagatgctacagatgacaggacacagtgccatattctctaattgcttccagggttttctggaatctctctaatctctgcagtgattttctgagctacaggatggcagtaactgtgtcaagtgagtcatgtctggacaataaagttactttaatgattaagtcgcaggagaaaagggagagagattctccaattaggagtcttctgtagcctagaatgcatttccacactgtgtctttatgctgggtctctcccttttgtacagcattggcaggaacttgccatccaaggtgtctgatgtctcaccaggacttattgacacccccaggacctgtcaagctttcctttggaaccgaccatataatgtgtgctttgggtggtcatttaatcctcttgattactgatcccaattctttcctatctgtataacctcctctgaacagcttctccctgcagccctggccccccagggaccccattctctcctgtaccataatctcccatgggtgccactcctgggccacttgtaccgaagtcgactgtcagaagggcctctgggccaccaggccatcctcctggtcaatctttttcctgttctctcagcagccagtccaaactttgcctcaaacccctccccattatctcacctccccacttctcctggaggaagaccatgccccctacttcactgagcagcttttgatcatcgagtgagaacatctcagcttcctggctggcccagacttgctaaccaccatttttacctactatttccttctgccttaggggacaggtgtccctgtcctgtttgcagttagtccacctctctcccgcttcctgggttccttgcccactggtcaaacccttcttccctgtatcttcaaacctctctttctctttattagtcctgccccttaggaggtaaaccctctcatcgtctctcccactaaaagaaacaaacatataagcaaaaccacacacattaaacagcaatccattgtccctaccctccccccactaccatttcctctctttcctacccttccttgtttgcaccccctccatgaagagagccacctgtgctcaggcaccatgccataattcccctgttcatcctgtcgctgcccacttgcagtgacctgatgcctgatagccagactctattattttattagctaacaagtccttcttcacttagaacactacatttgaactgagcttcatgctgaggattcctgggagttaattctttgtggggcagtccctcatgggttaaaagtctcatccagatggattcccagagtgtgtgctgatagcctgtctcctacaccacccagtggctggtagtgactgtgggtgggatgagttgtgggggaagtctgtgatccttggcagatactctctgacttcagtccaaggtctttagaatactattgtgagagtaagacaatctgtcctgagaaccaagccctctaggttttagaatgttgactttaactggcattgcatattttatctcttgctgtgcttcttttctaactagagagtgaaatctttctctctttatatttggatttgaaaatgctctgtgtgtgtgtgtctgtgtgtgtgtgtgtattggggagtagtggtggaaagtggtatggtcatcaaagctgtaaaaagcattttcatttatttttagtatgtttagcccaaactattaattgtgaaaattgaggtgttcaaatctcagacttgtccccctcagagaaagacagacttatgcaaggttatagcacagctcagaggaggctggggggaaataagttccaggtcatactccagcatgttttataaatcagccgatatccctcttcatgaagctctggaataggttcttgaaaagggcctgcatggtagtcaaacatgagggcattataaaactccttgctgcgggctgctccaattcagagcatgaattattcagaagttgttttggaagccctcctgggaacagtggtctactcccctggactggctcccatgaatgaaagagtcccacccacttcttcagacttggcagctgggaatttctttcttgctccactaagtcaacaaaacaacaaaaagcctccaaaacatagatcagtgtcgtcagtttgcctcctggagtcttaacgcagggctcaataattcacgcacttctacatcagtgactgaaagcatgagttaagaatatgaagtggttagaagtgtgtgtgctcatagaattaagtggatgtcaactccatctccttgctttttaaaaattattaattgttcaggagctaagtttgtgaacataagcattatcaaatattatttattttgtaaaagatcagatctttcttttcacctagaattaaagtgaatagatttttctttttctttgttattatcaaaagttgactactgatttcaatatctatttgtacatttttattatattttaaacaggaatggatggccatcaactgcatttttatgattcatattttctcttcagtgactacatcaccattagtatcctgcttactaagtcttcccttttgttctacttaatccagcctattttccttcatagacatgtggaatggggacagggatgaattcccagccagctcagtgaggtatgcactggggccttttttggattttctttccaatctgactttccaagctgcttagctacttcaatcattactacttttcttctctgctatttactactaaaaatagtccagctttacatctccaccaactcacagtttggcctattatgaatgcttctggagacaggaaactcagtgcctcacagacaacacatttatcttcaggtagttttgactgctaaaaagcccaaacttcttgttttctaattttcttctattggtcctgccagggtcatacaaaacatgtttaatcttttttctagaaatttgaaggcccttcatccttcatttcttccctccctctgtctctctctctctctctcatctcaatttctggttagcactctattaatcctcctgattgcttttctctgaggaggcaggagcttaacacatggtacctagaactgaacataatccattgcagataagggaggaatatcatcccatttcatctttatatggcacctttaagatcgtatcagcctatttcgttaattcagcagttatttattaattgcatctcaggtggtagacattgtactgggtgctggaagtatgtataagtgtgatcacagaacaaacagactaccagagtgagagaccaataattgttagctgtaaagtatgatgagtattagtctaggagaagtgcagagtgatgtgggcatacacagtgcgaggacatttcctaactagagggttggggaaggcctccaaaaggaagtgactttaaaggaattaggcaggagattagggggatactagaggtagaggtgggggaaggaggaacaggtaccaacatacgcaaaggtctagaggtgagaaaggaactgaatacagtacaatctgactgaagattagactgtgaatagagggcagagatgaagttggataggtaggcagtgcccaaaccgtggaccccttacaagctaataattaaacatgtgtttgagcacctactatgtactaggtgctgttatgggccctggggttttgctagttatcaaataagaccaaaataagactaaataatccctgccctcttgaaacttatagtttagtggatattaagaagaaaaaaaaaaaaacaaaaacatgctgaataaatgtggactttaaggacagggataagccactgaaagtgttaagtgggggagtgatgtggttagaatcatactctttaaagttaggcatataatttcacccaatggaggcacttttgagaatgaacgggctttattaataattattctgggacaacaggcataaactgggcaaatcaggaaagatgggcactcttcaaatgtggttaaaaaccagagggaagcaagactggaggcagagattggtcattgcagggacccagatgaaagatagccaggactgctaccaagatatgcagtgaggtggaaggaagtgaatggatctgagaagctcttaaaggaaagatctgttcacaataggcaagggacaattaatacagtgtggcaccaaaaaaacctccttccagactgataaagacccagaaaccggtaactgttagacaaagtcattagatctgttacagatttcctgttgtccattatcttgtccacatctcaatcaacatagttaaaatatttgatgaaatttagataggtatacatatggattacattttctaaactgttaatttggcaaacttgttaaaaacaaagaagtaggaggaagttagcctgacacaacttattcacagtgatcatccttttgatcctgggtcactgttttcttccaagtgctggcttgtggttagtgcacagtacatttattaaattcatttaaagaatcttttcctcaacaggtgagggagaaaacaatccattttaagcactgagtttattcctttagtggttggcttgctccaaatataaataatagttcttttcattgttctccatgatttaaacaaaacaaaatgtgtaagttccctttaaatcataacctccttgggaggccgaggtgggtggatcacctgaggtcaggagtttgagaccagcctggccagcatggtgaaaccacatctctactaaaaatacaaaaattagccgggcatgttggtggaagcctgtaatcccagctactcaggaggttgaggcaggaaaattgcttgaccccaggaggtggaggttgcagtgagctgagaccgcgccattgcactccagcctgggcgaaaagagcgaaactccatctcaaaaacaaacaaacaaaaaattataacctcctagagcagcttaacatggggtcattacatgaccattatttctaagtcagtatgttgtgttccactttggccatatgatgcttggcattttcaggacagggtcaaagttctgaaacacctgccatctgtcaagaggagaccagaaagactgtccacaaattagcacaaaccagaaactgctgttggaaaagaagcttagtggtttccctaaggggagtagcatcaccttcacacagaagggagaagctttcttggtccttagccaccatcagtttgtgccttacaaagacagtgctatcgaactgatggtgttctaggttcttaagaggaatgcttataaaaatggttgctgaatgtcaagtgctgtttaaatgcttaattaccagaagtgaacacaaataatgagggagtttgattccctacaaaccagaactgttgttcctgatatgtgaccattagcagagctctgcagtgtcttttattgcacggttctgaggctttgccgttaacaacttattaattgatcagggaagaaaccagtggctgtattagtgctggtgaaatggaagaaagactgagcaacttgcataagataaatcttttactacactgtaaacaatggagtggtggtaagttctcttaaagctgaaaacattactgttatgaaggctctgaaaatggaaaaaaatgagaaaatgattaaagatctttttggggttagaattttttagttttgctggcatgaaaagacttgggcagattttagtactggagggacctgccttattcgttgtgtattccattcatgattgctctttccttgtgtaagaggaagaggagtgactcattatgactcttggttttaatttcagtagattcctgaaggtgcagaactgagtgaacagatcatcctttttaaactcactcaggctgatttcttttgagggatgttatttgttagtttaaatagtagtactgagaagtagaggagtgtatattaaactgtggcaagagaacttcagaaacaggaaaagtaactaagtcctaaaaataaattcttgtcttgttttctgtgactgataaaacatcataagtaagacatatgcaccataaccccaacccctagtgaatatacatgcattttatagagctagaacacacatatgtaaaaagtcaccttaaaatctttctgagaaaaggataggtaaatacataaaatgtacacatgaagactactatttgtttttatttaagtgttaacatgtttgtatgtttgggaggccaaggtaggaggatcacttgaggccaagagttcaagactagcctgggcaacatagtgagacctccatctctacaaaacaaaaacaaaacaaaacaaaaccaaaaaccaaaagaattagctgggcgtgggggtgctcatccgtagtcctagctactcagcaggctgaagctgggggattgcttgagcccagaagtttgaggctgcagagttacgatcattgcactccagcctgggtgacagagcaagaccctgtttctaaataaaataaaatgattctataaaaattggtgacattggtctgcagtagagggaaaaatcatggggagttgaaataggtgagaaaagcttcatgaaaaggtgggattaactgttgttttttgaagaatgatctcataagaggaagttagaaagaggcagggtacctcaaatgtggagactagaaggaactaaggtgtagcttggagtcaaagattccaggtgtagtggggtggagtggaagctccttagggaagccacttacctgatttgaagggtggtttcctcatctgcaagatatgcagattagtactctttcactcctatttctctttctctctctacttctcttttctttcttctctccttctccctcttcctcccttctctccttccttctctttttttttccctacacatatttataagtacctactttattccttaattgtactgtgccctggggatatagaatgctcctacaagggtcagggcctcacagaggagatgaacaaataaactgctgtacagaaggatgcacatggtcctgaggaggctagcttgaggaaggagtggctaacaggttgggaactggggaagacttgttatgcaaatcaaaattgtaaccactttgtaaatactaagtatttattaatgtaatatttttttcttttacttgtgatgcattttttttttgtggcttctgtgactctttgtaaaggagttctgagtcactagttaagattttttataaagaaatacaccattagcaggccgaggaggggatgttttagtttagtgaaacttggaccagtgtcaatttaatgggtcagacgtagtgtttgtaatgggtaagaagtactagtcatccaaatcaaatggccataacaatgaactctgaaaatagttatatattttttaacagagtaaagcttctttatagcaatataattctttaagatcactttttttttttttaatttttggaagctagagacaaagtagaggaactggcaagattcagatttttggaatcaagcattaaattattaattggcaagaatttttctgaaaacactaggaggaggaattaggaaccccacaagcaaaataacattaccttggaagaatgaatggtatattcagttttacctctacatctttttgttgctctgtgtgtgtgtgtgtgtgtgtgtgtgtgtattcacatgtgcttgtgtgtctgagagagagaggagagagaaaaagaaagagagcgagcgagcattatgggatttgggtagttttggaaactttcttttgagaatactgagaatgattgggggaaattaagtgagtggttgaagtgctattgctaattgttgcttgttttaggaaaagatgatgtcagacacaatccttggtagaaattttgagagaatttttgatgtttcagagtctgacggttctagctctttataatataaatttcatttcaaaatttatggcttttttgggggggtggggtataagtgtaactgcctaagggattcaccttgcctgctgcctagacagagccgattcatcaggacaggggaactgtaatagaaaaagagtaattcacacagagccagctgtgcgggagaccagagttttattattactcaaatcagtctccctgagcatttggggagcagagtttttaaggataacttggtgggtgggggaagccagtgttccaggagagccgattggtcagagatgaaatcatagggagttagagctgtcttcttgtgctgaatcatttcctgggtgggggtccagaagatcagatgagccagtttattgatctgggtggtgccagctgatccatcaagtgcaggggctgcaaaatatctcaagcactgatcttaggtgcagtttagggagggtcggaatcttgtagcctccagctgcatgactcctaaaccataatttttaatcttctggctaatgtgagtcctacaaaggcaatctagtccccaggcaagaaggaggtctgctttgggaaagggctgttactgtctttgtttaaactgtaaactaagtttctcccgaagttagttcagcctatgcccaggaatcaacaaggacagcttggagattagaagcaagatgcagtcagttaagttagatctctttcactgtctgtcataattttgcaaaggcggttccataaggtcatttttagcacttctagaaatagaccaagcattagctaattgtcagtgaacttctcctcacacgtaaaagtctttataggaagaaaaacccttactccataattatagaagacagatttgaaatgtatgtaacccatttggattaaatacaacagctgatatacttatccctggttaaagatgagcgatagtaaaaacccctggcgtatggaacagaggacagacagattgccactgagcaaagtaaaaaggcccagagacagcaacttaaaactttgcgtaaggaatagcatacttcttagtctggtgttcagtttaattcagagacatattgaggacctagaatgtgttgggatatgctgggtattgtgtatacaaagactgggagatagtcatcaaggagcagctagtgcagttgggaaaaacacatacgtaagtattaatcacagctcaacacggtaagtgctacaatgcaattgagagagagagaggcagagagacaaagaatgaatatcaatcagttaactttgtccggggagtcatcccagaggagatgctgctgctgttaaaaatgattagacatttgccagacagaaaaataatgaaaggctcttccaggcaaagatagaaggatgacaaaggcttagccacaaaaaagtctataaggcattaaggggatgttgattcattccatttggttagaacatagggtcaaatcagtaggaggatggaaggctggagtggtagattggagccaagttgtgaagggcctacttaaggtatttggatgctaccctgtagacaacccggagccttcatagttttactcctccttccccaacattttattatgaacagttttaaagtatagattttatttttaaataaaatggaaagaattctacaatcagtactagtataactaccattagattgtactattaacattttgctaaacttgtttaatcacctatctatccctttataatccatcaattcattttattttttatacatttcaaaacagattgtacgtttcagttcattcctctctaaatacttcagcatgactatcattaactagtgttcattgtttgtttaaggtatttgatagaaaaattataatctttgtaggttttaagatatgaaaataagataatcaattttgtatttaagaaacatcatagtgtggaggatcaactggaagagtgaaacaaattagaaacctatttcataaatctaaatgagaggtgataagaatgtgatgaaagcctgtagtaggaatgaaacagtactaatcaattcaagaaataatctggaaatggaatcagtggatcagttgatcacccaaatgtggggagggaagtagtggaggcaaaggcagggttgagagaatagaaaaagtaaaaaatgaattcaaggttttctagctttgacgactgggtgtttgataatgggacacataatacagaagggaaaagaagtatggaagtacactacaacagaagatactatgtgcagttttgaacatgataagctcaaagtacctgtaggacatttcaggtacacatgttcaggtgttgtttggaagtactctctggaattttagagaaatatcagggctgggtttgtagatatggagtgtatcaggctagggaattgaagctatcactaaaggagaacatttagagtaagcaaaaaaaaaaaaagtggctaaaggaattctaaggaaagcctatatttaaggaacctgaagaaaatgctgtgtcaattaaggaagcagaggggattattcaaaaggcaggaaagggaatcaccccagatggaaagataaataacatttattatttgtcaggtatgataagtagtttatattcatgggctcatcgaatccttcctgttaacaaccctattttataggtatgcaaataaggaaaatcagggaaagaaaaataatttgctgaaggtcttaagattagtaagtgagtggcagagcagattttgagccaaagtcattcagacttgccttaacatagtggctaaggaaagggagtttccaggagagagtagtcagcaggtcacagtcatccgtgatatgactctaacttacctttccaactttgtcttcttcacttacttaagattggtcaatttaaaatgctccatattttctgcacaagctcaaactgtactaggacttccaaagtattttgtagatcactagttccatgagatgctctgaaaaaaagtgtactgtagtcaaatgaatttgagaaatgttgccaactctactatcctcttggaaatttgcgagttaaattagctcatcaaaggtattgggaagtcctacagtaaagaacctattctaacttgtctaccaagtgttttccaaagttatttgaacttatttgaccttggggcaccccccactcccttagaaaatctataaacttcccctcagaactagggttctgaaacacttcaacgaaaattagtttttacttttccttagttgcttttaagtgagatataataagctttatctgtgtcttattcgtggtggtcatagactacatcctcccctgcaatatcattatttgtgccctgtagtagccctcctgtggccccaggaaaatggagtctacgtctgtttcattttgggttcttacataggacctattgcagtgcctttcatataataaatgtttggtcagtgtctattgaataaataaacaaaatggataaaacacagagaaaattaatacttattcttttaaataaaactaagttctctattaaaaccagacaaaagaactatctgtttcaaaatgtggatgtaaagttatactcaaaccaggctttcatctgagaataagaagggtatatgtttgcagtttcttttttctttttttgacagagtatcactctgttgcccaggctggagtgcagtggcgccatctcggctcactacaacttccgcctcctggattcaagtgattctcctgcctcagcctcctgagtagctgggattacaggtgcccaccatcatgactggcaaatttttgtatttttagtagagatggggtttcgccatgttggccaggctggtcttactcctgaccgcatgtgatccgcccacctcagcctcccaaagtgctgggattacaggcatgagccaccgcgcccagcctgcaggttttgttttcatttgaactgtttgcttttgggtttaggtgaggagtaaattgaggaaggcaacattttggttatttctgtcatgactgcatatggaatataccagtaggtcctggaaacatcacttttcctaagtggttctggtcttgtcttataatttaaagtcggacttggatttcctaactaaatcagtgcctatctatgcgtaccctttgaacctttcttactggtttgatgcaattatttctctcgctcattctagcttactattggcagcagttccactagtttcattatttcaactgtgaggccttatatggaatttaatcaaatgtgatgttgtgtctgatctttgtctcctttgaactgtataacacattcagccatgtcctcttttgtttttcccatgagaatagaagagagccttctctgacaacctcccacatttttttttgtttgcatcatgtggctcgtcactcccatgtggaaatgtgcatatatgtacgtgcatgagagagagagagagagagaagccagggtgccatgctgagagaaaggccagctatgagtacagtcacaggagtgtggagattcctagaaaagggctgcccatttgggtaaaaatcactgctttcctcctacacagacatcagccacacctgtgttcaagtttcatttgactatttgttagctgggtgccctacttctggagaacaccagaatcttgtgagttcagagggctctgtaggagttttattaacttacaatacttgtttaagagcccctgagtaatcataattattattttagaatgagtctgagatttttttatggagaagataaactgtacttggagtatattttcttgttttcacagtctcttcaatgccatgaagagtaagttatttgaatttgcatatgttaaggtggtggtggtggtatattgaaaattatgcagagaggcagtagacatggtgaatacttatactgaaaattctaaacttattaaattatttgcatttggggagagaaagagagtcttgagaatcagatctggctgtgtatactaaaagaacattatgctctaaagagtaactctcaaaatttttcatagtgacattatggtatgtaattaaaatggcaatattttgcatggtatgacaaaacctaattgtcatggctgccatattatatagggaaaaaactaacatttagcatcactataataatactgaaatatttagagcaagtattagattttgttctaaaataaacaactattattatgtcattgaaatggaaagtgttgcaaagggaagaaatacactttggctgaatacatggaaaatgctggtggtattcattaagcatggaataataagaggaacaaaatttccatctccatcccttcccccatgaaatatcttatgtgtgttcagagctccctttgaagtccatatatgatctttgctttaatccatttttaaagcttcctttgaagtcagtgggagctcatttctggaagagaggaaagtggctgaggactgggtacctgctggggaagagggaccagcctaatcataacaggaaataatatttattgattgtcctcatgtgcatgatctattaggctgcacaccaaagtgactttcaaactggtttgatttattttctagtgttacaaagctattaagatgaccaaaactagtaactgctttttaggatagtattttttgtttcaaatagctggggaaaaataatacttataaatggaaatacttttattttgacactctcacagacatctcatctatgtgaattttccggataactgaaactaatacttatctaatagagcaatgagcaatttctttaaggacaattgaagagtgtaggattcttttctgtctttcttccttttttttttttttttgagaccgaatttcactcttgtcacccaggctagagtgcagtggtgcggtcttggttcactgcaacctccgcctcctgggttcaagcgattctcctgcctcagcctctggagttgctgggattacgggcatgcaccaccacgcctggctactttttttgtatttttagtagagacagggtttcaccatgttggccaggctggtctcaaactcctgacctcaggtgatccgcccccttggcctcccaaagtgctgagattacaggtgtgagccactgcgcccagccatgagtgtaagattattttcttcagtatgaaattacttcagactacttagttttttaaagaaaatctcattaaatactttggagcaaggtagaaagctattttcatttttcctgtgtcttctttgctgctgtcaaccgtcctctgtaatacaggttctctgtttctattctgctgtcttattttacacagagttgcctgaggaagagccaggaagcctgagatagatgtatacttttacatcagagtaaagtataaagactgtttcttctctcatttcctttttctctccccatatctcattctgctcctcacttcctgtccctcctctccttgggcttcctgcttcttttcctttcccctttgatcctctttaatgatgtcagcccctcctatgagagggtgtctccatcattgtttggtatgtagactttggtcataggcttgagctccgtatctctgactggatcttgacctggatgcctctcagaacctcaaactcaacactttagaactgagctcagcaactcctgccaagaacattatttttagtctctaggtatgatatcaccttccatctagcttccatctagcctgataatctgtgaattgccattgacaatgtctcctccctatcactccacctctaatcgtgtatcaaaccctgtcacatctgccttagaaattcacaatcagcccatcttttctactcctctctgtctctgtctcatctagtcacttatcacatcttggagatgaccacagctgccttctctctggctacttccttatataaatttgtctttacaatgttgcaaattttcttcttcacacttgaagctctccatgtcattctcagactgaagaaacccatttgtctctgctgagcatctaaagacttttactatctgatttgaatctctagctccttttctatcctgtgagcctattgctcctggcattgaaaatgcacttggcaaatgtctgtgtatccttcaagactagagggattatcctttctatgaaggcttccctagtgtcttcaggcagtaacttccccttttctgagttcccaccggccccccgttctttccttacttgtagtacatgatcgagcgacctgtggtaaattgtttttatgtgtctcttgcaccagaatgaaagctcctagagacaacattttatagtttatttatctctcactctccctgccagtgcctacctcagatcaggtacaaactagcaaatgtttggtgagtgactgaataaatgaatgaagattttgaaaggtcttttctacttacatttgggcttgaagttgtgttttatgttatcaaagtcggtggttcagacattagtaaaatattttaaaacagattcttccttcaagaggcatatagacagaaaagctataaaatttctgcctctcataagggaaagcaatcccaacacacagaaggatagaaagtgctggtccttattgatttccccaagcctctgtaccacctccagaattatttgctgctagagtcctgtcacgtgagaaaagcaacttgctaccattaaaaccacttgtagtcagttatagagagcaaccatctgctttagaacttcgacttctcaagatttctcagatttcagtgaatatttcacttaagaccctcttacaaaagagttttttttttccttagtgtttttagcaggccttatacataaaacaaatctccaaagtcctatttttaaaaatgacaattcagtggaagaaacatgccctcagagcacctagtctatggtaggaataagacaaatttaaagatacgtattaatagaaaatatcggctgggcatggtagctcatgcctgtaatcctagcactttgtgaggctgatgggggcagatcacttgaggccaagagttcgagaccagcctgggcaacatggtgaaaccctgtctctactaaaagtacaaaaaaatttagctgggcctggtggcacacgcgtgtaatcccagctactcgggaggctaaggcaggagaagtgcttgaacctgggaggcagaagttgcagtgagccaagattgcacctccacactccagcctgggtgacagagtgagaccccatctcaaataaaaaaaaaaatcagtaaggtcttcttatgatatttatggagatattcatatttacttatgaagagaaacttggttctagtttcagtgaagtttctgggtagtggtagagatagaaaactatcttttgagttaatttaaaaactaactgagagcatatgactttattcaatcaacatataaagtaaaagtatactttggttccactgtttgggccattaaaggaaaggaaaagaaaaataagactaagatctggaggtagagcagtgggggaactaggagacagtgaagtttacattagagagaaagaatgggaggaagagaagaggaggaagagatcaacatcttctgcttttttggccattcctttagttacccctattcctccataaaccttctattttagttctctgcttcattgtccctccttttcttctaacttacctcatctggccccaaaccctcctctaatgacttgtgtacccaaggctcctcacattcttcctttggtttttaaccagtgtctctcctcacctccatcctcaaaccctcacctgcctcaggtccaaagtactactcactgtatgatctcgtctcttccctctcttttcctagatgaatgaaaatttcggcctgttcatttccagtttggtggagtcctgacttatcttacctttggtgtgttacttaactttctgggcctcagtaatcttatctgtgaaaaggggattagtaataccttacaagattgtgagtcacctagcaggtccttagcaaacattggtttccctttctgtcttttctttttgctgctgtttccattccttcacttctctgctgatactagtgctttttggtcctctcatcagttaagccatctgctgggaatttgtctctggaattctgcttggagcctacccctctgtctgagagtaagatttcagagggagcctctgaattgaggacatttctgtaccagcatcagagtgggacatcataggttcaagtcctggtcccaccatgttctcactgtgtgagcgctgggcgggttgcacactgtctttgaggcttagtttccttgtctatcatttgaagataataatgatttctactgcatagggttataataaggattaagtgagctacttcatgaaaatgtttagtagaatgcccagcacattgtaagtgctcaataaatgttagctatcattggcagatacttcaatttagaaaatttgttgagtgctttgtgcccagtgacatgatgtccttatgcttttcatcttttcatctcagaatgaaaaattggcaggattcaagtgccagttacagtggcatgtccagagaaaattcttgagagatgcttgctgggttttactgcctgtggtagatggggagtgtggaagtgtataccagctttgtttttcatgggaaagaaactgtaccaataggagtaaactgtggtacaggggaaggatgcagtgatttggatgtggttgcctggaataggagagatgtggtagcagctgggctgaggagagtgggcccgcaaagagtgctgctgccaccacctgcacaccattggtatctccaccagccttaccctctggacactagcttcaaaattcctatatcaccagagccctacaacccctggtttaaaaaaattactgcttcagaaagattatgcttcattctagaattagagatagaattttgaggttctaatcaggagggcagattttatgtgtgtgtgtgtgtgtgtgtgtgtgtgtgtgtgtgtttctgtcccagtgaaaagtaatgagagaagctgaagatgaaactacttcaaaatataagcaaaatatttagttgtgtaaaagaagaattgtgttaaaataactttaaaagaatatcttttatttaactgtttgtcaaaaatagtatatcatatacttgccacagtaatagatcaaggctttttaatagaaaacaagacaggactgtacctgtcatgactgtaccatgtcatttcctaatctagtctgaaaaagtgggtgaattatctttcaaagaactgtattattttctagaatgactgcagtctctgaaacctgtaacgtgtcacatactctgaggctgagacaaaatatctgaatttggcccatcccagaaaattcagtatgcttgccttagtgacattacagtggagttacatcatgtgatgtaacatatataaattcaactgggagcatttggaaagaaatttaaatatcatgagtaattctgcatatcaatttactcaataagcccaggcctgctctgggagctccctggggatggggagcatacatttgcttttccttggttgatctcagttttcttgggcctctccttgtgggagcatctccctgaactcaaggtaattctggtgtttaaacatggctcctgagtgcaagccaacttttgcttaactcaagaaacggtcatcatctgttccaatcctagaggaaaacagcattactgagaggccaagtatcaatctctcatgcggcactttgctaatggatttcaaagtgagcatctttgaccatatctgctgccttgagaacttaaagttctgatgaacactccagtgttctctgcttttgccattgtgcatgtaagtgaccaagggtaggctgttaatggactggttcatgacgcacaaacagccaccagtaatgtgatgtacagtgctggaattaggagcacctgattaagagttagcactctgctaactaaaggcttacgtttggtaaatgctatgatggcgcaaaatcccttaactgttgaaatgaggctataggcccaagaggaatgaatctttggtcagtgtgttcccttcttgctagaataatgggaggagggctttctttctttactcggtaaattttcgtgataccggagcaataggtaaagtctctagggtaaagattctgtgtcttacattgccctaatctgcagagtattcaggatgatcttaagaccactagaaaaattctcatgagggagtgggggctaaaatgtgggaaattctaaagttgtcacatgttttgttgttgcttagtcatgtgaggaggagagaagcaaaggatagctgataatggctacctacaagaagtcatagaatcatagaattttggtaacagaggggacctcaatgccatttcttgagttttagaggagaaatgatttgtttaatacgtggcagagctaagaccagaacctcagtttcctagcctcaggctggtgtttacttgtgttatttcagtgtctctgatgcattggtttaataggaactggtttatcctgctttgtgggggttcagctccacccttcaatgagctccctgaaaagaacaaagtccacattattgttacttgttttggttttagggggcatgattgtcactggcaaggtgtgaagtgtacgtaaattctgaaaacattttgtgctcatatatgcaggggtggggagagattaaaatggggtctgttagggtgggtggagggatatggatgatgcctataatgaaagctccagttgcaaaaattgattcaacttatggtaatgggtgctgatggaattaatggggttttatgaatattccatgctttgatctgcttggcattagggagatctgcaaggagcaaatttgaaatgataaaaagctctagactacttttttggtgcttcacctgtcatgatgctgtcgctggtcttgcttggccttcaccttcaataagaaacgagatcttgcctcatgacactctgaaaaaaaaaaagggtagatgtaagagacattttttttagagagaaaagccgcatccattatgcagattggaagcatttacttaaatgtttactctgattcaagctttgaagccccagaattcaggtcccatagccataaaaggagaggaattcttcccctttatcttttgatggcattggtttgaacagaagttctgtttttactaaggttgttattttttatttgcaactaaatgtctctgttttttatttttatttctttttttttttttaatttccacaggttattggggaacaggtagtgtttggatacatgagtaagttctttagtggtaatttgtgagattttgttgcacccatcaccctagcagtatacactgcaccctatttgtagtcttttatccctcacccccttcccaccctttcccccgagtccccaaagtccattgtgtcattcttatgcctttgcatcgtcatagctttgcactcacttatgagtgagaacatacaatgttttgttttccattcctgagttacttcacttagaattatagcctccaatctcatccaggttgctacgaatgccattaattcattcctttttatggctgagtagtattcatcatatatatatgagatatatgtatatcatatatgatatatcgtattcctatatatggtgatatatatagtattcatcatatatatgatatatatcttacacatatatcatatatatcacagttcatatatattgtacatgtagtcatatattatagttcatatattatatattatacatatattcatatatacagttcatatattatatataatacatatattcatcatatgtatctatatctatatctatctatctatctacatctcacagtttctttatttgggttggtttcacgtttctgcaaagtatcattttcatataaagacttcttttcctctgggtagatacccagtagtgggattgctggatcaaatggtagttctacttttagttctttaaggagtctccacactgtttttcagagtggttgtgctagtttacattcccaccagcagtgtagaagtgttccctgttcaccacatccatgccaacatctattatttttttatttttaaattatggccattctagcaggagtaaagtggtaacgcattgtggttttgatttgcatttccctgatcattagtgatgttgagcactttttcatgtttgttggccatttgtatgtctgcttttgataattgtctcttcgtatccttagcccactttttaataggattgtttctttttttcttactgatttgttagagttcattgtagattctggatattagtccacagtcagatgtacagattgtgaagatttttttcccattcttgggttgttcgtttactctgctgactgtttcttttgccatgcaaaagctctttagtttaattaagtcccagctatttatctttgtttttattgcatttgcttttgggttcttggtcatgaaatccttgcctaagccaatgtctagaagggtttttctaatgttatcttctagaatttttatagtttcaggtcttagattgaagtccttaatccatctttagttggtttttgtgtaagggaagagatgaggatccagtttcattctcctactcgtggctagccaattaccccagcaccatttgttgaaaacggtgtcctttccccactttatgtttttgtttgatttgtggaagatcagttggctgtaagtatttgggtttatttatggattctctattctgttccattagtgtatgtgctgatttttataccagtaccatgttgttttggtgactatggccttacagtgtagtttgaaatcaggtaatgtgatgcctccagctattgtaaaaggagttgagttcttgagtttattctcagcttggtcgctgttggtgtatagaagagctactgatttgtgtacgttaattttgtttctgaaaactgtgctgaattattttatcagttctaggaactttctggaggaatctttaggattttctagataaatgatcatatcatcagcaaacagtgacagtctgacttcctctttaccaacttggatgctatttatttctttcttttgtctgattgctctggctaggacttccagtactatgttgaagagaagtgatgagagtaggcattcttgtcttgttccagttctcagagggaatgctttcaacttttccccattcagtattatgtttgctgtgggtttgtcatcgatggcttttattatatttattatatttatcattttttattttattattatannnnnnnnnnnnnnnnnnnngtttaatgctttttctgcatctattgagacgatcatgtgatttttgtttttaattctgtttatgtggtgtatcacatttattgacttgcatatgttaaaccatccctgcatccctggcatgaaacccacttgatcatgttggattttctttttgagatgttgttggattcagttagctagtattttgttaaggattgtagcatctatgttcatcagggctattggtctgtagtttttttttttttttagttatgtcttttcctggttttggtattagggtgatactggcttcatagaatgatttagggagggttccctctttttctatcttgtggaatagtgtcaataggattggtaccagttcttctttgaatgtctggtagaattctgctgtgaatccatctggtcctggatttttttgttggtaatttttaaattaccatttcaatctcgctgcttgttattggtctgtttagggtatctaactcttcctgatttaagctaggagggttgtagctttccaggaatttatccatctcttctaggttttctagtttatgtgcataaaggtgttcatagtagccttgaatgatcttttgtatttctgtggtgtcagtcgtaatatctcccattttatttcttattgagtttatttggattttctctcttcttttcttggttaatcttgctaatggtctattaattttatttgtgttttcaaagaaccagcttttcatttcatttatcttttgtatttttgttgttgttgttgtttgtttgtttcaatttcatttagttctgctctgatcttggttatttcctttcttctgctgggtttgggtttagtttgttcttgtttctctagttctttgaggtctagattgtctgtgctctttcagactttttgatgtaggtgtttagggctatgaactttcctcttaacactgcctttgctatgacccagaggtttggtaggttgtgtcactattgtcattcagtttgaagaatttttaaattttcatgttgatttcatttttgatccaatgatcactcaggagcaggttacttaacttccatgtatttgcatggttttgaaggttccttttggagttgatttccagttttattccactgtggtctgagagagagtgcttggtataatttcaattttattaaatttattgaggcttgttttgtgacctatcatatggtctatattggagaaagttccatgcactgttgaatagaatgtatattctgcggttgttggatggaatgttctgtatatatctgttaagtccatttgttccagggtatagtttaaatcaattgtttctttgttgattttctgtcttgatgactgtctagtgctgtcagtggagtactgaggtcccccactattactgtgttgctgtctatctcatttcttaggtctgttagtaattgttttataaatttgggagctccagtgttaggtgtgtatgtgtttagaattgtgatatcaaggccttttatcatcatataatgtccctctttgtcttttttaactgctgttgctttaaagtttgttttgtctgatacaagaatagctactcctacttgcttttggtgtccatttgcctgaaatgtctttttccacccctttaccttaagtttgtgcgagtccttatgtgttaggtgagtctcttgaaggcagcagattgttggttggtgaattcttatccaatctgcaagtctgtatcttttaagtggagcatttaggccatttacattcaatgttagtattgagatgtgaggtaccattctattcatcctgctatttgttgcttgtataccttgttttttttttagttgtatttttgttttataggtcctgtgagatttatgctttaaagaagttcttttttgctgtgtttccaggatttgtttcaagatttggagctccttttggcagttcttgtagtggtggttggtattggtgaattctctcagcatttgtttgtctgaaaatgactgtatctttccttcatatatgaagcttagtttcattggatataaaatttttggctgataattgttttgtctgaggaggctgaagatagggtccccatcccttctagcttgtagggtttctgctgataaatctgctgttaatccgataggttttccgttataggttacctggtgcttttgtctcacagctcttaagattctttcctttgtcttaactttagataacctgaagacaatgtacctaggcaataatattttggcgatgaatttcccgtgtgttcttggtgcttcttgtatttggatgtgtgggtctctagcaaggccagggaagttttccttgattattcccccagatatgttttccaaacttttagatttctcttctttctcaggaacatcaattattcttaggtttggtcatttaacataatcccagacttcttggaggctttattcatattttcttattcttttttctttgtctctgttggattgggttagtttgaatacgttgtcttcgagctctgaatttctttcttcctcttgttcatttatgttgctgagactttccagagcattttgcatttctagaagtgtgtccattgtttcctgaagtttttgttgtttcttatttatggtatctattttcttgaatatttctcccttcacttcttgcagcattttttggatttccttacattgggcttcacctttctctggcacctccctgattagcttaataactaacctcctgaattctttttcaggtaaatcagggatttctttttgatttgggtccattgctggtgagctagtgtgattttttggaggtgttaaagaactttgtttagtcatattactagagttggttttctggttcattctcatttgggtaggctctgtcagagggaaggtctagggctgaaggctgttgtttagattcttttgtcccacagtgtgttcccttgatgtagtactctcccccttttcctatggatgtggcttcctgagggctgagttgtagtgagtgttatctctcttctggatctagccagccagcaagtctaccaggttctgggctggtactgggggttgtctgcacagagtcctgtgatgtgaaccatctgtgggtctctcagctgtggaaaccagcacagtatttgaagtgtctcctgggtcctgcaggagcaatgtgttgccttcagggggtatgtgggtcctctcaggtttcctgatttattcctgaagttgttctggagcaaaaattcacgacgcaagcctccatatgctgctctgtccatccaagtcagagctgcaatctagtcctgcctcctgtccgccatgatcccccaagaatctagttgtctctgttttttaaacgttgcatttgctactaatgtagcatgtgcctcacccagcaggaaaatatcttatttaggtaccagtgcaggctgcttctctgtaatacgggtacaggacctacagttgttccctgagacccagatgtcactcctcaatgacacaagaccaggtgctttaataggaactttgttaaaagcagttgagagattaagtgcaaagaacctcagattgttcaatgtcagcttaaagcaaatagcagataacatgcaacagcattctcatgttcaatctctagtgcctcctgatttggaagttgcaaaattccttggctggagtgtctctgcgcttgtcttatttagatgtttttctctgatgtcttggtcttgagtcttcagctttttcccctcccaggcttttattaccaactgggaaatcttgcagtgtcttcaacagcagtagctggaagttcatatcctttttggctctagttatctctgttcctacatgtttctaaacaaatatgtgaaaatccagcatattaagaggtttgctttccttcaaagcatattctttggaatcagctcttccctgaccattgggcagttgagagagcagctctatggtccacctggactctggttgggcggtttctcatggttaacaccatctccctcggtgctgttgtggtgatagtgagctctcttgagatctggttgtttgatgaaagtgtgtggaacctctaaccccactgccttgcttctgttctggccatgtaagacgtgactgctacccctttgcatcttctgccatgattgtaagtttactgatgctccccagaagcagaagccactatgtttcttgtacagcctgtagaactatgaatcaattaaagctcttttctttatatattacccagtctcagatatttctttatagcagtgtgagaatggactaatatgggagggaaaaagtggaggggaatggaaatggagaagagatgaagtgggagtgagtcttatcttaatatatctttttatatacttctgacttttagaaccatgttaatatttcacttacttaaaaaaaaatcatccaggatttggggaaacccaaagtggaaaacaactagtaataaatgaacctaactatcacacatgaataatataacaacagtgaatgggatagtgaaggaaataattaagtaactttggaaaacagtttttgattatatattacaaggtgaaagaattgcacacaatgttctttagttaatagcttgtttttcacagggttagcaattttgaaattatgtgtcctttagagcaattaagtaaatatattgcagtaaataatataatgaaaactaagtacattgtcagaggaagaaagtacaaataagggaagaaggaaggctggaatgacctctgtgatggattagaattggaggtgtgaatatgaactcatggtttctaatatatacacacaaatataaagaaatagatacaaatgcttgtgtatgcatggctttagtatacatacatatattttccagttctgtccgctgagagtcctagaaacagtgaaagcccagtagccatgagcactcctagctaagatcttggtttctaaataccttttccaaataaagggaactttagctcctcaaagaaatggctgattccaggactgaggctgagaaagtataagatgaccctagagcatcttattacaccagaaactacagctgtgctcaagaaatgtttgggatgtgtcaagtagatataggagcccagttaaaagagcaaccactggccaaattgaaaacaaatttgagccacaaaataagttatgatagtaatgaattataattcatagactgaaataaatatccatgagtttgtagggttaaaattaataaataaactgggagaatggagatctcttcttatagtagaactctaacaaatgttgaagaaattatggaaatagaaaaatcaccatttattattttttaatttttaatttttttcttctgtatattaccctcaaaactgccaaccatttattaaatactataataataatagttatagcaagaatcatcactggttgctaaaacaattggatgaaagtatttgcataatctcaaaatatagctctacaaaatgcctagtaatttcaaagagaaatacagtaactttatgttggataagcctggcagacaccccataaccaagtgaccaaagttaacattatcaatattaagacatactgacatgtttgccttgataaactgaaaagggtatttaatatcattaaatgacagtcttgccaaaaatgcataacctgattttaatcatgagcaaagatcaaacaaacccaaatagaggaacactctataaaataacaggctggtacacttcaaaactgtcatggtcataaaagacaaagactgaagaactgtcttggattggggcagactaaggaagcgtgacaaataaatgcagggaatgaccctgaatagatcctggaccagaaaaagcatattagtgggacaaatggcaaactctgaataagatttgtagatgagttcataatatttcatctgtgtttattttctggttttgacaagtactgtggttgtataagatgttgcattcagggaagctaggtgaagagtttactggactttcttgtctattttgcaactcttttgtaactcaaaatgaaaagttaaaatttaaaaaaattaagaagaaaaattataatggggagagatttaagggcaaatacaggttctagttatcttcttggctattattatttttggacacgaccaataataatagagaagaaagtactctttttctaaagagatacatacatttgtaaacacttcaggtttgtcatgtatttgaagttatttgttttaattccaactggcaaatttgaatataagtaaataatagaattaggggtagaaattaaatggaaagaaatgaaaagaaatcacacagcaaattttgaccttcaacttggttcccctgactttaattatgacatatttaaaatcaataataatcatcaaatgctctcacctacagagtcatgttaaatgattacacataatatagtgcatgaattctgcctttttgagtatgaaattgacaactggcattatacattcattaaagtgagatctgagtagaatattaaattgaaagctatttggtagttctctttcaggaggagtttttctgatgctcttcttccaagggacattttctgctaccatcatcaaaaaaattgattgaacatccatgatgtgttgagtgtcactcacaagagatatgttctctgattgcttgactcaaatgctttatgcttccaaagatttaagattccaaaggagcctggcaagtatggttataactttagggagataaaggtccaaaactggagccatagggtggagtagagtacgacctgtggtcttgtacttctacaaggtgagatggaacatcagtgtcagagtctcaaaaagaataaaataaaaaatgtggggatgccgatgcacgtgacaaatagaccaaagaacaatcaaggttacctactctgagagaaatttatattcacatcagttcgtagttctctttccctttctcttctctatgcctaaatgtacacacacatgtatagacactcatacagttacttctgaacttggctgtgctgcatttgtttgttgcatgtgtctgtttttactggggtgacctttggttcctttcctagtcagcaaaaacatgtagttttaccgtgatttttggttatatcattaagatggagaagtagttcctgacctgtagctatgagtttagttttatattaagcgctatatatttgccattcttagaaactaaaggaaaaggaggaaaatatctctgcaaaattatggggcaaaacaaattgtgcgtgtaaataattgtgtctgctaaatagcatcactgagtggatcctgaaacatttcagggccaccttggtttccttctcaggggccttggttaccacaatttaggagttaacttcaggaattaagtagtaatatggcgttatcccaaagctgccctcctagccttttcccactgggcctttagaccctgctcatcccatgtatacaataatgggaaacccaggaatatgttcagttccaagcaggctaaatataactccatcttctttctctttcacctctgaaagcacatgagaatgcagaggataataacaagattatagtgataaccttgaacctgctctaagttattaataacttagagaacctgctctgaattatttgtataatatattctagtactttatcattagtagcaagttactttcaacacatctcataacaggtagatacagcccttgagcccccacaagaaagtgaggcacagtgccccattttcacattgccgtctcactgggatactgagggtgaagttaaccctcagaagagggcagaattaatggaatttgggggaaatcaagccagggctggtagattaggtcaaccatagaactcgcccttatgctagttttccagttacatgagtcaataaatgttctcactttttaagctagaaagaacatcctgctctgggacagttacctgctttgttatccagaagtaatcttatgttgtttatgccttgttttctatgttgatgtctaaggattatctaaaaacttacacttatttttccccctatttatccctcaaaactttcctgggttaccacctccatcccttatacctcagatggagttcattactttggcatttgtaacatatatatagtgtgggcatacttctattattgcccactgcatattgcattatgtccatttgttcatgtgtctgtccctactactccatgagtcctagagatgaggacccactgttatttatcattagatattctttgcttaacactgtgcctggcttagaattgctgctatacttaatgtctggtaatctatggaaatagttctaggatacattatttgtgagagaaatatgtcattaatgatctataatgtgtatatatatatatcagtgaagaaatgatcaaaagactgctactatttaatttaaaattaaattgtttcagggtgggagaagagggagaatgatgggaggagaaagaaaaaggaaatagtttttccttttcacttacttgagtttgcttgtgaaatatgataaatttcactccagactgattgcaattcaatgctgaggggtttgtggtcatggcttgccagcctcatggtgtttagctttcactgccatgtcaagagcagatgacttcctttcctaaaagcatgtccttggaaactcattaagaaactcattaactttggggttgtctacctatcagtcattcctcctttctccttcctaactgaaccctgactttcttttgccatctaccccatttctacatggagcaggtgcctctgcaggtggactccacccctagatgctggtatggacctgattgatcaatcccatccttcctgccagtgatcagttcaggaatgtgtatgtgctgctgtttgggctagtgataaaacaggaaaggaaaggtgtgttggggagttctgggaaagttttcccttactcttttgtgagagtttccagaagtaagctctctctctctctttctctggaggcttttgtatgcagatgtgagactgagctgcccttgccatctcactgggagcctgagggtgaagttaaccctcagaagagggcagaattaatggaatttgggggaaatcaagccagggctggtagattaggtcaaccatagaactcacccttatgctggttttccagttacatgagtcaataaatgttctcactttttaagctagtttgataagtgtctgctgtgacttgcagcctaaagtgttctaacttattaacaaacaaacagacaaacaaaaacacttctctaatgttgaataggtggaaagtggaaactagggccagtgaaagacaatttggcaggtaggagaacaaaaaagtagtttccttagaccagtgcttattgaaacacaaatttctgggactcagtcccagagcttccaattcagtagctctggagaaggcctgagaatttgcatgtttaaaaagttccacaatggtgctgttgctactggtccaaggaccacactttgagaaccactaccttagacttccaagcatgctgccttttatgccaggatagccaagggtggtgggcaaggccatggtgccaagaagtgagctctagctattcattggaacagccattgggcccctcaaagcaggttgagtaggtaaacccacataatggtacagaagttatcaaaacactttttattgtcttttttttttttttttttgagatggggtcttactttgtcacccaggctggagtgcagtagcgtgatctcagctcactgcagtctctgcctcccaggttcaagtgattttcccacctcagcctcctgagtagctgggactacaggtgcttgccactgttcctggctaaactttttattgtcttcttaaaccgtaaattccatgaggagcgagcatatgacttgaatatctttattccccaattggatttaacacacacttctaagcacactataggcactcagtaatgcagaattaactcactggaaataattcttggttaactcactggaaagaaagcactatttgccacattctgtggctggatattttaaggcaagggtaggtacaatataaggaaggccaaaactagcccaggatgatgagtatgtaaataagagctcacctccttgctaagaagctccagcaacttttcctttggggaaaatgcaacactgaggtctcctctttgaaggctttggcttttgctctgaaaacctgtcatcacctgtctctttttacttttcatactaaccacaaaataaatctctgatagtgctgtactagtctggcaatgttgctttttccttcaaatatttactccctctgtggacacatcaactcaaagattacaatcaggggaacctcctgtgtttcagataaataaactatcactctgtaagagaagagaactccctctgccctttatgtagtttgcattcagacaaataactgtttcttaaatgagaaacataattggtattgtgcaagggctgggagtgctcccatgctttcttccaagcagcaaatagtggccccaaatgcagtgaggctctgcctctgatttgtgatggaaggaaattgtgtgtgtggggccttctccttggctggaaggatctgcttcctctaagcctctgtttaaaccaggtgtttatttaccttgaggcagggtcagacaagggcttcttggctttaccactctttgcatttcttttaacatcaggttttgccaagtgattcatacatgctggaaatgcagagaggaatctacaggagtggcatttcccttagccaggaatggattaagacagaaacattaaatgtgatggatgtggtttgatacattcctgtcctttccagccatccacaccatgtactgaggcctctcccatggttccaggcttctcctgggtctagccagcagaaggagaggggacagtctctgtgaatatgtaaacacatgataattgtcaaactgtaggcctttatagtggcatttctccaataatataattgaattttgatttggagcaaattgatggtactctttacacactatatgtttgcccttttctttcttttcttttctctctctctctctccccctccccctctctccctctctctctctctttcttcctgtttttttttttgtttttttttttttttgatggagtctttctctgtcgcccaggctggagtgcagtgatgtgatctcggctccctgcaacctccgcctcctgggttcaagcaatgctcctgcctgcctcagcctcccaagtagctgggaccaggcatgccaccatacctggctaatttcttttgtattttagtagagacagggtttcactgtgttgcccaggctgatcttgaactcctgagcttaggcaattcacccgccttggcctcccaaagtgctaggattacaggcgtgagccactgtgcctggcctgcccttatatttctacaagttactagaaataaattttaaatgaaacacttcttatttagggagtcagagcaaaaactacaataagtttgattaagaagactcattcaaatatacagaggtatgagtttaatatggtaattctgaaagattggactttgttgtgaagtatcataaaatataactattaagctgagaggttaaaacatgataaagaggttctgcagatcaagaggtttcacaaagctttttctcaaatgctctccccatactctcaaaaatatgatcagcagtaatttagctgtcatccagtgtcttgtcacattacaggaaagaatggggataaatcttttcatgtctttgtaggagtacacattggataccacctcaagcagggccttctggggactccccacctagatacccaaattatagaacactttacaaagtgttgagaataacctcaagcttcctcaggttctctgacaacttctcttccagcccaggctgatttcttgttgaggtcatacatttcttgttgaggatgatagaagctggatatttcccttttgcatctcttttaaatctgcttggttcttttttaaaaatagtatctattcctttctctcgtttttaattcccttttagacttataataatagtttaaaaccagcttgttttatagctcttcctgataattctattatgtgaagttcatattttgctgttttctgctgagccttggttatggtgctgtgtttccccaggtgttttgtgagttaaggttgcaagctttcgttatctgtgagaatcctgtgtgaccttatttgaggatgtgttcttaccaagaggcttcttcttttcttctaccaggacctcagcaatgacatctgggaatccattttcatgttaatttatctgcttggggtttacctgcccttgtagtagtgtaaatctgtatctcaaacccacatgagggcaggtctgtggttataaattctcaggggaaatttttttcccttcacccagagctcagcctgagatagaggaggttccttgttgcttacttctgtgggtggattttttttttttccagtccacctgttttcagaggatatagacctctagggtcctggttcatcataagaatctcagttttatcaccctaccttgtggccactccatgtgtcatttacacacaagaccctttgttacttagattggcagtgacatttagagttacaaaagtttgagtccttgttttccagatttctctttttgttgggactttgagggtttcacttttcattcctgagagtttatacatttaaaaaattgttggttatattttatgcagcatttccaggtgcttggcggcaggagtatttcaagatatttagtccacttttagcaaaaaaaaaaaaaaaaaaaaaaaaaaaaagacagtaagcattcataaatgtcataatgctagtcaaaagtgactcaggttattttaatagttgtggtcttcctaattgctgactccttgaccagtgtcctcattgtggttgagaatccaacatccattccactctgctccaaaccaatggttcacaaacttaagtgcatctgaatctcctggaattcttattaaaacacagattgctctgctgctgtgcttcaactctagagattctgatccagtaagtctggagtggatcctaacagtttgcatttttctcaaatgctgctggtggcctggggaccacaatataagaatcagtcatgataatcctattctttccacttgagactagtttaggaatgggcatacgatctaaatctaccagaagagatgaggggaagtctgctgggggcttccaggaaagtttacctcaatcttgagaaaaaggcatagaaaaaaatggttctgttttcctctggacattgtcatgtaaggacatgatgcctagaactgtcacaggcctcttaccttcctcgtgagaatgaagctaatctagggtataggggcagagccaggagaatctcaggggagcagagaaggaatcctgatagctcttccttggctaggtcctgccctacttctgttatttcattatgtgagatattccataaatagaaaaaaaattaaaaattgaaatgagtcagggttttctggttacttgtagccccaaagattctaagtggtacaactatcatatgggtatgttgagtcttattacctgccacccccagctacagagtgccgaagcaagttcatttcaaattatgtttttttatttctttttttgaactactaattttctgtgacacttttttctctactttaccccaccacacacacaatctcacccagccctctgggaatatgctgtaacacttcaaaattgtgaatctcttgaaaggaggcagctactccaaactttcatctcatttctacatgtgggactgcaggatccatttctagttgaatgcatgatgacagctttacaggaagtcgtcttccttatattctctttttatatattgctgttttctggcaaccctagctaattaataacttaatctgtctctccttagactttaattctaattttcagaatttcccaatcaagtcaacattgattttattggaatttcaaatatactctgtgctactgtgttgtatttttggtggaaagaattgtagcaggaatcaagcctcatgatgcaaatgcctaaatcctgaattgtgaccaggattgcaaagaaaataaaaaggtcgctctctagggagttgaactagcttagcacctccacatggaatctcagaatgagaacagtgattttttccctcctcttctgtttaatcctagtttggacagctctttattcagaacatcaaggactgttgacagttgaataaaaagggcggaggcttatgggattgctaatgagatacaaagccaccttggaataaaaataaatttctctctgttggctcctccggccatggagaggtaagttaagaacctcaaatcaatttctactgacaggtattcttatcatggtaaacagtgcaatgcacattttagttggcttctgagaaggaaggccaggggcttccagttgtgtgatatcttttcagcagatagctgggctaaggtgaacaaattgtactgatgtggcgtgaggcacactatctggtcagaaaataaagttcttagttatagttaacatacagcatttttcctaaaattaaatttttcagcccacaaattcaggtaagtgttaaaatgaagaattttattatttcctgatatcaaatgccttttcctactttctttccaatcctaataatttatctagaccaattcatagttcatgacctcttttgaagccttgcctgacaacccaagctagaaatgatatttcttttgagtgcctggagaactaatgtccctactcttgtcttattttgcaaacttgactatacagctgtttgaaggcagggattatataatatcttttcttgtattatccacacaagatccactgcagtgttttgcacatagcagttgctcaataaatgttggttggttggttgattttttttttttttctttgagacagagctttgctccgttgcctaggctggaatacagtggcgtgatctcggctcactgcaacctctgcttcatgggctccagcgattctcttgcctcagcctcctgagtagctgggactacaggcacatgccaccacacctggctaatttttttgtgtttttagtagagatgggttttcaccatgttggccaggctggtctagaactcctgacctcaagtgatctgcccaccttggcctcccaaagtgctgggattataggtgtgagccactgcgctcggctggttggttgattttttattcctgtgaagtatacaacactgtagacttagaaatcatccaagaagagggttttctcacatagaacctgtggatgcacatcaaggcttctggaaatttattgaaattgaatgcaaagtagacattttcttgggagagggaccatagctgtcaacagaatcacaaaggggttcttgattcctttccaaatgaggggaattactgaactaggctattcattttcttttcttcttgacaaaactattaataggtcccgagatgttgataatactgtcatgacctcacaaatactatagcagtaagagttctcttgggatacctctgttcccatttttaactgttgttcctgaaagagaaatggagattaaattgaattcatgtgctgtgattagactgattgtattttttaaattgcacaccattaaaaggactgcgttctgaagttctggtagagacagtatatcatggtagttagatgtatgtgctcagagccaagcctgtgcttgtatctcagctctgttacttactagctgtgtgaccttgggcaaataacttaaaccttcccagtctcagtttcttcatctgtaagatgggaatagttatagtgatctacctctcagggttgctctgaggattaaatgaatcaatgcatgaaaaacatttaaagcagtgctttgcacacatattaacagtaaacataatgtaagtgttagctattaatattgctgatgcttttgttgttgttcaactgtagctctcattttcatgaataccgattagccatggtaaatgtatcttctgcagcccttctcaccaccaaattcacttctgagtcatcacattgaggtcagatcagattgttgaattattttgcagaaattatgtggttttattgtctgctaggtgtaattctaagttttctttcttgtgtttgcttggcattttgaaatcaagttctcacgctctgagggtatttaagtcatttaaagattaccaggctaaagaatcaagatcctttgaatttcagtgaatgtacttttttatcccatgaaatattttttttgaaaaatattaacaaaaatattctaagaaaaacttttagtagagtcttttagtcatctttatagttgtagttaacttggaaaaggaaaaaatgaaatgcaaaggattctgacagattgaagtcactgctgcctggaattaattctttccattagccttaatattaacccctttaaaatgatgaaaggttttggttaatcctagaattcttaatccccaccttttggagaagcagaaaaaaatactgaagtgatttttgttgggggagtgcttatgctaagtgaggcagtttgtcagattttacttttatgagttgactgtcaagcatttgagaagggagggtgttttttagaaggctgtgctgcagcagattcctcagctaagtgcacatcctgtgatatttcccccactcttccctgatcagtgaaattgcaattaaataactaatatcaactgctccatttccatgatcctcagagcctatggaattagaatatacatatttaaggaggagaaaattttccacttgatgtctaggataatgaagagtgatggagagtggggttatgaggagtcaggagatatatatatatatatatattagtcagaatgtcagcaggaaatagttgatacatgaaaattgggtaattttcagagttaaaataaaactaaatttataaaggtgtgggctgggtataggaaaagtacaaagggtagtgcaatattcttaggctagtaaggtgagggcagtgtctttccatccctgggtctgaactggcaagacagatgggcaagcaataactgtattccaggagggagggagggagggtggaagagagaagagagagagagaatgttgagaactagctgtgtggggagggcccctgatgacagctgtgacctctggtctaagtcaaagtatgttggcaaactagagcaagcctgcagggaggggaagggataaatgtcctaacctcactcttctcttttcctaatctcaagccagtggtcctgtatgaacccaatcagaagccagagggcagagggcagagcttgcagcaaatgccattctgggatcattttgtaccatactttattcatattctccttccctggatgcctccaactctcacccaagtgcttccatttatgtgccttcctcttcttcctgcttctgcatgctccatactggctgacacctagagcagatcattttaaatacccctccccttgcttgtacaggacaaaattattttcaataatgatgtcataatgattgtttttttgactcattcttaaatttcacaacaaatataattgacaattttaaaagactaaattacaatgttgacattattcaaatttggtaaaatatttcatgtataatctcaaattttcatttaccaaacaaaaatatttcagatttcagtttgcagttcattctctgtttcattatgatatggtttgattgtgtccccacccaaaatctcatcttgaattataatccccaaatccccacgtgtcaatggtgggaccaggtggatgtaattgaatcatgggggcagtttcccccatactgttcttgtgatagtgagtgagttctcatgagatctgatggttttataaccatctagcttttcccctgctagcacccattctctctcctgccaccctgtgaagaggtgccttctgccatgattgcaatatttcctgaggcctccccagtcatgcagaactgtgatgagattacccggtctcctgtatttcttcatagcagtgtgagaattgactaatacacactcttttaaattttaaacataaattaaaaattccaagtgtccatgaagaatgacagaattgatataactcaagtttcagttcttccttttgaaaatcagtttctaatctactgtttaaacaaggaataggtagcactctggaggccagaggtaggaactgctcctgcagcaaacttgaatggttctagacccttagaatgtatcctgggaaggagtgtagctggctttaagtgtgtcaggactgatagtgtaacgaaagctctctgaattagcttccatgtagaatagaatacaattttttgtttgtttgtttgttttgagacagagtcttgctctgttgcccaggtgggagggagtgcagtggtgtgatcttggctcactgtaacctctgcctcctgggttcaagcgattctcctgcctcagcctcccgagtagctgggattacaggcatgtgccactatgcccagctaatttttgtatttttagtagagacggggtttccctatgttggccaggctggtcttgggctcctgacctcgtgatctgcccaccttggcctctcaaagtcctgggattacagacatgagccactgggcctggggaatacaatgtttttataaagaaaattttaaaaagagagagaattggaggcttatatgttgttaaaattgcagtaattcttagtttaagaatgttagccctggtgttaataaaaagcaagttgacttttggtcagtttattattgttttacaattctccacaaacaattcagtcccttattgtctataccctgggcacagcaaagtaaagtagaaaagaaagagagtgaatctaggggccgcaggaaggcagcttacccaggacattaagttataaattgagaactttccaagtcattccttatctgttttcatgaaattgtcaagcccattagtgtcttatccttacagatttttgtgacagccatgtacttgtggtgagtgcttgagtggggatgattataacaaaatggaagaaagatctataattctacataacaaatgaaaaccttggaagttctctttttgccgtaagactgcttcctagagcttgtggcaagtgccattctggatcattttataccatactttattcatattctccttccctggatgcctccaactctcacccaagtgcctccatttatgtgccttcctcatcttcctacgtccacatgtcacaggacaggctggttcctttttccatcttggctttcctttcccatccccttcttggctacccctgtttccttcttctttcttcactggaccagacatgaatttgttctgggaacttttactaatctatggaaaaggttgttaataggcttcatgtcagatgttcagttgcttagtaacccaaaggacctcctgccaagtttatgttcagagaattagacaaaccatccagtccccactgttctcaggcctgggctgcatcagctctccagctcggctatgtgtgaggagatcccacacaggctcagaaaggagcctcagcctccacagagcaatgagtgtgagggcagagtctgagcctacctggcccagtctgaagaggaatctggggaggctgacctgaacagatgtgcaggcatgttttcagatctcctaaaactgatatttactgcatgttagtgaggtggtttgaatttttcagtttctctgcttcttcctttgttccgcttcctgatctatctctccttctcatttcagttcctagtgtttttcaggaaacccatggttttagacttacaggctctctatcaaatggtaccatgtagacttagagcagtggagtagtactcatctcttgttgccaacctccacaaacacacagaaaccatacaaaatccccacggattctggattaggatgtatcaacgtggaggagaagggtttctacactggtaggaggaatgaatctgggtaaaataattgcttttaatgaccgctaggagtttagaaacatcctacggcacagcaaagagtttccttgctgaactgcagatggtgtttattgccagatgatgtgcagaaaagtgccagatgattaggctctttctaggggatgtcagaatcttccataacccatgcaaataattggctttctaacacccccagactgtaacacaagggaggtaggaaaacttctaagaaggtagttatcatggcatgagtaaaaatttctgtttgccacaccatggctagcagcggggagtgggtggttgaacaagaactcctccaagactctggctggctgggagccaggattcttcaactggaaatgaacagggaaggaggggaaaagaacaaaaatctgctgagggataataaaaattttaatgattcttcaaatgttgcattgtcttgtaaacgtagttgtaaatttaactttaaaatgacttttactcaattgggtcagagacgtaaaaatgattaaaagaaaggaataggtctcagattagcaataatatttgtacaaaaaggttttcagtgttcagagtaattgacggactggttttgggtgatggttttaattactgggagcttatatataattatataatttataatatataatatataatttataaaattatataattttcaatgagcaaccactctaaacataaggatgagagctcaggtatcagctgtggagtttttcttaagaatacaagtaaattgagtgtgacctgaccttagtctgttattgtaaccagagttactattctttgctctagtctagaaatatctccaagtaggagatatgtgtagggaaggtagatgatctttgtgccttcactctaatggtcttggagtaggaatgtagatcatggtttgatggagggatattggtgatgggtggggctttcttatccatggcaaggaaaatgctggtggaagacttcatgtgtggcatgattagttgatataacccaataagattagtttatataggcagggtgtggtggctcacccctatatcgcctgtaatcccagcactttgggaggccgatgcaggtggatcacctgaggtcaggagtttgataccagcctggccaacatggtgaaacactgtctctactaaaaatacaaaaattagccaggcatggtggcatacgcttgtaatcccagccactcaggaggctgaggcaggagaatcacttgaacctggcaggtggaggttgcagtgagccaagattgcaccactgcactccagcctgggccacagagcaagactccgtctcaaaaaacaaaacaaaacaaaaaagattagcatatgaactaattcatacaagatgcccttcactttgaaaatgccagctacctagatgactaggatgtttgaagggagttagatacaggcttagacatatcttagggactacagaactacacagatgacaaaggagcccagaattcttgaactgaaacagatgagttagagagaaaaacagtttttttcccctttaaaggctagactagtgtacaaaagttataaaagcagacttgggcacctttctaggtgattcacaactgaaccatcttcttcaaaaaacagtagccccttatccttgaacatgttccaggactcttgaagtggtgattccttccttgggcaggaggttgacagatggcttctgaggttcctttctatctgaaattgtgtggttctcattaaaaagtttttccttatattcaaaatgtatttcacatagtaatatggcctaataacaaagattttcttcctcttctaatttgaaactgacaataaaacttgtaaaaaatgtgaaaggtaataaaattctacatgttccaactgatgtcagatgctcatctcttaaagaccagaacctcagaggcattccaggagagtccacttggtttactcacttctcttgattatgtatgaggactaaactctggccttttttttcttattttgcccaaatcctacctaaggaacctagggagtcatgccctgcaaaccataaagtctcatcagaggggttttatttaaccctgtgtaacgtggcctgctttccaacttgactctggcataacatcacataacaaataaggaaggaaatcaaaatatttttaccccaaatatatttccttgtcatatcttgaaactgccctgcaaagtcacctcttctgggaaaaatcgacattctgtagagaatccccttcccctcctcctttttttttctttccagatccaggagataatcaactaagagtcaggcacccttttaagtccaataagaaatattttataacctattctctgtgaagtctgctgtctgaaggtttcctctgcacaataaaacttggtctccatacccctttatcttaacccaaacatttcctttctgttgatcccaggtctttagataaacttaacccattgtcaaccagaaaaaatttaaatttacctatatcctggaagctccccactttgagttgtcctgcctttccaaaccaatgtacatcttaaatgtatttgtttgatgtctcatgtctccccaaaatgtataaaaccaggctgtgccgtaaccacctcaggcacatgttctcaggtcctccggagggctgtgtcacaggccatggtcactcacgtttggctcaaaataaatctcttcaaatattttatagagtttgactcttttcattgacatgtataatgagacttttttttaaagattattattaagataacaaatgttccttgagtgagaaagagcaaactatttagatatttatggggtaaagtaaatctcgatttattgcccataggtagaccatattaataggttttttgtttttgttttttactttttaattattttgggatactcttaactttagatgatgttgttagaaagattttttaaaaatttagatttcataaaataatcttagttgaaaacagctaaatcacactatgctttttaaattgttaattcaagcataaattgtaagtgcatctgtgctcaaccatgcataacttgaactagtatccattaatatctaagaagctgatttgaaactctgagtatatgagagggaattgtcagctatgagcctcactataaagcagtgattttcaaccaggagtgattttgctccttataggacatttggcaatatttagagacatttctgtttgtcatgactggagaggtcgtggcatctaatgagtagaggccacaggtactactactagacattctacaatgcacaggacagctctccacaacaaagaattttctggtcccaaatgtcgaaagtgccaagattgagaaatcctgctatataggttgatatgggctgtttattgatggaacatccttccatcaatatctttagatatttcctttagatttgatgagattcccacctgctgattgcactctgggaattgaatggaggaagaagacaggatttaaacatttaataagcatatgttgacctaatttcccagtttagggtaaggtgtccctgccttcaacattggtatcctttaatctagagaccctctattttattctctgcatagagaggcagactcccaagagagggaatctggggttttagctggttcttaaattggcttccaggtgattatcttaggtttaggcccactttcacccttcttccaggggaacaagatgtcatcagtttttgggcatttgggggctctacctataaatttgattgactctcagtttccccactgccagtttaggatttagctttcttagatctgctaaatcaattatttcttgcccatttattttctggtttccaaaatcctcttgttgttaccatctctcttactcttttttttttttttaattctttagtgatatttttatgggttttgggagggagcagaggctaatgagaacatttgatcttctgtctttaccagaagtagaaaattagtttttcttctctaatatgttttccgtaatgatagctgcttcatttacaagctaataccaggaaatggctttaaaaaaacacattggtaagtagaatggatttgtcaggatcttggtttttgtgaggcagagtccagattgaatgctacctcaaaagttcctttattacataaaacaagcaaacaaaaaaacattttccagtagttactttcagcttttctggattttcttttctctttaactatttcacaccctcttatttagtaggtagcatacaattgtctaccagctgatttatataaagactttattgaatttttatttcttcactaattgaatcattcatgcattcagtgtctcactcactccttgactcatttacatattcagtacaagtatatcacatgcctgctatgcagaagagtctgagtgagacaccatgtaggatgcaaaattgtgtcacacaatccttgcttttaaggagttataatcttttttgtatcttttggaaataaattacatgacatgtttccatgataattggacatacgtcataattttggtacataatattgacacaatacttactactctccccttttgtagcattaactttgaagagcatcttttggcaaggctatgtatacaaaaataatgcaggcattatgcattctatgaagggactctattttatcagatgccatagccaaaagaaatttactgttcactttcgttatggctctgttgagttcttaggaagtgaagctacaagttcattgctgtgtacttcaaaggagcttctaatagttacactcttcaagtctccaggaaatgattcccctaaaacaaatcagcatatgcaatgtgcccatatgcatagtagatcaataacacacaccacggatgatgttatcagcaacctgccttggtctagacctatatttcttaacaaatacaaatgcctttggttaaagaaaaaagatggtatggtgggctgagagtaggtatagacattgcacttttttctcaatcttgaaattggggattttcactgtaaacaagataatcaatctcaccatgtgccattttatatacagtgtcttctagatttctactctagaggctatccagaggtccttaagagtggagatactgttttaaaaatgcctttctttttaacagtatgttatctttatcaccaaaagatgttatgtaagaatagcatcagaaaggtcagggatggtcttagggacaaaaagaaagtatttattgaattttttttttttttttttttttagatggggtcttgctttgttgcccaggctggagttcagtggtgggatcatgattcactgcagccttgacctctcaagatccaagtgatcctcccacctcagcctcctgagtagctgggaccacaagcatgtgccaccacacctggctattttttaaaattgtttgtagcaatgggtctcattctgttgcccaggctgctctcaaactcctgggctcaagtgatctcctgcctttgtcttccaaagcgctggggttataggcacgagccactgtgccttgccaaaaaccattcttaaatccttgtgatatacagccatagaaggaggaacctcacagttactgaatcacaaatttctcccttgcttcctgggcccattcctccccaaaacctaactcaaaataaagtgccctgccattgtgatttctgctaaattctccatagctcttagcataatgtcttgaggacagaaggagctctttgagcatttcttcattgattgatggatgaatccaagttgcaagaaacatcattggatgtctctgtctctatggagcatatcctccttgtcacagtttgaagtttgcctttattaattttatcacaggcaggagggaggatgagcccaaagcagagacagacttaaattgtcaggcttctgtacaggatcaaaggtaaaagctatacactgagtacaaaagagtccagtgtcagaaggtagtcaggaatttggctagccagaatctagaatgccagaaatagaatcccagcctgaaacttagagaatgttgaaagggacataagcttattaaaaacagaatgggagattgagttgaaattagatggtaaataaaatgagaaaccagcacaaccttcagtattttctcctttacatactggtagcttgaggtcgagtaagcctggccatgaagtggggactgctgaggtcaaaggtttcagagacagtataagaaaggcctcttgcttttgatttcataaggtctagaatcacactgtatttgaatacaatgaatacttgaagttttttagagcagtgttccccaaagtgtataccagggagtgctggttctgttaataaagaaatgtatgtttggaaaagactgaattacagaaaaatgacaagtttctgaagactccttggaactaatgtgagctgcatatctctcttaagggctgtgtaagcaggatttcctggatgtatcaacctccaaacattttcttaaagtactttgcagaaccggtattacatgacccatgtttcaggaaatgatgctctgaatattatttatatttatgtcagaattgtgttaggatatactgttcccgctggtcatcggagctcaccttatgaaattttacagctgaatgaattggtctttttgtttgcatttgaatgggaaacagctgacttgaagtagctctactcgaatgggtattttcattttgaacatatatgtatataattaacatttttttgtccttatgtaggcagtgtttattaagatgacacaaagcattgaggaaaaatttgaagccctttcactttatagccaagtttaaaagagaatgatcaaacctaaacttttgggcaattcagcctctatttagctttgccctagccagtgaatgaccttgaataactcaccaggctaatgcactcactgaatttcgcttgcctttgttccaataactaaatttggatgcctgtttcgctttaagcacaagtaattacattatgtatttttaacccaccaattagttttgcatagagctaatggatctgattataacctaagaaagagattttggctatttttctccttaaatatttcatggacagagacataactggcaatactgatggaaaagaagtagaagacaagaagagtgggctaaatcagcacgatttacaaattctttgggagatattgcattacactggtacataagtctctctttaagccaatggatgatgtcatcctacagtgctattgtaagcagtcacacgtgtgtcttaaggtttgtatatgtgtgcctacaccagtgccttaactgagcagatactcaatcagtatttgggaattatctttgttatcttaagactttcattacttttatttttaggttgtatccggaattgttttttaattaaaattaattcatgtattaacttgagactttaagttaacttagtttatatgttttagatctacagatacttttatctatccatacttacattgctaacaacatttcttttctatttctcagtgcttttctcttctacttttaaaaaattgtggtaaaatgcatataacataaaatttattaccttagccatgttgaagtgtacagttcaaaggtattaactacattcatcgtatcgtgcagccatcaccaccatttatcttcatggcttgtttcatcttataaaactgaaagtctataccattaaacaataactccccatttcattcttcccttagcccctggaaaccacaattttactgtctgtctctatgattttgactactctaagtacctcatatcagtggaatcatatagtatttatctttttgtgaccatcttatttaatttagcataatgtcctcaaggttcatccatgttatagactatatcagattttccttcctttttaaggctgaataatattctgtcgtatgtatataccagattttgcttatctgttttgccattcatctgttgatggatacttgggttgctttcatttttttagctattgtgaataatgctgcttatgaagatgggggtacaaatatctctttaagaccctgctttcaatcaatttgggcatatacccaaaggggaattgctagcccatatggtaattgtatttttaattgtttgaggaactgccatactgttttctacagtagctgtaccattttacattcccaccaacaatgcacaaaggttccaatttcttcacattcttatcaacactaattattttctgtttgtgtgtttttgatagtacccataccagtcagtatgaggcaataccttgtagttttgattttcattcttccctaataagtgatgttgagcatctttttatgtgcttattgggcatttgtacatcttctttgaagaaatgtttatttgcccatttttgaattgggccttttgttgttattgagtgttgggagtttttgatatattcttgatattcatcccttatcagatatatgcaaatattctttcccattctacaggctgtctttttattttgttgatatggtcttttgatgcacaaaattttaaaactttcataaagtccaatttgtctatttattctttttccttttttgagatggaatctcttttctgtcgcccaggctggagtgcagtgatgcaatcttggctcactgcaacctctgcctcccgggttcaagtgattctcctgcctcagcctctcgagtagctgagattacaggtgcccaccaccatgcctggctaatttttgtatttttagtagagatggggtttcaccatgttggccaggctggactccaactcctgacctcaaatgatctgcccgcctcagtctcacaaagtgtattttttcttgattacttctttctgttttgttttaagacagagtcttgctgtcacccaggctggtgttctggactgtggtgtgatcttggctcactgcaacttccgcctcctgggttcaaccgactctcatgcctcagcatctcgagtaactgggattaaaggcatgtgccactgcaaccagataattttttgtatttttagtagaggtggagtttgactgtgtttgctaggctggtctcgagctcctgttttcaaatgatctgcccgcctcacctcccaaagtgctgggattaccttgattactttttgaataataaaaaacgatattatttagttcaagtgactgcttcacagtctgaatccaagatgctatttttaaaagttctgtcctcataaagagaaatattctaaatcttgtagtaaccttgcctgaacacagagatcctgttataagccttgttatatttaaatatatataaatcttgtcatattttaacagggttaaatataaatcttgttatgcgatccctatgaaacgataggcagatactttaaaaaaatatacatatagactgagaatctcagtttaaaagtacagagacttctttgggttcaagatcagtttttctccacgtatttctctgtaaaattcagttgaggagtaaatacacaaggaagctgccagttctttctttcctggacttgaaatttctggagggtggagggacaaaaaatgttgacttgcttgttagccagagctcagcaagggagtactaaacaaagtgagaggctcaataaataccttttattctgcttaactgtagtgtaaaaactgtcaggccgatatactcctctgccttcttataaatctaagtttttctttaaaatttttatgttattttgcacatttgacacagagaaaagtcatattcttcaggcttttttttgtattttaaaaaattaaaagaataaataaaactcttaccttatagactccagtttaattgaatgcaatcccaactgctcttatttaaaactggtcagctgaatgttaatgaaatattctagattattcattttcaggcatatgaagtatcatttcttgtttaggaaactcagtcagaggacctcgagtatccaaatcagtgtctgaatcatacggaactattaacaatgataagattaggccaaagagcacaatgaatagagttatgacaagcagaatttgtctgagattcatttgcgtttggctgcaaatgactaagtaagaccaacagtagcaatgtcatgagatgattgtgaagcattaactggaaaattataaatagatgatttctagaggctattgaaaaggaccagttgtttctgagtgtcatgtcaattatgagaaactattgctaacaaagagaaagaatgaaaaattaaaaagcataggggacaattaccttccaaacgtctgaatcactcttggatggcagccagctgctcaagtgctgggatgttaaagttttatccaagagggcaaaggagggcaaaaagtgaaaggctcagaaatcatgaccctgcttagaaactgctgcttccttcctaacacatcacagctagactttggttagtggtaagtaataaaagcaaatggctgatgggtctttgctttatcttaggccttagcactctcatggcagaggggagagaatatgggttgacctattataatgttcagcattccgtcccttatattcctgtgacttagagacacacctaaattttaaaaaaaatcttgtttctgtctttgctggatggaagagttggcaaagtatctggtaatatttaatctataactaattttctagggttgatgaaggacctactggattctttttagaggcatttcagtcattagctcttactcagcggttctcattgttgctatttatttcattgagcaagataataaataattatttaaaaagagacaaattgattgaaggtgaatttgtattgagctggtttgtgtcccatgcttttattatctaccagcttaaacagaacaaaaatatttataagctcgtactgtctagtttccactagaaaatacgcattttatgtaacaaattatttatctatgatatgtaacttaaattacttgttctagggattatttttcaaaataccaattcatcttgaagcaattcatactttatcaagcattcaccttcaatttaggtggctaattaagctgaaatgcttgactgtaatgaaattgatgcattttaagcaaaaccattagaaaatatttgaaataataggttctaccttgctgaaattgtttctttgaaaagccgacatagtagaagacctttattattctttctgtaataaagaatattcagagggaggatctctgatcacatcaaatctctggatattaacagcccttgctatctcttgttagtattttaaaatctgacatcagagtcttctaaggcaaactctttttacatgtctgggagtctatagtgagtaggaaataatagtgaataggaataatgcttttgaaaatcgtgctctttatgaaagttcatcacccatgaaatgtcttctgtttatgaaagaacagcagtgtgagtagttatttgatgtgttctcatgttgcagtatgaacagcaaaaacaaatgtaatattagctgacagatgtggcttaacgtattatttgatatctcagcctgattcaattgtcttaaaaaataaaagttattcactccacaatatatctactcatggggcagatactgaaataaccttactttcaacttgatcacttaatcacctgtggttttcatcctgagatcaggcttatttcacaggaagcagttctttcttgaagggattgaatgaagcaaatgcaacctcattattgatttgagtcacagtgagcattttgtattaaaaaaaaatacaatgttttaggagtggatagacacaattttgaaattttagcattttaaatttaatatcaaccaagttgtaccccacccagtcttatgacattctctacaaaaacaaaaacaaaaacaaaaacaaaagaaaaaaaacaaaaaataatgattttcatagtaaagtagattttggaactaatgcactctatctccttatcctccatttggaaatgctcaatgtacctgagagtgttaaaaccctgtcctgtaataaagaagttctttcattttttaatctaggtattttttaagctttatgtttgcatacaaatagttaaatcatataattctgaggtttcttaacatacacaacagtctccagcctctcttcttttccatttcccattctccagaggcaacacttttcatcttttagctgatacttttggtaactacctctatcttgaaacaataggatggtatggctactccctgagtattttttttccttagctttatctatttacctctcactgtaaaagatgagaatttatgtagctcattcccctaccctgtctctctctttctctcactttctcataggtatgcacttgcacatgcacacaattcccatccctcctttcttcctataaaactatgtcatgattttgggttattgcagcatttagtgtttaaattattaacactatttaagtgcagttggtagctatatcacaaagaggaatatgatttttgttctatttttccaacaacttttggtttctctctggaatttataattattattgtgtgcttagttttctatgtgtttatctccagttcaacccccaattctctactagttgggtaaatctcttctgagtatgttcatttacatcagattttctctcaacatcatctgtttgaagcagtcttgacaggagccttctgacctgttgtagtctggactggaagcccttcttgcctagtataccgccgcccttttgggatttcccttcctcttcactctggggaggtgggcctcctgttgcttcatcctgtgcctacttctttcttgctttactcctttgttttggcagagcatagcctctggtatcttttaagaaaagtgtgcaggagattgatttgtgtgtgtgtgtgtgtgtgtgtgtgtgtttgtgtgtctgaaaatacctttattctaccctctcattgattattagtctatattattcttggtatgaaattctaggttagaattatttttctttcttatgtaaaacaaattgtcttctggcttttaatgttgctgttgagaaatccaaatcaatctgatttatcatcctttgtatatgcctctacttccaccccaaagcttacttccctgcatcttctgaggtttcaaataatgtgactttggtgtgtgtctatttttagtgcactaggcaggtcttttaaatttggcaactcatgtcctccattttcttgaaagatttcattgacgattcctcctttctctttcctcttgccttcaggaactcctttcctctagaagttggacctcctgcaatagtcactaattatcttaccttttctctcctaatttatatctatttacctttttactttacattctgtgagatttcctcaactttatttttagctattatattgtgattttcatttttgctattatacatacttttattttcccagagtcctttttttgttccgcaaatatttcttttgaaatatagcatctttttcttattttatggatataatatcttatctctgataatctttcttttttaccgaaatcatattttccatggatggtgtgtttcctccaggttgagatttttgttgcttgctgtgactctgttatacaaattggagctttccctaaatctctgctaatccttgactgcccgctcatatttaggagtaaaagactagaaagctgattggatgctctgaatgtgtaggtgggcctgttgactgaatgtcactgtagggtaatctggatgtgccaatttcagtatcttgtcttcttggactgatcagatctcctagagagggaacctctagtctctcgactggagggttaaggaattgctcccagtgtatgaggagccaaatcagggaagagggctggggatctcaacattcagaatgtctgcattaattgaatcctcctgttttcagaatactcctcaactatgcatggcatctgccagtccagagaccctgtgattcattctttctaggtaataaacctccagtcttctgtctgaactgggggtggaagcaactacccagcaacacagagtaaggagagacctatagttctagctgatttttaaacatttttaaaaatcaagattaatcttcttaacatatgattgtctctttatctggagttaggccaagcttgaggttaagggcacagacctccaagactaacagttctgcccaagatttctgatgccagttgcaaatttgggggtccccagggccatcctcacttcagaccaactggctataaagttgagagttcacacagactctctcagatttgataatacactagaacaactcatagaactcaggaaagtgctattacttatcattacagttttattgtagcaaaaggatacaaataagagccagccacaggaaggaacatgtagggaagaatctggggctgggagaaatcttccaggccctcagggatgtattacccttctgttgttgatgtgtgacaatgcacatggaataccaccaatttgggaagcttgtctaagcttcaatgtccatagtttttattggggcttcattacataggcatgattgattgaatcaccacccacatggttgcccaaagcctcaaccctttgaccacatggttggtccttctgtctggccagccctcattctgagtcaccttattagcatacacttatcaggtatagtctaaggggcccatcataattaactcagatattcctaacacttgggaaatgccagctcctgggagctggggcaaaggcccaacttttctttagataaaggtaattcttccctacacacccctccatctctacttccagaggtacctggttccatcaatttcaaaatactttaaggattctgaagtaaaaatcaggttggttctttgttctctgtactgctgtcttaagatttagtttttgtgagttggttaagtcatttatcatttattcatctaatttctggcttccaaaatactgtttttcttcctattcttgagtggttatatttaacaaaaaacttttttcagtagtgttagtagggtttctggaaggagaaaaattaggtctgtgtattcagttggccatctttaatcagaaattgcccaggcctctcccaattaattttttgtgtgtttgttttttgagatagggtctcactttgtcacccaggctggaatacagtggtgagatcacagttcactgcagccttgacctcttgggatcagatgatcctcccacctcagcctccctggtatctgggactacgggtacatgccaccacgcctggctaagtttttgtatttttgtgtgtgtgtgtggagatggggttttattatgttttccaggctggtcttgaactcctgggcttaattgatcccccaccttcatctcctgaagtgctgggattacaggcatgagccaccatgcctagccataacttatttttattaacaacttttttgtagaatacttattaacacctggtaaatgctaaattagcaaatacttctatattgctgaattgtaatacaggtaactaattcagacttcagaatctttcaagatgacccttctcttagggctgattttcttcctactttacatattgaggtcacaacatataaatagctacttatcgcttgttgactgtggggaatgtggggctaaagagggatcttttatcttcaatcttgcctatttttacaacgttttaactaatatttatatattactctttaattaatttagaaataattttagaacaagaaaaaaagtagaaacattgcatgaaatgatccttaaaatttttccacttcaaatctataatgctaagattgtgagtagggttaatggataactaaaaatggagaattctttttatatttaatggagtaggtaggacagagtgcagaactcttttaatcattttgatccaaaagtcaaacttgtattcattctctttctctatcttttctttctgggctaggaagaggtttttaaggttacactttgtgttaataaagtctttgcttggaaaagtggatgttgatcctctcataatgctgatttcttatttcattttcttggtaaataagagtgcatgtattgactttcctgtaccattctaggatacaactgtaattgaattattcttttttgacaatctttttagaattcttgctccctgaaagatttattccaaactccataacatggcattctcatccctcttataatatggcagcaacttaccttgtagcttaatctgtttcttggccccatcaagcttcctgttcccttcaacactcaattatctgctgattctcccagcttcttggtgttgacgtatctttatccatgcagtttccccagcctagaattccttcacctcccttccatctctgcttatttaaataagaccctttttctctttaaaaaaaaatttgttttgtttatttttaacttttattttaagttcaggggtacaagtgcaggtctgttatataggaaaatttgtgtcattggggtttgttgtacagattatttcatcacccatgtattaagcctagtatccattagttatttttcctgatactctccctccccctactctctaccctctgaaaggccccagtgtatattgttcatctcagtgtgtccatgtgtcctcatcatttagctcccacttataagtgagaacatgcagtatttggttttctgttcatgtgttaatttgttaaggataatgacctccagctccatccacgtccctgcaaaggacatgatcttattcttttctatggctgcatagtactccatggtatatatgtacctcattttctttatccagtctatcattgatgggcatttaggttgattccatgtctttgctattgtgaatagtgctgcaatgaacatatgcatgtatgtgtctttataatagaatgaattatattcttttgggtataggattgctgggtcaaatagtatttctgtcattaggtctttgaggaatcaccacattgacttcctctatggctgaagtaatttacactcccaccaacagtgtataagtgttcctttttctccacaacctcaccagcatctgttattttttttgacgttttaataatagccattctgactggtgtcagatggtgtctcattttgtttttgatttgcatttctctaatgatcagtgatgttgagctttttttcatatgattgttggccacatgtataccttcttttgaaaagtgtctgttcattggctggatgcggtggcttgtgcctataattccagcactttgggaagtcaaggtgggccaatagctaggagtttgagaccagcctgggcaacatggtgacaccctgtctctccaaaaatcacaaaaattagacaggtgtggtggtgtgtgcctgtggtcatagctacttgggaggctgaggtgggaggatcatgtgaacccaggaggaagaggtgcagtgagctgagattgtgccactgcatcccagccagggcaacagaggaaagaaagaaagagagaaagagaaaggagggaaggagggaaggaaggaaggagaggaatgaaggagaggaaggaaggaaggaaggaagctgttcatatcctttgctcatttttaatggggttgtttttctcttgtaagtttgtttaagtttcttatagatgctggatagtagacctttgttagatgcatagtttgcaaaaattttctcccattcagtaggctgtccatttactctgttaatagtttcttttgctgtgcagatgttgttcagtttaattggatcccatttgtcaatttttgctattgttgcaattgcttttggtgtcttcatcatgaaatctttgcccatgcctatgtcctgaatagtattgcctaggttgtctccagggtttttatagttttaggttttacatttaagtctttaattcatcttgagttaatttttgaatatggtgttaggaagggtccagttttgatcttctgcatatggctagccagttatcccagcaccatttattaagtagggaatcccagacccatttttataagccatctgaaatgttaccttctctagtaaaggttcgcacttatctttcctttactcaggattaatgacacccctggggccttactgggcttttgtttgtttgtttttgcccttcatgtatttgagcatagcctgttggtgcagtaggtgtgagtatgtgtttgggttagggagagagggggagaggagagacagaggtgtgagaaagagattgtttctataaagttataatttccttgagggtgaatatgaagagtcacatatacatagaataccttttatatagttgattttcagtaatgtccgttgatttaaattctaaccactaaatgtcagttgatttgaaatgaatcttgtttcatttcctttaccttaatagcattgacaaaggcaacaactgtacaaattatatattaaagttttacaaatccagtctctgtcatgacaatttcttgaacaatagaaaggtgactgcctaatgcttaaaggtgatttttagcaacttgggatgagggtgagaagtatgaatgctcattagtgttcactgagtccaggtccacatattgatgaccgtgggtgccactgcggctgcctgcctgaagcagtcaaatgaatctctctgtgacaggaaatgactgctgtagaggaggaaagaaaatacaggaggcatgatgactatctgagtcaatctggatatccctgccatgggaagatctgaataattggggagaggggtagaaggaaggtttgaggggagaagatgattgattaagtgtgttatggttgacagcagactgtgttctgggcaagggagttagcgggtatttgaggaaagacccaggagatggtgcgtggtctctaagtgattagcagaatgtaatcacccatctgccgaggggcacagctgtacaaaaggaaatattcaagaggggaaaggagagagagaaacaccagtgataacaccgagatcttttaaattatggaaatctgtttgggctcccctattgacgtgctgtttcccccctggggcacttgcagtccttctcctcactgacatccacttgtaggctggcctgttattgcaagaggattagaaagtgagattaatctggggctactgcagtgatctcactaaacagtgttactctgcgtgagtgctggagggcattggggtgggcagggaaagagagcaaaggaggagaaggcatcaggcagcaattatggacatttccttaggagcatcttacagaagccactttaactttttccctaagtacagatttaacttaatacttggcagcaactctttgcctcttctatttaagagctgaaagccatttaaagtttcccagctcttgacccaacaaaaggcctgggaggtaggcaggcagcaagatttaaaactaagtgacgaactagatcctcattcatctggctaggcagtggcatttaattaaccaatttattaaatttgtttttgtgttttctttgcaaagcccaatctggtatcctggaatcatatacagggtacacctctggagtttctttctccttaatgcaatcaaatcatgagagctaaccttagacaaaaattgaaacaggccagaggatttttttatttctaaattcagtgtctatatgaataggttctatgaagagtggttataaaaatgtaagagaagaaatgaagtgggagaaaaaggaaacttatgtgatgcttaatataattttttctacctctgttctgtaataagtgctatgtagcaagcacatctgttaatttgactagaattatgctttaatcacttgcttatattttcaggataagcagggcacagaaagactgagaataagaatttaggcttagagttgatttacatgatgaaaagactgcctctcaaattgtactcatgataatgctcttacatggaaagaacagtttcttgctgagacagagcaggaatctatttggctgaagttggctttgtcagctagtcatgttaacacagtactattaatttatcctgctttaagattgctggggtttttgagagtaaagtcttgattcttctgaaccatgactggaagcgctctgtccacccaaagactcttttccatagtgatccttgttttggcaactgtctcctttttctcggtccactcatcactgcttgtttgcaaaaggtctgcctatgactgcacaatcctggagcttatacattagcttccaaatagggactgcatagcagccctctctgcacaagagatttaggccaccaagagagtatgaagctggtactctatactggcaccagtgtcctgccagcatggtgcagccccgacactggccttcatattgtttggccacaagaagagaaacaccggggagaggaggagccaaatgattaatcctgaagggccattagggaaaaaaccatttacagtgagtacaataggcaagatacccggcttttctgttcttttatttaagagagaaaattgtaaaagaaaggagagagaggtgggaagctttgatggcgatgtagctgaacttttttgtctcctgatttggtcgaatgaacttttctgatttaaatgtgtttgtttattcaagtcgaatgcattctgctagcgtcaagctccaacccaaaacttgtggacatgagatcgcagaaacagtccttgttagtaagccatccatggcatgtttctataggatgataaatagaataaggtggaaaaacccttttataatttaaaaaaaagccttaaaatcattactgctttcagctattgcactttaattattgcctcttctttggatttgtgtaaaggaagggatttgatggatgttatttttaacagcagctgggataaaggtggtattatcgctaatgctggaaaggtggccgcagacaagcatttgattagggggagggagatgagaggtcactgggttccaaaaagctgtctgatcactcctttcacaccgtcttggagccagagttgtaactcggtaggcacctgtgtgcacttgatcaaatttttttattttcaccatcagaacttgtagtctaagcttttaaaaaaatgtctctgtgactagaaaggaatcttatctcaagatgacttgtaaacaagaattcaaatcttatattatttacagatatagactcatgctcaatttcctgctttctgtttgcattcaaatggagtaattagtttgatgggaaagaaacttgaatagtcctgatgagaacaagaaaaatattcacaaagactgttactatacgtttctacaatttgaagcatttttaaaaaattataatttatctttaaaatcagatgtgattttgttaaaatcagaaaaagagtatgaccatccatatatgctacatttaaatgtgaactactaaaaattgaaaaatgtttgtagtaattgcttttcatgaaaatgggcaattaatccattttatgctactacccaggcttgctgtgcttaatgacacatataccattcttttcctagtggcaaaggtatatgtgaaggaaagtaaatagaagttgaaatgaaacttgagtaaagcacgctttgttttatctctatgggttatagaaattctcttgtgtgtagtctgatcagttgaatgtggaaacatagcatctagttagaagttttatagttacaggaaaattttgctttggcagcttgaatgtaagatttctttgtacttgactcatataggatgcacatcttctcctctccagctatgcttttgtttcatatttttattttattctggtttgtcttctacatatataaccacatctgttttgtcagtcttaagtggcaaacttctagaggggagaatctcccatgtttgttcctctgggaagaattaacaacacaaaacgtgtaaataatgacttacaaaacgctgttttcatgatagtaatttattccttttcattaagtaggacacatctatcaataatacttgtaggctttgacaaaatggagaaccatcatttagtagctacacagctctcaagataggcaggaaacttccaacagctttgaaatctctggataaataaccctaggcaatcacagattcttagggcaaatgggatcctattgactatctagttccgttttgtcattttacagatgaagaaactgaggccaagaaatgtatggaggattttgccccaaatcatataaaactgcagtgtgcttagtgcgtggactgatggtatatatggaaatgttgcaggttgggacataagctaattctttagtgtgttttttagtttacggtaggatgtgtattcccaagaaggccctgccttgacttaggagtttcagagaaaacacggtgactaagcactgttttttcagttgtgcagggctttggggcagggttttgcggtgagtgtgtatgtgtcagtgtagcttaaacagttcattgtatgctgccctggctcagcattcagttttctagtttcagtgactctggcttcttagaagagggaaccactgtgacaccagtgtcttcatttataaccagttctaagttcttgacctagaaaccttattaacctttatgtatcagattccttctatagcattgtgattctaaacttacccccagagggcagtgggtcgattaataattttttttaaatattaaaaatttggggctgggtgcggtggctcatgcctgtaatcccagcactttgggaggccgaggtgggcggatcacgaggtcaggagatggagaccatcctggataacacagtgaaaccctgtctctactaaaaaaagtacaattagccaggcatagtggcaggcacctgtagacccagctacctggggggttgaggcaggagaatggcgtgaacccgggaggcagagcttgcagtgagctgagatggcaccactgcactccagcctgggcaacagagtgagactccatctcaaaaaaaaaaaaattggagaaattggaatcagcctgaggctggggtatggtttatgaagaagtggtatggtagctcactcttcctggagttttatccctctcagtgaaattttgttatcttctgattgttttttgttttaatagctgggtctagtattattattacttgtaaaactgaatgcaagcatggttaaaaatatggggtatctgccttatattcatgggaaagaaaaaaagtgtggggtatggatttctgccttttgcattcaggtggcgaaggctgttgaattgaagcctgaagccattctctaaggcaggtatcaaagtgataaacctactttataacatatattttgctttttgcaaataactttgttttaaaaatttatctgtaattctcttttttattttttattttttgagacgtagtttcactcttgttgcccaggctagagtgcaatggtgcaatctcggctcagctcactgcaacctccccctcccgggttcaagccattcttctgtctcagcctcctgagtagctgggattacaggtgcctgccactacacccggctaatttttggtatttttagtagagacagggtttcaccatgttggctaggcaggcctcgaactcctgacctcaggtgatctgcctgcctcggcctcccaaagtgttgggattacaggcgtgagccaccacgtctggccttctcctcaccattgaattcaaaagttagatgcctgagaaattagggaaaaggattacactgcagtattggaaagattctgaaaaaatatgtcataggagtaacttagtcttaaggcttttgtcaactcaacaagtcttttttatttccactcctcattcctgtatggaaagatacatgtttctagtcaaattggaagcattttaaaaagtttcccctctattttggtatgtaaaaataattttgcttttctttttttttgctgaatatttgttactgtacaaatatgaaccactttttgacaatcacatttaatttctgatctttaggtcagtcacctttcatctttggggaaataacaatataaactaacttgaatttgtagaacccgaaaaaaaagtataaaagaaaaataaattcattgccttgagtagaagaagctgctcttgagactaaaaatagtgcttatttattttaaagtataagagcctaaaagttgatattttatactagactcgttccagaagaaagataaatttaatagctggataattaaactaattaaattcatcttaaaatgccaccttactttttgatgaattacacttatgttattttaacttatttggttaatattttactgtttatgtatttcagaccaatttattacccctaaaattccagaagcctctaaaaattccatataaccaaatattaatgtaatttagattgagagttaattagatctattcagtacaatccatgatttatactttctaggaaagtaaagatttgggattgtcacaggttattatttaactaacaaatcatagaaaggagcaacatctcctgaattcagctcagtgttttttgtgattagaacatcttcccacgtagctgtcccacgtattgaatatgttgattttatagtcaaaatgatgtttgaatatttctagtagaaaagcccaaaataatcctggcttgaacaagatagaagtttggttttttctcacataaaagaagtacagagcagcaatcagacctggtacggtagctcctccggtatcaagtggaacccgtgtttctaccctcatgctccaccgtcctctacccgtcatacgcaaaggcctctctgggtctgagttgccagctgctctagccatcaagtccacattacagcctggaagaaggggaggaaagtagaagggcataaagggagcccctcctaattgagtcagctccctgtaagcagctctcccagaatttcaacacaacaattccactcattggccagaacatggccacacctagctgcaagggagatagggaatgtagttttaaattctgtgcaggaatatgaacagctaaaaaccaggattttgttactaagaaataagggaagaatagatgggggcggtggggggagagtagtcaatatcacagtggttttatgttcatattatttcctggctcttggggctaccatgtagaaaatcaaaacacctctttctgtttttgttatgagctatggtttcttaatttagaaatctggcttaatttagaaatcctgtttcttctgtgaagtatcatttctttatttggcaatcttgactgactcttgctttcttctttcctcttgcctttcagctgttttggaaagaagtgaggtttagacttctccatgttaaccatgagcgtgacactttcccccctgaggtcacaggacctggatcccatggctactgatgcttcacccatggccatcaacatgacacccactgtggagcagggtgagggagaagaggcaatgaaggacatggactctgaccagcagtatgaaaagccacccccactacacacaggggctgactggaagattgtcctccacttacctgaaattgagacctggctccggatgacctcagagagggtccgagacctaacctattcagtccagcaggattcggacagcaagcatgtggatgtacatctagttcaactaaaggtaaggcaaggtctgtgatcctctcaggatagaagttttcaaaaggctgtggcacctagagactgtgttctgtaatttccagtgaggaattgtccaggaagaaaagcacagtaccaggtttcaaaccattatctttagagataaacatggaaataattaattcttctctgattttactacatgtgctgattatctagaatacaactggcctttggtgatagtgcagagaaatggggaaagggaggggtatttttgtgcagtgttatcaaaataagttacacagaataaaagtatttaaaaactcttacaaagggtttaataaaagactcttataggtaaaatatcaaatgcagctgtgattgtgagtatttgtatgtgactgttatcttcagttgaagctgatgctgcctttgtggcaaacaatgaattctgacatagtagggaagggcaatgttcttttacaatgagttgtttcatccaggcacaatgcttcatgtagaacaaaggtgattttatgacaactcatctaaagttcagacatttaaaaaaaaagtctgtggactcagaagccctttaaaagcctgactgttggcgataatgaaatggagttgctagtaaagagtactactaatagcgtttttggcctagggacttcaagataaggtgaacctcgccctgccatagtcactcctctctcccaggtccttgagggaaatacacactcaggtcagtgacctgcagagcaagacaggtttataaccaatcagggcactggccacaaaccccatggtaaatttctagtcaattagaagtaacactaaggaaacttcctttacctaaactggttcatcctaaataatctgaaatgaaaggtcaaacattcttggatcttaacacttaaatggtttacaggatgcagccatcagcctgagtgggaaagatgagcacttaaaatgaagcatagagcctagagcagagcaggctcagccttctcaggctggttcagcagatccagagcccagctgccccattacagaaagtgttcaaatgagtgtggtcgggggagagaacaaaagagccagaatcttaaaggtgactgggcttctcccaggttgagcaggtctagtgtctgatttctacaggttattagggaaaaaagtacaaaaaggcaacagagagatggctaggaattagcttcaacagaatgcaaaccccagccatctttctgctgttgcagcagggagtgatttgactcagtctgtgaaacatggtttgtataatcagaatagcaggtctccaactccttgaggttaaagtgaaatagaaatttggaggctctgctttgcccccttcccttctctgtcccctccaaggctacccttacatgtagctcccataagtagatagggggttaggtttataaggaaagtcaactactgctttctggaatctttcagacttacatagaaaaggtggggacaataaagggaaatatctttagaagtctcagtaaaaaaaatgtgttgttaagggctattaaaaacattaatgagtcaattaactttattgaattacattaacaacttggaagtgaaaatttaaattttagttccaaataagaatgtaaagtttttgtacaattaacatagggttatatttagtgtttgagaaaccaactctagggttgtatgtatttttctcattggaactgcctatcacgttcttaccttggtcaaaaggtatttcacacccacctccatcagctccatcccttagtgtggtctgtctcccctgctgagaaaggagccccaggagggcatgaagtcaacacagtaattacatagtagttactcagtcaataactattaaggggataaatataaattgtcctatgttcattttatcctaggatgtctatcatgacttttcggggtactagtttcattaggttacttaaccaatagagcctttccacattgagttcaaagtcaaggagctctggttactgcatgtggcctcaaaaaaggtctacacaagtgtttggttatatcgcttaatctacttagttaagtttctcttttattcgtataatatttctttattccaccaaataagcactgtcatgcattttttcaaaaatattttaaataaatatcactttttctgatttccacgttgatcataagaataaacgggaacttgggcacagagttttatatgtggaaacacaacaaaacaaccttgtagaagcagctctcaactgaggcctttggcaaagcagatgggcaggcccagactggggatggccagctgtgatggggcatcttagcttggctcctactaccttgataagttacccaatttattaatttacagtgaaaaataaccatctcaaggctgggaatgcccatggctttgaagatcatctaggcacagataattgcctaatttatatgttcatctcagtgttttcccaggagccccagctgcctaacttaatctccacttgtgtctctagtgggcatctcaagcccatcaaagagctgttaatcctctcccaatcttaccagtttcagtaaacgtcactactctgttaagccaaagcatgactctccactccacatacatgtctatcaacaagtcctgggaatccatctccaaaatatgccctaaagttactctcttctctccaacactactgctgccatcctagtcaagccacatcactgcttgcctaggctacttttagaactttctaactaatcttgctgcttcttttacctttagccttgcagtttattctccacccagtagccaatgggatcttttaaatacgtaaacaagcatggtgactcaagactatgatcctagcactttgggaggcagagatgggcagattgcttgagcccaggagtttgagaccagactgggcagcatggtgaaaccctgtctctactaaaaatacaaaaattagtaggcatggtggtgtgcacctgtaatcccagcttctctggaggctgagatgagagaatcacctgagcctgggaaattgaggctgctgatgctccactgcactacatcctgggtgacaaagtgagactctgtctcaaaaaactaaagtaataaatatgtaaatgaggtcatgtcacttccttgcttcctattggacttacaataaaactaaagctttttcctgtgactctgctcttggctgttcctctgatcctggctcctgtacttttctccttgttcataaagctccagattcactgtaagttccaaagaagcattgggtttgttcttgtctgacagcttttcctgttccttctgcggagaagctctctttccccattgttacatggcagattctggatcctcaccaagctatcagccagagggacagtcatgtttaatatctggagatgcaagcctgggagagggttgggcagggattggcagtgaggaagtagggtctgtgctgtgtttgatgaggggcaagcacaaaaaaagaagctactcattacctaacttgtctacacacttcatactccctttcacactgctggttctaagtcttttcatcatgctcttctctaccatcatgtcaatacataactttttaaaaaacgtagttggaaaatgcttttgaaaaatgcttagggtaggctctgtctcagctctttaattaaatgtccttttttcaaataagccattcctgatccctcttcttaaaacccctgccacccagccattatctagtccatcacctagctttattattattattatcattatttgagacagggtctcactccgtcacccagactggagtgcagtggcgcaatctgggctcactgcaacctttgaccctcaggctcaagagatgctcctgcctcagcctcccaagtagctgagactacaagtgcatgccactatgcccagctaatgtttgtattttgtgtagtagagatgggatttcaccatgttgcccaggctggtcttgaactcttgggctcaagcgatcttctagcctctgccttccaaagtgctggcattacaggcgtggcctttattatttttttaatggttcttatcactagctgcagttatttatttatttgcttgtttgtgttttccctaaggacctgagctgtcaagttttctattgtatgtctgttgtctaggacagggccaggcacttaggactcaattcacacctgttgttgtataggtgagtccaagcctatgtggtcagtgccttctttccccatagacaggcttgcacagcaagtcacataaggaaggctgctcaatgaggattgaattaggacaaaggcattggatgaatcaaggcccaatatgtttggggcattgctctcccactaggaagggtctgtgagtggttcagaaatctgggggatcttgtctggggagtctgcccaggaaagtctgttcttcttctgtaaatggttgtgcctggcccctctcacatccccctttttgttgtactccttctttggtaatgatttcggttaataagcatactctcaggtcttctaaacccagagacactctttttctttaaaagtgattttatcttctggtcattgtgttgatcctaaagtctgtttcccagagaccactcttatctcccttatttccaagttcttaggggaaattttacctccagaatgaactacagacaactgttataaagttcccatgggggagtgattattcttgagagtgaataaaagcagagattgaaaattggaaacaatgaaatatattatactgagtacttttttgcatcatttttaaaactgaaaatgaaacctacatattttgcttcttagcttccagatattcttcagtaagaagtatgagaaaccagctgaaccaaatttagaatctctccgccttctttggattcagaagctgtgctgtacaggaaaaccagatcaagaacctttaaaggttttgattttaactgagacctctggtttgggtgaatgtatttggttgctaaaaaggcaaagtaggtatctctgcttcctgattaacagtcttctcagggagaatattatttgttttcctggaaacgtgatagcaggaaagaggcaaggtgtaggctagctagcataggctaaatgatatggctggataacagacagaagccttgaagtggctttctggaatcagctcccccaaaacccacattaggtagattctgtcctaagccacctccacatgagatttgggtctgtatctttgattgattgtgacatgactctcaaagttagagtagtcaacagagactctgtttacaagatgttctgactgggctgtacccagactgagatgtctgggacatctgaagttaatgcacatacccagtgatcacatggggtctggagggcctactgggaaaaaggattgaatcctctccacagctgggatttggcaccatcagatggaccttatggacagaagatgttggaagtccaaggataatggggctcctaggagaggattctctgtcaccatgggacaaggagtctgccccagtgtggggaggaaaggggatggtgagttgtggtacagtatgttcccaggcctggaacctgggctggcaccagggcagtgtggataactaatgaggggaaagggctatggttgtgacttggaggacctccccagtggctgaagccaactttccccttgttcagcaggtgcaaaagggaaggattattctctttctcccactactggagcataactagtaaggctacctcagatggcagtggtgccaccaaggtgacaactgtggtgtctagggtccatagtcgtgacagtgagcaacagccagggttgattcatgggcatatctaaaacatgcccttggattctcataaattcttgataaggggaaggaactctgagtggaactaaacttctgacattaaaagttactggctcggtggattctgatcttaatgttaacttgactgtgtgttaaagcccgaagcattcaatttataccatctttgagtggtttccagcacatcttaaatataataagccctggtttaagattgaagacaaaatatctttcttttctgcgaagagtagttattttcatttttgccctttagatcactatttttcaacaaatagatcttaacccatttagcaggttgtgaaatcagtttagtgaaataaagagctaaacaatgaattagaaaaggatttcatgaataatgataagtgctatgttgtaaaatttggttttctgtccttgcgatagtttgctcagaatgacggtttccagcttcatccatgtccctacaaaggacatgaattcatccttttttatggctgcatagtattccatggtgtatatgtgccacattttcttaatccagtctattattgatggactcataggtgggaactgaacaatgagaacacttggacacagggtggggaacatcacacactggggcctgtcatggggtggggggagtggggagggatagcattaggagatatacctagtgtaaatgaccagttaacgggtgcagcacaccaacatggcgaacatatacatatgtaacaaacctgcacattgtgcacatgtaccctagaacttaaagtattaaaaaaaaaaacttgatttaattaaaaccaagttcttggtcatggtgtaaaaatgtatttttttgaatcaacgccataacagtttgatagtgactgctttaggccattcccaactttcttcaagatctttgatatatactttaattttggaacatattatgcaaggaaatgtaatctggtgctgtttgtgtaacattattgttttaattcttatatgggattaaaatttacacgaaatacccatcaaatcagcaaccccaaaagcatatcccaaatctctgaaaattggaagatgaggttgatgtatttgttgatgggtatgaggatggtaacatttattattttcccaaagcccagatttatggctgtaatcctttttttggtggatgggtgctatgatctcaaaattcgtatgttgaaacttaattgccaatgtgatagtattaagaggtggggtctttaggatctgattaaataataagggctctaccctcatgaatgaaattagtgacctcataaagaaaggttacagggagctacggcagcaacaaggtgccatattggaagcagagagtaagctctcaccagacacagaatctgctggtgctttgatcctagactttccagcctccaaaccatgagaaataaatttctagtgtttataaattacccagtctaaggtgttttgttatagtagtctgaatgactgactgtacattttccttagggtgtcttcttagggaagttggatactagtggtcaagtgtatagagagtgtggtttcattatggtggttattagtggaaatgctttttctacaattagtgctaagattgtgtaagactatttggtatcatcaactaataaaaatggttgaaataagaaggatgtctgatgtttgaatggctaattttagatatttagaagacccaattatgtgggaaaaagtctatctcaattaattgttgaataattatctctctctctcttccccatccaatgctggaaaacaggctaagtgctaaataaatccttttttgattgttgaatgattgatgtattttcatcatgatttggggagatgatataagcctcagacctagcacctgttttggactacttatgaacactcttgattaagatatagaaaaattaatgttggtggttcctggcacattatcgcagaagatctttggctatacatgaaccttagccacatgcactaatgtatttagagctcagaatgagagcattatttgtcaaggtggctcagtctaacagattgtatagctgtgtaatttttcattagcaaaagtagcatggaaactgaagattaatacaggttttacaatttgaaagaaataatgaaaacagtttagagaaagtaatacatttcataaaaggattttgagaaaaatctaaagaaactggcattactttgattagagaagtgttattggggttttttaaagatgtttgtttaataatgtcaccatgagctctcactgaacaacaatagctatctgtttttgtggtctcacaggattagatatttttaggggcatccaccagaggtaggatatgagttaactctttccttgccttgagagttttcatttcaattgcattcatagagtatctaatatatactaggagtcttacttatagtatcttatttaatcctcacaatcaccctctgttagaaatgaggagactgagtctcaaaaggttaagtgatcaacttgggagtcaaaccatgtattttgagcctcaagtctaatattctttctattttggtgcactggcttcatacccttgtacagatgtgagaaatttgagtggctataaagcataatagttccggctaggtacagaggcatgtgcctgtagtaccagctactggggaggctgaggcaggaggattgcttgagtccaggagtcctgggcagtagtgctctctgccaatctgatgtccacaccaagtttggcatcaatatggtgacctcctggaagcagaagaccatctggttgcctaagaaggggtgaactgaaccaggctggaaatggagcaggtcaaaactcccatgctgatcagtagtgggatcacgcctgtgaatagcccctgcactccagcctgagcaacatagcaagatcccgtctcttaaaaaaaaaaaaaaaattctggttttcttacattagacagttaagaggaacggatatgagggtggggggcttattttattaagaagatccaacctgtgtgtattttaattcatcataagtaggaatgtgagtgatttgaaatggggacatagatgaagtcctggggtccctttgagtagggttgtcatagctaccttgaataaggtacctatgctgctaccttgcccactctgctgtcttcaaaattttacatctcaaaagaggggaaacgtaatagaattaaagtgaaaaggaagtaagatgtgaatgactagtatcctaacatggaggtgagtggaacaagaaatgaacatctttaatgataaatgttaacaaatcaattgatttcaagctatggcatgtgttagagaccatggttctcacccttggctgcacagtagaatctcctgggaagctttaaaaaacccattgtccggccaggcgtggtgtctcacgcctgtaatcccagtactttgggcggccgaggcaggtggatcacaaagtcaggagttcaagaccagcctggccaagatggtgaaatcctgtttctactaaaaatacaaaaatttgctgggcgtggtggtgggcgcctataatcccagctactcaggaggctgaggcagagaattgcttgaacttgagagatggaggttgcagtgagctgagatcacaccactgcactccagcctgggcagcagagtaagactccatctcaaaacaaaacaaaacaaaaaaaaaacaaaaaaacaaaaaaaccccacacaactcattgcccaggccatgttccagagcagtcatgtcagaatctgggtttggacccagacatcagtcttttaaagactccccaggtgattccattgcatagccaaagctgacaacacctggaaggagatgcttcagagcagagggcttttggatacatcttgcttgttccattcattctccctttccttccaaacagacagccaaggatttaaatacacttttttttcccctcaggagcgagggcttccacatgatttgtttgaacttcttcagtttttcaagtaacttcataaagtcagtatacgcaaagggaaggaagggagtaagtacatgccagatacttgcctatatactttaaatgtactatcttatgctgcccatctatggtttttcgggttacatatgaaagacacctgttgaagttgtcagtgtaccacctgcagggccttatgtggctattttacatcgtcatgagagacacaaacatctttgtataggcaaaggtgttttggatatgaaagacagaatggttcttttcttgtctggagccaaggcatgatgggaggtatatacatattattgagcctggtggaaacacattatgaaagaccacaaaaatttaaaatggctcagagaagtctggtcttgattaaggtagtcataaagacacccacaaataaagcaataatgtggtaaaaaaacaaaactgtgtcttagggtgattttgcaagtgtgttcaggttagtctggaaaggggagagatgtgagacagttatgaggctgttgagtaagtgatgcagagtagctgggcttgggtggtggaagtgggaagcaagaaaaagttcatcagaccagagagcaagcagaggagttagaggcaattggttttcttagtttaatttgctctcgtcacgctcaaactgaacttatatgtctcttgtcacttggtattagggctgagggttgttttttctttgtataaatgtgaatagaataaaaaggaactgaatagaaatctcttctctgtccactttaacaatgtggctgttatcagttggctttctggtataagctgcttctattgttctgtgatactttaatgcaccatttttcttcattatttgaataaggaagatttgccaaatatatcattaaatggagaaggaatatgtgaaattcaatatgggaagtgatctgctgttctctcaagaaagagggaataattataaggtctactggagaatgagttcagaagtctgacaaactggcctttggcaaattatgaagaaggtcttcagtgcttcttgcattttttcctcttttccaaaaatgtaatttctattaaaagcctctataaagtaattcaagcagtagtattaacaacagctgcatcttcaacatttacctctgcaaagggaaaatggaatctatttctgtaatagtgagagtcaggcatgatgaggagagagattgtcactaagggtgattcttgagtccttcaagtaataccacataggagactacctcttatgtatgtatctatgctcctatcttggaagtaactaggaataaaatgctgtttcataatacatttaagtgcagtgtttacttctgttagcttctatctgtcctcccacagtccaaatgcttgggcatggcctctaagttccttgaaaatctagaccagctggcctgttgttccttctctcgacattttccttcctgcatctgtaacaagccatgctcattcagaaattcataccttggaatatggtttcttctctgtctgggaaattaccttattctttaccccaaacttctctgcctggaaaaattgctgtacgtactctgaatgatagctaaaatgtcatctgcttggttaaaccatcttgccagctaagctggttaatccttttgtgggtttccggttcttttctctttttttgagatggagtctcactctgttgcccaggctggagtgcaatgatgcaatcttggctcactgcaacctctgcctccctggttctaccaattctcctgcctcagcctcctgagtagctgggactacaggcatgtgacaccatgcccagctaatttttttttgtatttttagtagagacggggttttgccatgttggccaggctggtcttgaacccctgacctcaagtgatctgcctgctttggcctcccaaaatgctaggattacaggcgtgagccactgtgccctgccagttctccccttattttcatatggtgtctgtcataacataatcatagacacagcattcaatttgagatattactactccagctgtttttttttctattccataagtacctatttttgttgatacatttgtatgactttgaaatccagagacaattagcatacaatttgtttcctttattttgttgattaaatacatacaaactaacagactttaaataattggcagatcttccttagggaaagctagctctcatacctatactggaaatctgagggtgtgaatcagattcctgggcgtgctggacattttgtatttaggaatgatttgagggagaaagcctcacctcaaaagttctattggcaattttatatataatgcatcaaagaatatttaaaggtaaattatgttggttgataacttgatgtcattaccataagaagagattcaaagatggtgtattttagcttatttgaattttctgtgcaatattttgtatagacaaatgtaggatttgtataagtgggtacacagttacctcattataatggcaaaaactatttgttaaataccatatggacttgatgtgctcaattctatataaatgtgttaattctggtagttatcccataatctgttggattatgctcttttataatgagtaacgagctaggtaaataaaaatgaatctaaactttgtatggattaatacagaagatgtcattttgtatatgtaggatacaaggtttccttttcatttttctcctttctgcttcttgtgatctgcatgtatctcttcttagtagttataaacctgagatatctgtatttcaaaaaaaaatttatttttactatcatagattaagttatagacatgtaagaatagattgttagaaaatgataagttttcttagagctagtagacatctgtttttttttttaattttcaagattattaggcttagatttcctatagatctacaagcaactattttttttgtctgttacgggatcaaaagtataaatattttataactgtttaatgtagttactttaaaattcagtacatctttaaaaatgcaattccatgaatgtgttgcaggtttccagaacaagtttattgacacttaaagcacaaggctttataaagacaatgtatttatttgatagaattttatggtttctacttttattttaaaaagcaaatgtggtatttttttactcatcacacttaaattatttgtttgtggtcttttattgattttttatagatttgttacccaaagatagcaaaaaattcttattctgaaatgaaactatttaagataattatgttttcctctcctcatgttatgaccccagctaggcatcacagtatgaattccatatttacaactattctcagccatatttgacttaaaaccagtgattcaaggcctagcaaacaactcgtctctctacttaaaaaacttcatgcacactcagcctgcactgctctgagagcaccttgtctcttgatacataatttagcaccagtgtttactaccttgcattctcatttgcttttttcatatgttgttttctagtttcctcaaacaaagctaagagctttttaagggcagtttctcctacttttttgtataaaattgcaaattctattttggtcaactaattgactgaatcctcgtgttatgattttaaattttccttctgttctttctaagtggcattggcgtactaaaaataaccataacttcccaaggacatttcattcacaagtatttaaaaattagtgtaattgttcatagaagctttggagttaggactcggccaaaaaagcagaattttcctggaattaacccagagcaaaatttgacatttttaaacaataagaatgagatgttgggtaaccttaattaagtttcttcaaagatagcagactctagttaatacgacctaaagtttgggtcaagttaaattttgaaaccctttgaaagtcttttattaattcaactcttcaaaattatcagtgtatcacataatcatgtttgagagaaagtagaattatgcatctccctccatcttggactagttggcaacttaatcattcatttacatccattatctgtccaaatgagaggatgtgctcactcatggccttctctctaacagctcctacagtgggagtcttggtttcaaaggttaaaacaagtacaccgacatatttaaatcagttacaaatctacccatgcacattgctttttctgtggtaaggacagcaaatgggaagaactagaaatgaaatgcactggacattttgattaatgatgccccggaccaaaggtcctttttcagggaaggaaaaacatctataaatgaggtaaagttgagtgattttcatttgtagttggataacaatacttcagtggcagcttctctttgttctcaattgcctggactagaaccaaaatctggcatccacatcttattactaactttataacgtggcaatgcctccctttcctgggtctcagcttcatcactgtaagcggagggaactacagagtaccttctaaccctaacatttcgtgacaataaccaagtacaccctaagcaaactgtaaatttgttgccaagtttgtggccttgatccccaatctattctttctgcatctgggtgaggaccctttcttcctcttaaaatttctcaagtcctttactcttctagtaataattcgagtgagctacctatcctttatgctttgttttcctcaaagcacatgaattatctcagttaatctttaaaataatatctggccctctagtgtgggacctgaggtacaaagagggtaatttacttgcctaaaatcacacaactacaaagtggtagagctaggaataaaaactaggtctttctaatcctaaagtgtgtgttaacctttttagattggtaattttttgagaatatgatgaaaactataaactgtcttctcaagacattgcacacatgtgccagtaatattttgcatactatatcaagagaccctttgaaacccattcatgggggactccaagttaatacctgtagtatactatatcatattgctttttcagtttacttttttcctgatttcaaaatggaaagatcctgagagagtaagggagatattagcaatgcatacttaattctacaatcttgattctacaagggagatattattctaaagggagatattagcaatgcatacttgattctacaatcttgattctacaatgtttagtaaaagatagatacctggattcttgtttgcattaggtttcctcacatacatgagcatcagcaactttggggaagctctcattcccaggtagaagatgagattgcaggagagatcatcaccctgacaaattaactctccagtctgctctacaatgtccgaatttcctttaccctctacaaaggctttctataattagaagttaggcattaaaaattaatgtcattgggagaagtaatgcattcacttccatttacatcaagaataaataccaggctggtgcagtgactcatgcctgtaatcccagcactttgggaggccgaggtgagtgtattacttgagatcaggagtttgagaccagccttgccaatgtggtaaaaccctgtcttttctaaaaatacaaaacaaacaaacaaaaaattaggcaggcatggaggtgcatgcctctaatcccagccactcaggaggctgaggcaggagaatcgcttgaacccaggaggcagaggttgcagtgagccaagatagtgccactgcactccagcctgggcaatggagctagactccatctcaaaaaaaaaaaaaaaaaagaaaaaggaaaagaataaatactttcttagaaaagattttttgatggagaagacagctctggtcccataaagagggaagggaaatgcttcagaaagaggccctgccaatcaactgccagtttttactttgagtcatatggcctgaggactgataatctaatttaagtagaacaaattagattccaagcaagtaggtagtaactgctaaaatagtggaaggtattcttgaaactagattggggctgtcttccagaatttatagggcatattgagatgtcctggccccttttcttgatagtggttaatttagttcaaactgcctcagagatttcagaagcacactgagagcaataaaagcttgatgcctctttagtgtcagccagcttttaatggctggaatgggagttcttcaaattagtgatagtcagttgtcatgcctaccctcgtgcctccttcttgcctgctggctggttccaggagtgaggcagagtggaaagcccccaggatttggagatggcaggcctagttctgctcctgtttctgctacttactagaagttggacaccaggcaatttagtaatttctatgaacctgaatttccttagctgtaaatattcacctctgaagattgttgtaaaaatcaagatcattctttagaagaattttgaaatttctgatgctacatgaaatgttagtagttctgattatgattctatcccaatccaaatactgcttgctgattttgtgactgtggtagggtgagctgggatgtgtgtgtgtgtgtgagagagagagagagagggagagggagagggattgatttgtggcaacttatatatgctaccaatcaaaatacactcttctataatttggttttggtcattaaaacacaatgaaatataggaaatatagcctcacttaacaaggcctgcaaggggcagggcatattttgtttgaaatttttagttaacacaatgagataaaaataagtttgactctccattgtactatatttttattgtgtattagtacactttctctttcaaaaatcaagtgcatagtactgaacatacctaaagctttctcaggattaatgatactgaagtttttgaagtcatcagttataatatcattttcacgtaagagtaacagatttggatgtattaagagatttatactgcaagtttgctccttgcttcaatatcttttcttgaggtttctttttttccttctaaaaagtagaaggagggaggaatcgaattaattgagggccttggttagttatagttttactgttaagaatgctacaatttgggccaatttggtctttaagaaagcttctttaaatcccaatatagaaaaaatcccttctatgtgaatatgtttactatatcatttataatagtaaaatgttgaaaataacaaaacgaggaaagtggctttattattatgttttatctatctaatatctggtagtggaaaaaattagtttactctattgctttatatttgcaagtggattggaatttggaaatacttatgaacaaacaaacatgtctcctactttgtgcaggtctgaaagtcagattagcctttagctagtttgcatgattcatcaagactaaattttatactggctggtatacaagaaaataagatattttgttgcttcagtaattttgatataatcaaaactcataagaagaaaacatgagcttcctaattactacatattcacttagtgagttgaataatttattatccttttttaaaaaacctgatcctactttcaatgttccagttcccattttctgcttccttccatttatttttctttctggcctgttctgcagagtttgcacaaaagatatagctttatttgtatacagctatttatttcctagtatgtggactagtatctaggaaacttgccaaattagcatagttatgccaaagtacagaaactatgtgtataaaatgtgcacttgggcctaatattgcaggcattgcagctttttagataaagctgtcgttgactaatttatttctgtatcttctagttgtctcctagacacaagttggttgtttttgttgttgtttaaacaaaacatttaatattttttattataaaataacacataaaatatctatgttgactgcattgcccaatatggtagccactagttacatgtggctatttaaatttaaataaattataatgaaataaaactgaaaaaaatgcaatttcttagtcacactagccaccttttaatagtagttagtggcaactgtactggacagcaaagatttccaaattgtatagaattctattggatagtgctgattgatgtcttaaccctacttcctccaccccttttctccaaatcaaaggtaagttgtggccatatttctactttaccaactataactctatgctatcatttttctttttctttttcttttctttacatttttttttttttttttttttttgagacatggtattgctctgttgcccaggctggagtccagtggtgcaatcacggctcactgcagccttcacctctggggctccagcaatcctcccacctcagcttcctagctgggactacaagcatgcaccaccacacccaggtcaccatgcttggctaatttttctatatgttttgtagagatgggcttttgccttgttgcccaggctggtctcaaactcctgagctcaagcaatctgccgaccttggcctcctaaagtgctgggattacaggtgtgggccaccatgcccagcctatgctataatttttaacgctgcatattaatccactgcctggctgtgttttaatatattttcctagtctcctattcatggatatataggttgcttctgttttttccctattataaaaagtgtggtgattattttctttgagaatacatctttgtatacttgtctaaaatatttaaaattggaattgcttagtcagactgggcacagaggcttatacctgtaattccagcacttggggaggctggtgagggagaattgcttgaggccaggagtttgtgaccagcctgggcaaaatagggagaccctgtttctacagaaaaaaaaagaaggaaaaggaattgcttggtcaaaggctatgcatgttttacattttagtacatgttgttgaactgtgctccagagaccatattaataaacaattccttggttgattgtgaatattcttatgtactggggcaagtgactgaaattctctaagtctcatttaatttttctgttcaaaataggaataatagtatctaccatttaccttactaggtagctgtgagatacaaattaaataatacatgtaaatacttttaaaaaatgaaagtgctactgtcacgtatagtattcatactatgaagccatccgttgttggaaggatgaaagtcagagaccctgaatcctctgtgatcttagtttaacactcaaaataaggaatggtggtaacatgagctttaaagacttcctcatgggaaagagaatcctagcttcagaaacataatttattattgtagacataagcacaccaatatgaatgtaggattttccattcaaggacatttagagaagtgggataatttttgttttaatctgagaattgggtaacatatcatccagctccactcctcattctacagatgagaaagcagaggccccgagaagttgaattctcatgttcaaactgctgacatgtggcagaatctaggttagacctcagccctctgaccctctatccagcgtcctttcctctatatcccacagctctaatgatatagtcacgaggtggcgggattttttttctatccctcagatgaaaattaagccagtgttgtaatctagtttgataactattagttatctagaagtgtattcttaaaatcaatgcctgtataggcttactgggctatttgaaagtcaggctactaaattcttattagccacttgaaattcctgtggagataatagaatttttcttttctttttttttttttcttttcttttttttttttttttttttgagacggagtctcgttctgtcgcccaggcgggagtgcagtggcgcgatctccgctcactgcaagctccgcctcccgggttcacgccattctcctgcctcagcctcccgagtagctgggactacaggcgcccgccactgcgcccggctaatttttttgtatttttagtagagacggggtttcaccgtggtctcgatctcctgacctcatgatccgcccgcctcggcctcccaaagtgctgggattacaggcgtgagccactgcgcccggccgaatttttcaaactgactctttaagccaaattagaaataaaatctttttctcatgaatggcatccaagttagacagcattccttagaagtgaattatttggtaaagctctcagagtctgtctgtctttggctcatctctgaactttagttcatttcattttatgactttacatgaagaaaccatgagtacggatggcctcaagttatgcaggagatttcagtcagcctgcaaaacaaaccagatggccaagtcctctcagaactgtctgaacatgtctcaaagtccattccctgaatctatccccaggtaccttcctcaggatctctcttttcactggcattttaaaaaatatatctgatagaagctagcaataaataactaagagaaattgagattgatggcccttttatttctttgcatctaggtcttgtatgaagcagcagagcttttatatttagaaagggaacacccccttcagcgagtcatgtgctagaacacaaccgatgagaatgcttgtccttctatagcaaggctcgcaaggtttctgggcagagctcagcttctcatgtggccatgcctgactcccgtgccacaaggctttacatgcaaagcagtagttggtcttgcacttgctaatgttttcaactatgaaacagtagaaaatgaggtcacatgaggcaaggactaatgctggagcagaccagcaggaagataaattacagtgaaaacttgaccttccttccttccttccctccctccctccttccctctctccttccctccttccctccttccctccttccctccctccctccctccctccttccctccttctctccttccctccttccctccctccctccttccctccctccctccctccttccctccttccctccctccctccttccctccctccctccctccctccctccttccctccttctctccttccctccctccctccttccctccctccctccctccctccctccttccctccctccttccctccttctctccttccctccttctctccttccctgctttctctcttcctctcttcctctgtttctccctttctccctttcttcctttcattctgggtcttgctttttcacccagaccagaatgtggtagcatgaccatggctcattgcagcttcaacctcctgggctcaagctatcctcccacctcagcctcctgagtagctgggactacaggtgtgggccaccacacccagctatttttgtttcaattaaaaaacaatttttttttttagagatgggcctcactatgttgcccaggctggtctcaagcaatccttccaccttggcctcccaaagtgctgggattacaagtgtgagccaccatgcctggccaaaaacttgatttgtatgtgatatgaaaatatgcagataatacacatatttaggtctttaaagagttttgctttttaaatttcagatttctcttttgctatatataaataggcatataattttagatttgaaatgagtaagattattttccccaatgtaagtgcttctttatgttaaattgttttctttcttttattcatttaaaaattgggttgtctatttttcttgaacatgcagcaattagatagtgtgatgatttggatgtgagaattatccattggaatactgtctcagtgtatttgccaaattgtcatcaagcataatttactcaaaatcctgagattcttccttgaaaattaatttgaaaataaatttgcttgccctctcctcttttgaagcaaaattggttcactttaaaattttcttttgtgatgttgttgctaggggaacaatatggtaaaccttgtaatctctgtcctctttattttctttagatctactctgatctgtttttatcagttctgtcctattttaaaattatataacacttgtaacctgcccccaacctactttggaagtactgaagtataaatcctaaacaaatgactgaatttactgactatgcatctgcctagataaatgggttgggggtaaaggtgattcaccaaagaaggacattctggagtggctgctttgattagaagaagggattttattgtaatcttaacctggtgatttttttaagagctgaagattttatttgtttctgttttttttcggtggtagaggagcatatgtagtaaaggacagatatatatgcatttcaaaaatttagaaatggctagacttaataaatacatgagtatagttgattataaagcagaaacagtaatagtgctaataccgatgggatccatggaaattggcctaaatgttttcacggtgtcttatatgaaaagcaacattcaccatggtttaattttaatgctgagcagtcttatactactttcaatgtcattagtgccatcttacttaatttgtcaaatctttcaaaatgaagaaaaaatagaaatattgtctttaggccacagaaatatagtttaattttgacttcaaaaaaaccaaagagatcaaaatctttttacaaaaaccaaaatacaagcacaaagctataatactatttaaacaaatcaccaaatacaactgttttcagaagtaaacatgcaaaattttttgttttattatcaaataacaaaaatatttagctgatgacaagtcttttaaagtgaattatgctatcaaattgaaatttttgtggatgtgtaatctaagtcaatcaagtacatgttatcattcgataatggtttgtcaaatggctgggtcaaaatatctgtctcaaaataggtaccttaaattatcatgtatctgtggttggcaggtaggactggtcgtgaccagagtcagagaagaggatcttgtccaaggaccccaaatataactcttaatggacgtgctgtttcttttgtgctaataattttatgcatttttaatcaaaggaagatactaacttacccaagaggagggaattacatgcattaggagaaataatttatatgaaaaaatcaatgatcttcaacttatgatgttgaaataaatggtagtcttcaaaatacttttaaaacttcaaaatatgggatggaaattataaatttagccaagatgtaacttcatagacagactttttttattgccctctgtctgaaattatatcaaatccacaaggtagctagcatctcttatatcatattagtcagggaactctgagcagcagttaaatgtgtcactgattaaatggaaaaaaacaaatcatttctgaataaatttaatttgttgaacaggcacaatagacgtttcttggtgaagacaaggctggactactactgagtggtatctactgagtagggcctgaggaaatccaatatagaaaaggtagatattgatcaagtgggaaagggggaaaggctgaagctcccttggcaatggacatttttagcagtatcaggtaaggtcttgaggattctgaaccctattacatcttcttcactgtttggcttcaaatggccctggtgtggaatagaggtaactcagaattagaaacttgccttgggtaactgagagttcttaatataacaaatatggtgagagtattccctctcccatcatacccagtaatgtgctaggggaggctgaactaaaaaaaaatcttaaccttcttgttaattaaagggtcaactttagaacttcaacacagtactagatgagagagcaaaaccaaacagaatgatgaccacgctggaaattcctccctgtgtgctgctggcgctgacatcctgatagagttcaggcgcctggtgaagctacacagacggtgcctggtctccagaccacatgcttttcatctacgtcataaacatgaaatttctgaattgttccattggcattttcatctctgtttagatagagatgttataaactttagttatataattgggacccatatcatgccaaagtaaaaaatttaaacatttccattcacttgcctgagacctccttctcctaattttgcaaagctgacttggtcatttcagtaactcacaattatttactctgacattttgggattacatcagacattctatggtacagttattttccaatgaccaaagtcatatcttattctatctgcctacttgatagcaagttagtgtgagtgaaaagccttggcaaatacatataagtatataaaagaaagttaatttgtttaggatggaaattcttttaccaccctagaactgcattagcatcataattatttcaaatttgctttcatttttaagaagggtgcccaaagtaaagtctacttagaaaaaacaattttttagattaagataatgatcatttttctaattatgtacatctttaatatatgctccaataactatgagctgagagttgtaatgttgtctccctataaacttgaagaagcttttaacttctggtatgttgtttttttcttcagtaaagtaaggataaatactgacttcaaaaaattcatgagtggtaatgatgttacctaatttttgcagatgacagaagctgtataattatatatgttgctgatgctatacttagttttatatattcttaggaagttttcctatattatttgtaattgtaaatgtcgctgaaagtattattagtagtcacaataggaatgaagaaaatgaacaacataaagagttgattaccatacaaagttattattttttacaaaagaggttaaggagcagaataacatctttgcagacaataaaagcatgccagaaataaatgcccacaaaataaatgaaaatgatacctaatatttccaactgagccaaaaacaattgaggaaatgatagaagctatgaaataaaaacatgaatcagaattttaaaaactcagaaatatgataattgaagagaaggaagattttaacagagaggtaaagtcaggaaagaattagaaataaaaggaaaaaagaatttcaggaatgaagactatgctagaaggaaggaatgcaaggacaaaataatgcaacagatattagtttaagaaaaacaaagtatgggtgggaggaaagacattcgtaatagccccaaactagaaacaacccagatatccatcgattggtgaaaagatagagaaaatgttattaataaaggaacactacttggcaataaaaataattgaactacttatacatacaacaatattaatctcaaaagcattatgctacatgaaataagtcggatataagaaagactatgtgctgtggagttcaattagatgacattctaaaagatggcaaaacataggaacaaaatacagatcagtggttgctagagattgaattatgtatatgtgggtaagggggaggcaattgactgcaaaggggcatgagataactttttggggcaatgaaaatgttctagagtttggtcatacagctgtttatgaatatttgccaaactatacttataaatgatgaactctattgtatgtttactacaattcagtaaaaaaataaataataaagggataaggttttgagaaaaagtgatagatacagacagattgctaagagtattcaacacatacataatagaaatctcaaagaaagaaaacaaaaacagtggaatagaaccaatattaacatcttcacttccctgaaataagatttaaatgatttaaaatttcttattggaaaggcatacatataagaaaaaaaatctacctagaaaagtaaaaatcactggattacaaaaaggaaaaaaaaaaaaagaagaaaaaattcagtggtcatccagtcttaacagccaagtcattaataagaaaaaagaatatcaaattgtcaccgaaatttgtcaactgatttttttttttcagaagacagtggagtaacgtatttaggatactcagggatggaaaatgggagctaagggtttagccacatagaacttcaggtataaaggccacagacaaacttgcaagaaataaggacatatttttcccataaatagttactgcggaatctcctggagaatatatgttaggtaatcagaatgatgggagaaatatccatgtaaggactgctggcagtgattggctgctcaaaaaacataaaaataaagacaaccatacaactcttgacaaaaccatacaacaccatcaataaattagtcttgccaaaaaagaaaggaaaaatacaacttaatataatcaagcctttagatctaactgtcaatttccaggagaattggacagagagagaggggaatgtgaattagtgaattagataaataatatcatggggctgcaatcagcaaaccccaggctgtgtgaaactctacaggacaaacaaccctatttcttcaacaaaatttccaggatagagagggagacagagagagaggaaaggtacagattaaaagagatataagagatatattaactggccaagatggctgaatagcaacagaaagcaggtgatttctccatttccaactgagttacccatttgatctcactggggctggttaggtagtgggtccaacccacagagggtgagcagaagcagggtggggcgttgcttcacccgggaagtgcaaggagatgtggggacctccctcccccagccaagagaagccttgagggactgtgctacctgtccagttactatgcttttcccacggtgtttgtaatctgcagatcaggagattccctcgagtgcccacatcaccagggccctgggtttcaagcacaaaactgggcagctgtttgggcagacaccaagctagctgcaggagtttttttcataccccatgggtgcctggaatgcctgagagacagaacagctcactcccctggaaagggggttgaagccaaggagccaagtggtcttgctcagcgggccccactcccatggagcccagcaagctaagaaccactggcttgaaattcttgctgccagcacagcagtctgaggtcagtctgggactaccaagcttagtgtggggaggggcatccaccattactgaggctttagtaggcagttttcccctgacagtgctaaggaggctgggaggtctggactgggcggaactcaccacagtgcagcaaagtagctgtggccagaccttttctctaaattcctcctcactgggcagggcatctctgaaggtaacagccccagtcacgggcttacagacaaaacctccatgtccctgggacagagcacctgggggaaggggcagctgtggttgctgcttcagcaggtttagttgttcctgcctgttctctgaaatgagcagctgatcctgacaagagggattctcccagcacagcccaccatctctgctaagggacagactgcctcctcatgttggtccctgacccccgtgcctcctgatggggagacacctcccaacaggggtcaaagacacctcattcaggagagctcgggctaacatcaggccagtgcccctctgggacgaagcttccagaggaaggagcaggcagcaatctttgctgttctgcagtctccactgtgatacacaggtacacagggtctggagtggacctctagcaaactgtagcagacctgcagaagaggagcctggctgttagaagaaaaactaacaaacagaaagcaacaacaacatcaacatcaacataaaggacccccacacaaaaactccatctaaaggccatcagcctcaaagatcaaaggtagataaatccacagagatcaggaaaaaccagtgcaaaaaccctgaaaattccaaaaaccagaatgcctcttctcctccaaatgattgcgactcctcttgagcaagggcacaaaactaaatggagaatgagattgacaaattgacagaagtaggcttcagaaggtgggtaataatgaactcctctgagctaaaggaggatgttataatgcaatgcaaggaagctaagaaccttgaatagaggttatataaactgctaactagaataactactttagagaggaacataaatgacttgatggagctgaaaacacagcatgagaacttcgtgaagcatacacaagtatcaatagccaaatcaatcaagcagaagaaaggatatcagagattgaagatcaacttactgaataaggtgtgaagacaagattagaggaaaaagaatgaaaaggaatgaacaaagccttcaagaaatatgggactatgtgaaaagaccaaacctatgattgattggtgtacctgaaagtggcagggagaatggaaccaagttggaaaacacacttcaggatattatccaggagagcttccccaccctagcaagacaggcccacattcaaattcaggaaatacagagaataccactaagatactccttgagaagagcaaccccaagacacataatcgtcagattttccaaggttgtaatgaaggaaaaaatattaagggtagccagagagaaaggtcaggttacctacaaagggaagctcatcagactaacagcagatccctctgcagaaaccctgtgagccagaagagagtgggggccaatattcaacattcataaagaaaattttcaacctagaatttcacacccagccaaattaagcttcataagcaaaggagaaataaaattctttatagacagcaaatgtggagggattttgtcaccacaaggcctgccttataagagctcctcaaggaagcactgaatatggaaaggaaaaaccagtaccagccactgcaaaaacacaccaaaatataaagaccaattacactacgaagaaactgcatcaactaatatgcaaaataaccagctagcgtcatgatgacaggatcaaattcacacataacaatatttaccttaaatgtaaatgggctaaatgccccaattaaaagacacagactaaccaattggatagagccaagacctattggtgtgctgcattcaagagacccatctcacgtgcaaaaacacacataggctcaaaataaaggtatggaggaatatttaccaagcaaatggaaagcaaaaaaaaaaaaaaaaaaaaaaaaacccggggttgcaatcctaatctctgataaaacagactttaagccaacaaagattaaaaaaaaaaaaagacaaaggcattacataatggtaaagggatcaatgcaagaagaagaggtaactatgctaaacatatatgcacccaatacagcagcacccagatttataaaacaagtttttagagactgacaaagagacttagactcccacacagtaatagtgggagagtttaacacctcactgtcgatattaaatgatcaccaagacagaaaattaataaggatattcagggcttgaactcagctctggactaagcagacctaacagacatccacagaactctccaccccaaatcaacagaatatacattcttctcagtgccacatagcacttattctaaaatcaaccgcataactggaagtaaaacactcctcaccaaatgcgaaataatggaaatcataacaaacagtctctcagaccacagtgaaatcaaattagagctcaggattaagaatctcactcaaaactgcacaactacgtcgaaactgaacaacctgctcctgaatgtttacggggtaaagagtgaaattaaggcagaaataaataagttctttgaaaccaatgagaacaaagagacagtgtaccagaatctctgggccacatctaaagcagtgtttagagggaaatttatagcactaaatgcccacaggataaggcaggaaagatctaaaatcaacaccctaacatcacaataaaagaactagagaagcaagaacaaattccaaacctagaagaagacaagaaataactaaatcagagcagaactgaaggagatagagacacaaaaacccttcaaaaaatcgatgaacccaggagctggttttttgaaaacattaacaaaatacatagactgctagcaagactaataaagaaggaaacagagaagaatcaaatagacacaataaaaaatgataaaggggatataaccactgatcccacagaaatacaaactaccatcagagaatactataaacacctcaacacaaatgaactagaagatctagaagaaatggataaattcctgtacacattcatcctctcaagactaaacgaggaagaagtcaaatccctgaatagaccaataacaagttctgaaattgagacagtaattaatagcctaccaaccaaaaaaagcccaggaccagatggatacacagccgaattctaccagcagtacaaagaggagctggtatcattccttctgaaactattccaaacaatagaaaaagagggaatcctcgctaactcattttatgaggccagcatcatcctgataccaaagcctggcagggacacaacaaaaaaagagaatttcaggccaataaccctgatgaacattgacgtgaaaatcctcaataaaaatactggcaaactgaatccagtagcacatcaaaaagcttatccaccacaatcaagttggcttcatccctgggatgcaaggcttgttcaacatatgcaaatcaataaatgtaatccatcacataaacagatccaatgacaaaaaccacatgattatctcaatagatgcagaaaaggcctttgataaaattcaacatcccttcatgctaaaaactctcaataaactaggtattgatggaacatatctcaaaataataagagctatttatgacaaacccgtaaccaacatcatactgaatgggcaaaagctggaaacatcccatttgaaaaccggcacaagacaaggatgccctttctcaccactcctattcaacatagcactggaagttctggtcagggcaatcaggcaagagaaagaaataaagggtattcaattaggaaatgaggaagtcaaattgtctctatttgcaaatgacatgattgtatatttagaaaaccccattgtctcagcgcagaaactccttaagctgttaagtaacttcagcagactcaggatacaaaatcaatgtgcaaaatcacaagcattcctatacatcaacaatagacaaacagccaaatcacgagtgaactcccattcacaactgctacaaagagaataaaataccaagaaataaaacttacaagggatgcgaaggacctcttcaaggagaactacaaaccactgctcaaggaaacaagataggacacaaacaaatggaaaaactttccatgctcacggataggaagaatcaatatcatgaaaatggccatactgcccaaagtaatttaaatattcagtgctattcccatcaagctaccatgtctttctttgcagaattagaaaaaactactttaaatttcatagggaaccaaaaaagagcccgcacagccaagacaattccaagcaaaaagaacaaagctgtaggcatgatgctacctgacttcaaactatactacaagggtacagtaaccaaaacagcgtggtaccaaaacagatatatagaccaatggaacagaacagagacctcagaaataacaccacacatctacaaccaactgatcttcgacaaacctgacaaaaacaagcaatggggcaaggattccctatttaataaataatgttgggaaaactggctagccatatgtagaaacctgacactggaccccttccttacacctcatacaaaaattaactcaagatggattaagatataaatgtaagacctaaaaccataaaaaccctagaagaaaacctaggcattcagaacataggcttgggcaaagacttcatgactaaaacacaaaaagcaattgcaacaaaagccaaaattgacaaatgggatctaatcaaactaaagagcttctgcacgcaaaagaaattatcatcagcatgaacaggcgacctaagaatgggagaaaatttttgcaatctatccatctgacaaagggttgatatccagaatctacagggaacttaaacaaatttacaagaaaaaaacaacctcatcaaaatgtgggagaaggatatgaacagacacttctcaaaagaagacatttatgcagccaacaaacatatgaaaaaagctcatcatcattggtcattacagaaatgcaaatcaaaaccgtaatgagataccacctcacaccagttagaatggcgatcattaaaaagtcaggaaacaacagatgctggcgaggctgtggagaaataggaatgcttttatcctgttggtgggagtgtaaattatttcagccattgtggaagacagtgtggggattcctcaaggatctagaaccagaaatactatttgacccaacagtcccattactgggtaaatacccaaaggattataaatcattcttgtataaagatgcatgcacatgtatgtttactgcagcactatttacaatagcaaagacttggaaccaacccaaatgctcatcagtgataggctggataaagaatatgtggcacatgtacaccatggaatactatgcagccataaaaaagaatgagttcatgtcctttgcagggacatggatgaagctggaagccatcattctcagcaaactaacgcaggaacagaaaaccaaacactgcatgttctcacacataagtgggagttgaacagtgagaaacatggacacagggagggaaacgtcacacaccagagcctgttggggggtgggggacaaagggagggagagcattaggaccaatacctaatgcatgcggggcttaaaacctagatgacgggttgatacatgcagcaaaccaccatggcccatgtatacctatgtaacaaacctgcacgttctgcacatgtatcctagaacttaaagttcaaaaaaaaaaaaaaagagatatattaaccaatcgatgtgtagaccctttttggatcctgattcaaaatataagctgtaaaaacaagattatatatatatatatatattttctttcttagcaagactaattcattaatatatatgtatatatataaaaacaaaacaattgaggaaatatatacatatattggacatttgataatataaaggtattaatttttatggaagtataataatggtattgtggttgtatttgaaaagagtatacatggacacagatgaaaacaatagacacacgagcctacttgaggtgaagagtgggaggagggtacggatggaaaaactacctgttggttactctgatcattacctcggtgacgagacaattttttcaccaaactcctgtgacacacaatttacccatgtaacaaaactgcacatgaacccccgaacctaaaataaaagttggaaggaaaaaaaaacaaaaacaaaaagaagagttcttatcttttagcaatatgtactgaaatattatttaaacagaatgttaggatgcttaggatttgcttcaaattaatttgaggttgggggagtgggtaggaacaaacaagattggacaacagttaatacctgttattgctgggtgttgggtacatgggagttcattatcctcttctttctgtttttgtatgttttaaaatttccataataaaaagttttaaaaatggaatgactaccatttatataaagattttcacaaacctgtagtgaagcattattactctcttggacaagaaacagaatcttagagaggtgatgatttgccccaggacatggaactaaattgtcagaatcaggaatccagtctggatcctcggacactatcttgtctctgcttgtctataaaccatgctgtcttaaaaagcaggatggttcttttctttggttgtttggataactcttccctgtcctctgatcttcagtgtggaagaggtcagaatcccaagaagttggtctgtaattcctgcaatatcacacattttacttttcaatgagacccccaatatttccctcagcttccattcaggatgcacctctctgtttcttttcttttgccattacatgttaaattttcttggttttatttgcttttagtttctattttcttcttttttcacctttcatccccttcttctatattcccttttctccctagtctttgtcatcaagggacttttcaattgctggttacagcccttctgttcttgtatgtgttatagatattgttgcttctctctcattttcaccctaattgtcatctccctttcaaagagtctgataaactaaaccagcaaagggagctgtcacaaggcagccctaggataggagcccagacagcagcattcagaatctagaaaaacttgtgatttttctactgaaaatgattaagagaaacactggcaccttgaacacagtaggtactctgttaatatttactgatgacattaatgaagagaaaattaaatgacatattcagaagagctagttcttgccaaaaatatttcctactctgtgccttttgagttgtgggacttagttttcatccctggatgacttgctttctatatctgtgaagtgaatagaccaaagtcctgtgagacaatgccttgctctttcatgtagtaaaggttagcccacctctgtaagtatagcagagaaacactagattgggagcttcttgagggcagggactttgttgattcaagtttagatctctgtctttagacatcctgtaatcacaggatgttacctttcttgcatagatcaagtgttacaaagagcctggcaatttacacatctgtgctaccatgacttaagacaaaagcgcaaatcaggatttttgtttttgttatgttttattgtcctccctcctcccatctttgtccctccattctttctcccaggtactccatatccttatgttgttttcgtctcatcaaagccctgacagaaacacaaccacttccaaagacttgccattcctcaaatgtcctgcgttctaattggacttgcccccctttgctctaacaatcttattccaccttcatcaaaattattatttctaggatactgattttagagcatctgttttaagtgattattaataatatatgaataataggtaggtttagtccaaattaatctctgcctagtggaatgtgtgaaaaactgtcctaaactctacagtaatgaatgctattggaagaggtattaactaggcattccactagaaaatttgctgatccctcgtctgttttgtcatacctccctgactcatggggtgtactgtgagaactgttgcaactctggggaagtgttttcctgtcctgccactagactttgtgccaggaaataatttctaggcattgcctggtaaagttcatcaacttgctttgaagaagtcctgtgaaagcaatagagggttttgtgttgcttttcaacagtctccaacggaggagattttcacaacctccttggtatgccagtgtataacaaactatgatcactagcattcccccaagtaatttaagaagaattaaaaacaagataggcacacaaaagtttatacatttaaaaaaagttagattatttgacatattaaactaccagtagattcctagcgtttcttggtagtagaaaacttttgaaaacatgtccaataatctgtataataaagtcaagacagttttgatcttgatctgtaagaaagtgtaataataactaaatcattatttgaatgctgacaagaaaagtacttgctgtacatttactgtttacttgtattgtagcaccacctactgttgataaagaaacaagcttttatagctttcccatttttctttgcctcgctagttaaaagaatgtctttttttttttgagatctgatatttttaatgtcacaaatttttttttttttattatacttgtcttggctcgtcagccagacatgctgctcggagatgtttctaaagttatgatacagagattgcattatgtctgtttccaaaatgaaagattatgccttcagttacctaaagatcagaactgatgcttgacatgcatatatgacatattttatcgcttttcaaatcagatgtttatctttttattttctaataaaataggctgtagatgttgggaaattactgatttgctttaagttcagttgctcttccaatgaacaaatattaagtggtaaaacatcaagtcctctgaatataattactaatataaaatgatgtcatattagatccagggttagcacttacataccatcactccctttcctccaccctcaacagaatcttcatcactaaaaaacccacaaaacatcaactaggctatttgatatttagagctttactactcaaagtgtggtctgtggactggacgcttgggccacacctgggaactgttagaaatgcaggattcttgtctccctgcattttaacaagatccccaggtgattcagatgcacattaagatttgagaagcaatgtttcaggcatttcttgtatcccaccctacccatccctgccagaagactgaacagcagtcaaaccaagagtaaggtctttcattacaagtttgaatttacagtatcttattctcataaaaagttagatgatattctctgactcatggcttattgaatgtaaattgtatcactgctgtcgttagggctcacatcagcaactgaacaaagaaggcacagtcctttcccactggatctgtcagcttcatctctggggaaagtaatcagggagccatttaaagcagctgagaggaaaactgccagctctgaaattttagggcatgcaaatgccaacaaaatatttaagttcggtatgatagaatcgtagtttgaacagacaatagaggtaggcttaaataattcctgacaattgaagtagaaagcaatacttagagctagaattatgaataaattggaaaatttaaagcttgatttttcttaagtctaaattttcttttacccatctctttcttctatttaaaaatctagttagtttactacaagagcagtaacagccatttgatttttggttaatgttgaattagttcataagtttaacaaatgaatgtcattcacaaatttagttaattttcctaagacctttaatccatctaataatctcaaatactttagatacatgaggatagacttagaaacctaactaggccaaatctttcagtgaacttaggccagttttgaaaatgtaataaaccaaatttataactatgataaactaggttctttcatattacaaaattaatcaaattcttacctttattaaaatcatggccgatatccattcaacatttcaaattaaaacttcaaggcagttttgtattttggattctttaaaaacgtttcaataattttaaataataaacaccaagattgtctccataatcataaaatgtactgccaaagttagcactaagtaccatgggttaggcttatgtcattatctctgtatttctacattttcctagtgtttcatagtcacacagctaaagatagtagaagtcatctgatccatgaccagttctgtaatgcgtttatggacggtggtagtaataagaaattgtggaccaaaagcaagatcatagtgctacttcctaaactgtgaattagcaggctgaaccttttaatagtttaagtctttcttgtcagtgggggaatccaagtccatggcgagagctgagacttagtttcataggccattgtcttttctcctaagtgtattatacatttactcaattttcattgtaaaccctttcaacattctctcacccaatttgggtaggtggaatcctgtaccccccaccagggctatagctaatatcttcattgcacagttattgttcattgagacatgtacctccatccatggtataaactgtttttattatctgtctcacctccattttaacagtaattctgttgacattgcttctagactggagtttggctaataagacactggacactgtgttatctgtgctaaggaagcacagataacgcagcgtgttaagcattctgggtcaggatttttgtgctggcacaattgtgagtaaaccaagaaaaatagtccctatgagatttctttcagacttcagcacacagaaacctagtggattgttccttaagataaaagagaggtttgagaatttactttttgtcatagtttgggttcccaggaatcggattctgaggctctgagatctacatgctggaggtttattggggtgagttcttgggaaaagcacctctgagaggtgagggaagtaaatcaaccagagagaggagttgaactgcagctgtgacagagatggcagtattcctacccagaactctaaagtggctccccttttcccccaggctttatacctcctcccatttagcagacatgggatgtggaaagctcccagggaagggcatgaccttgggtgaggcagctgagggcaagtcccagggagggtctcagctgagagcaataagcagtcaacactgcttagcaggtggggtaaataagtgtcttgatcataaggtggggtaggaggagggcaagtataaatgctgtccaccgcattcaatagaagtgttttctctattattactaaagaatggcttgacccagaaaagatcatggtctttagccacagaacttaattctaggagaggcgatattacagcagactgatccctgtaatgcaaatggcaatgcccctctttgctgagaggcattgtggagaatgcatgaaaacatggcagtgatgttggcagggagatggcaacgaggttctctgcaccaactgtctcctgcagctgggaaaagacacacagcctggctgccaactgttgggctcattgtgctctggctgaatttagttccctcttatgtcagcttgcaattctatgttgaagaaaatcggtctggtctgccaccatcaccatctcttagcaactaagagagattgaaacaacagctgggtaatttgatattgggaacttaaaggtcgtgaaaatagaatataatggctgtttgtattaaaggaaaaaaaaagagaaaatgatgtaatcctaatgcttagaaatgtttggaatgccacatgggttacaaagagtgaaaatctagtttaaactggttggattctttctctctcagaatgattaaagttgagcccagaagctcacccaaacacacatatttgcctaaatataaatccctgtggaatgttggagctataatgtgaaaaacagtttctgtgtttttgtattttctctaagactgacctacagctttcttatcacaagttttgaagcaatacttataacatagatgataatttagagttattttttactttgctttttgtgggcaatggggatggggactgcagtgaagatgggagagaatgaggtgtggccctcagacatagtgctgtgcaggaagcctactacttcagaggctgcccacagcctcacatacaacgggtaataacagaattacatgtttgaaaactagaaaatgagaagtagaagccagatgaaattgttaaaacaagtttttcttttttccctagggccagtgaggagaccatctgtttttcaaattagaaaagccagaaaatataatgtttgctctcagaatgagtcaaatgtcatactctaatgaaaattccaaagcagaaagagagaaaggaagaagagcttgaaatgccaaattagtggggtgaggtgcttgctgcttgcattcctgcagatccaagcattttgcaactctagtaaacctgccaggacaaggttcatttgaaggggtgtggattaccgggaggtgcggggggactgacattctagtgctttagatggtaggtaactgcctggtcttgtttctcagaataacttgttcatccaccacatatgtggctttcatcccagcacagtgggcaggacgccactgttttcttcgtttggttaatagttacacttccttgacacctcatacagctgggtcatggatctgctgctgttctcaatgtgagcatcactgtctttttttctttttctttttctttttttgggacaggatctctgtcacccaggctggagtgcggtggcacgatctcagctcactgcagcctccacctcctgggttcaagcgattctcctgcctcagcctctcaagtagctgggattacaggcatgcaccaccgtgcctggcgaatttttgtatttttggtagaaacggggtttcactatgttggccaggctggtctcaaactcctgatctcaggtgatccacccgcctcggcctcccaaagtgctgggattacaggtgtgagccacggtgcccagcccactgtcttttttcatcaatgctaagagaatttaattctttccacatgaagcgattctacttcctcaacacgtgtttcgttttgtgacacaacaacttggaggaggtgaaattcattaacaaggaataaatatcttctctttatggagccacttccttaacccctcaaatcttcctagaccacttccatcttccatccaacgtagaataagtgaaccatatgaaattgctgtttttgtgggtcaaaggcaattgaatggtagtctcacatggttcaacatctgtatacaagcaagttctctgatgaaaaagctgagtgactgcgagtaccatccttagaattctttaggagagaagaaagatttcaaggtaaacaatctgacaaacttatttgtaatcaaactaaattccaggtggggctggcttatagttcacacacattaaagaaatagggattgaatcttgcaggaaactagcacttttccccaagggggatgaggatttaagtttccttcatggaatatgtttccagttcatttggtcctgcatttattttagaaattgtttgatatttgcacttcactcattttccaaaatttgttctgattccagatttctctgttaaatttctataaatttgtttatttgctatttgctttggagaataggaattatttgaatttcttggcaaaagggatgaaaattctaacccaccattcatttgggagaggtgtacatatgttcacttccacagctgtagcacatttgttctcagttttgtacttttgagacacaggaagtatatttctttaaatgttctctctggaaatacatacgtagagctacagcctgatgaacattccttatacaaaggaatgtacatctcagtgtagtactcgtctataatttactttcaatggtttatggatgtataataatcacagtgaacctttgttcagcgcttactatatgtcagatactttgcatgcactatcatgttttgtccttatcctgtgatgtgggtcctagtcctgacacacaacacaggaaactgaggcacagaggttaagcttctcttccaaagacccacagttgttattataataataatgctaaggctgatgttcagggcatctctaaagccttctgctctcttatttacaacaccattctaccttcacattggctacagctgattcaggcatcccctccattaatcctttttagtgaatgttagtttttgttgtgggttcttattttaaaggtgatattttgggcaagatgtcttgaaggactgatggcaggtgcatattgacaattctatgcagagcaaagcttccaaaaaggcatgctatgaattctgtcaatgtggaagatcgagcaaaaccagcttctctttgcagcactggcatgcaaccaacctgctcacctgcatccttacatcttaatctgatgagcagagtctgcagacagaaatcattttcagctctttttttttttttttttttgagacggagtctcgctgtgtcacccaggctggagtgcagtggcttatctctgctcactgcaagctccgtctcctgggttcatgccattctcctgccacagcctcccaagtagctgggactacaggcgcccgccaccacgcccggctaatttttttgtattttttttttagtagagaaggggtttcaccatgttagccaggatggtctcgatctcctgacctcatgatccgcccgcctcggcctcccaaagtgctgggattacaggcgtgagccactgcgcctggccttcagctcttttaactactcataaaaatgttttaagtacatttttaactagcagtacttgtataatattataattattatctatttggtacctttaaattttcatgtttatatgcagaaataaacaatatattgttcttaaacatatttttgtgatatattttctaggaccttatatttatcaattcaacaaatatttaatgcctaccatatgtcaaactattcttggcatagcagtaaacacaagtgacaaaaattctgacctcatgctcttaaagtttttataatgattagttttaaaaatctttatccatagaaggctaggcaaggaggatggatctatatagaagcacttccttactgagttgagaggcttggggagaaatgcatagtgcctccttatttggaagcccccaaagtcatctcagaccctacttggacataagtaaacagcgaagtaggatctggaagaggtttaagttgaactttccttgtgtgcattatcctcaaagatatattgcaataagatttttgtatagaatgcaagtctcctactggattttagccctgtttcccatcgaattttatctagtcatatttgacttgtgtcagataaagattaaaaccttcagacaccgggccgcaagttgaagatctttctgaatcacagtgctaaaataatagggagggattttccgtaagtgttaccaaactaaactgggatccccttgcctggtgtagcaaagccaaatactgacatagggattgctgcaagagaaagtgaagcatttatagcaggatgccaagcaaggagaatcagcagctcacacttaagacccagcctccacagtggcttacaagtaaggccttttaaaggtgaggaggcagaggttataggcaaagtcatcaatcaatacacagaggttatacattggtttggcctaaagaggtgggatatcttaaagcggggtcttacaagtcatagatagattcaaaggtttcctgatttgcaattggttaaggagatgaagctttatctaaaaatttgtgatcagcagaaaagaaagttagctctggctcatgggtatgacctcttccaggctcctcaggaagaaatttagaacaaagaacagcagtcagagttcagtcctcagttcccttttatctgaggtctacatgccagtggatccatttggaaggggtctgggtttctgaaaaacaactcacattaagatgttatctttaatttctacagggaacatctcatgaccctaacttccttggctattgttttaagctactgctaccttcttgcttaccaagttgctcatttacttctcagggctagctaggtgcctggaatttccattgaaggagctccagatcttcctttatttccatgcctggcggtgttgaaggggtgtgggagagaggatagcaggcccttaagaggggtcctgggtccatcttatacatagaagcaactgaagaggaaagctgagattggggttcgcagttctcccaagcagtggctgaggctggcaggttggagctcaactcttaggcaacttggctgttatatgtatgtgaatgtctgtcctaacaaatgaatttagtgctgcaatttcaagacggtgttgtatcaccgacttgcaaaaatgccttctggcatatttattactttggttccaaaaatcatatttagccagatcttttcagtaatgaagcatttttctttatagcaatcttgctacagctgagaggcaatttagaatggaggttaagagagttgattcttggggcccaactgtctgggttcagattccagctccatttcttacagggttacataaagcagctcactgtgcctcattttcttcttctgtaaaatgatggtcatgataatagcatctacctcatggaggtgcaatgagccttaagttagatagtatttgtgaaattgcttaaaatgatgcctggccatagtgagcactttataaatatagctagaatgatgagagagtcttagattctcctgtcaacaggcattgcatggctggggttgagcctccctagtgaatctttcacatagcttgacagacatagtgggcatcagccctaaatgccaaaagcaaacttgaagattcagagcaaaggcatgtgctgagcatttgccttgtatggagttttgggtgctcttattcagtgattaagagccaacattagtgaatgttgttgccaagaagtcacacacacacacacgtacgtgtgcccacaagccaagtccctgtgtgattgccatcagatgtgtcaggaagacatcatgcccagatctgtgaaactatggaatagatgtcagggaaatgcgggtccatctgctaaacagatgactgaatgattaagtgaatagtgaaaaggagaattccaagctccaactggagtcaagatgtgaagcagcagcagtaacactaacagcctgtgggtgacaaggatcaaagatgggctaaatgtcttccgagggaaaaccaaatgtggtaaaagacacatcagaggagacctctaccataaaaaaaacaaaaatttaattcgatgccagaaagagataatcagcaaggagaaaactagatttagcctgaaatataggtctgctcaaggctcgtcaggggaaagaaggtgaacattcaggttgattttatagagagctcctagaacacataaactacattgtgatgactaaatataaagaaagatgattatcactcttttaggcaggaaatggggatggatagagactggctgtgcagatggaggaagagaaaatggttagtgtgagataggaaatggaagagaagcataaacaggatcccttggtataatggccaagaattcctgatttctactgtgtcccccctttgactcagaataaaattagtatccacaaagaaagagatagtcttaaattagagggagctgaagaaaatattttggggggagaggagatgagaatttgacatgttaaaggactcctaggaatatagggagaatgctttctgaaaaggaattccattgactcagggtttagacttaggaacatgtgacttataccaagtagacatcgactcactttgatattttcagtattatatacaattgcttttaaaaattacttctattgttttccttgattacatgactgatacatattcttataaaaatgaggagaaaataaaaataatcagtggaccacatatgacttacaccaagtaaacatcgactcctcactttgattgattttcagtgttgtatacaattgcttttaaaaattacttctactgttttcttgattgtgtgattaatacatattcttataaaaatgagaagaaaataaaaaataatcagtggaccactagagatatccactattaccatttttgatatatttactttttctaattatttacatgtaataaaaaattggactcagattctataacaattttatacattgtttctttaacttaatattatttcctgaatagttttttgtgtgtcatatagatgggcctatatatttatttttctcacaacttttatgctcagaaaatctctactaaattaattactaaggggttttgctatggtatgaatgtttgtgtccccctacaaatttatatgttgaaatcctaacctccaaggagatatattagaaggtggggcctttgggaggtagtcacatcatgagggtggagcccttataaggcctgagagagaccccttgcctttctgtcacatgaggacacaagaagacactatctgtgaatcagaaagaggacccttgccacacactgaatctactggcaccttgatctgggacttcccagcctccagaactgtgacaaatacatttgtattgtttataatctacccagtttatggtattttattatagttgtccagatgggctaaggcagattacaaatctttaccttcctcatactggtgtgtgatggtgtaggccctgtggggctgatttaggatttcctgggtgccttgagttgtgagaggagaaaacagtatctctgcaaatgtaagggaattggaccttggagttggggtttgtgtctcttactagtctgtctttggggtattttgctaaacttctatttcctaattcaaacaaatgatagagagctgcttgactgagagaaaaatactaactcctatatcagatatttagaagaagcagttgaacagttctttagagttgggtgaaaaaaaatcatagccccaactaaaaatgctggggtcacaattgaagaggaaaaaaattcacaattgacctgaatagtaaattctctaatgtgggatcttgcattaatgaaagatctgggttaagccctcaagtctaatgattgaaacaatagtacagtatgcaggatccaaaggactttcttcttaaaaagttgtgccgtagtcatgatgaaggtgtccattcatggtcagttatgtgctctgatgttgaatttcttactgtaatttgtagatatttgtgtaaaatgactcatgcaactattctgagggaaggaagcagtttggtgatttagtataaaccagaatggagccagaatatttttagaacccaaagttttttaaaaatctgttttcatttatcatttatttgaatttaggtctcactatggtaggtgaggtttggtatgtaaagtgatgcaagacaaactctcaggagccagacttcaatatacttttatgcccaggtctgattcttcttattctccttgggccttcatttctgcccactcaagcctgaagatcctactggtccaggaaaatgtctagttggttttcttgttgcttcaacacacaattcatatttacagattaatatatggtaaagacactttaaaaatatgaaatacatatttctttctgatgtataagattgttacaaaaaacatcaagcaacagataagtgagaattctcttttcatgttctgtagagataactcctattgacaacttggtctgtattcttctagacttttagtccatatttcatatttatataatttttaaaacatttattactattatgtagccaactctcttactttgtatattttaggatctatttctgcatccatatataaagatctactttatctgttcagtagtgattgatctataacccgtgattagataatccatgcaaagaaataaaattccaagatggtaaacactgaaaggacacttctccctacccctattctcctgcctcacagttcgcagatccaatgatccagaggcaatcattgctatcaatttcatatacatccttccagagcaaatacaaatggcatcattcctgtattcctgtattagtttggtctcatgctgctaataaagacatacccgggactgggtaatttataaagaaaaagaggtttaatggactcacggttctacatggctggggaggcctcacattcatgacagaaggcaaaggagaagcaaaggcacaccttacttggtggcaggcaggaaaacatgtgcaggggaattgcccttttataaaaccgtcagatcttatgagacttattcattatcacgggaacaacaggggaaaaactgcccctatgattcaattacctcccaccgggtccctcccatgacatgtggggattatgggagctacaattcaacatgagattttggtggggacacagcaaaaccatataaatttccttctgtaaacaagcaagctgtaacatctcccagcctgaaagaggaggaactttctttgacttgtgtattcctttccagctaccacccaatttctttgctccttttagagcagtaatccttgaaaaattatctccaattactgtttccacttcctcttttctcactgtgatctcagttttcatcccatacttaaggactcattgttatgggagctatacaactctggctcctttgttccatcttggaacaaattgaagggccttcttggtttcaaagttccatatgtgggtggactggcccattagttgagactgtattatagcacaactttcctcagccctacttccttccttccccttgcttagggggtcatcccaagataactccttaataaacttcctgcacgctaatctccatatttgaatctccttctcaggaagacaacctgtgacattatctggtggtgtcctatctgagaataaaagcctgaagttcttgcaatggctctgtgtgaactgcccctctcttcccactgccaacatttctggctacatcttctatactctcccttttgttcagttttgtttagccattctctaaatatactaagactagtcatacttttgagcttttgcacttgctcttctgacttcctgggatatacttcccccagataccctcctgtctcaaccttcatttcctttaggtctcaattcaaatgtcacttgtcagagattatttcctgaccactctatataaagcagcatcctcactactgttctgcttttcttttcctttagagcaatcaacactgttggacacatactatattttatttacttactgtcttttcctgttttgttctctgctgtattccaagggcctggaaaagtgcttggcacagaaaatatgttcaagtaatatttatgagtgaatgagttatcttgttttttaatggaaatatatcttctacataaatgtattacagacttttaatataacaatacaactcagaaaacgtcccaaataagaatactatgagctgtaaacaactgcatagttttctaccatatgtaaaaacacaatttaattagtcctctattaatggaggttttatgttatttccagtaatgtggtgaataactttgtgatttcttctgtaatgtgactatatctgtgagaaattctagaattgtattttgctgggtcaaagggtgtgtgtgtgtgtctgtgtgtgtgtatatatatatatatatgtgtgtgtgtgtgtgtgtatcttgcattggtaattttgttagatataaccaaattgttctctgtaatcttacactaatttatattcttcccagcaagatatcagcatgtgtctttcaacacatcctcaccaatattttaatgttgctaatctgataggtaaaacatggtatttcagtgtgatttaatttttaattctgctattgaaagtgaggttgaaaatattttcatatatttaaaaggcagttgtattctcttttgtataatctttattataatactttttctttatgaaggttttgtgaactttgtccagtctttttgatttgtagaaaatagtgtgcatatttgcaaatacttttcttggtttgctgtttatcttttaactttgtttatagcattttctatttcaagtaggaatgtaaaacagttttatagtgaagtttgattttttttctcttataggttttgtgtcttttttaaaaaaattatttatttattttttatgagatggagtttcgctctttttgcccaggctggagcacaatggcatgatctcggctcactgcaacctccgcctccccggttcaagcaattctcctgcctcagcctcctgagtagctgggattacaggcatatgccaccactcccagctaattttgtatttttagtggagacggggtttctccatgttggtcaggctggtcttgaactcccaacctcaggtgatctgcatgcctcagcctcccaaagttctgggattacaggtgtgagccactgtgccccccagatttatttattgtactttaagttctgggatacatatgcagaacgtgcaggtttgttacatagtatacatgggctatggtggtggctgcacccatcaacctgtcgtctacattaggtatttctcctaatgctgtccctcaacttgcccccgatcccctgacagaccctggtgtgtatgttcccctccctgtgtccatatgttctcattgttcaactcccacttataagtgagaacatgtggtgtttggttttctgttcctgtgttagtttgctgagaatgatggtttccagcattatccatgtccctgcaagggacatgaactcattcttttttatggctgcataatattccatggtgtatatgtgccacatattctttatccagtctatcattgatgggcatttgagttggttccaagtctttgctattgtgaatagtgctgcaataaacatatgtgtgcatgtgtctttatagtagaatgatttataatcgtttgagtatacacccagtaatgggactgctgggtcaaatagtatttctggttctagatccttgaggaatcgccacactgtcttccacaatggttgaaataatttacactcccaccaacagtgtaaaagcattcctatttctccatagcctcaccagcatctgttgtttcctgactttttaatgattgccattctaactggtgtgagatggtatctcattgtggttttgatttgcatttctctaatgaccagtgatgatgagctttttttcatacgtgtgttggcagcataaatgtcttcttttgagaagtgtctgttcatacccttcgcccaccttttaatggggttgtttgtttttttcttgtaaatttgtttaagttccttgtagattctggatattagccctttgtcagatggatagattgcaaaatttttctcccattctgtaggttgcctgttcactctgatgataattcctttggctgtgcagaagctctttagtttgattagatcccatttgtcaattttggcttttgttgcaatagcttttggtgttttagtcatgaagtctttgcccatgcctatgtcctgaatggtattgcctaggttttcttcttctagagtttttatggttttaggccttacgtttaaatcttcaatccatcttgagttaatttttgtataaggtgtaaggaaggggtctagtttcagttttctgcatatggctagccagttttcccaacactgtttattaaatagggaatcctttttccattgcttgtttgtgtcaggtttgtcaagggtcagatggtcgtagatgtggtgttatttctgaggcctctgctctgttccattggtctatatatctgtttttgtaccagtaccatgctgttttggttaccgtatgcttgtagtatagtttgaagtcaggtagtatagtttgaagtcaggtagtatgatgcctccagctttgttctttttgcttaggattgtcttggctatatgggctcttttttggttccatattaaatttaaagtagttttttctaattctgcaaagaaagacgacggtagcttgatgggaatagcattgattctttaaattaatttgggcattatggctattttcacaatactgatttttcctatccatgagcgtggaatgtttttccatttgtttgtgtcgtatcttatttccttgagcagtggtttgtagttctccttgaagagatccttcacatcccttgtaagttttatttctaggtattttattccctttgtagcaattgtgaatgggagttcactcatgatttgactctctgtttgtctgttgttgttgtataggaatgcttgtaatttttgcacattgattttgtatcctgagactttgctgaagttacttatcagcttaaggaggttttgggctgagatgatggggttttctaaatatacaaacatgtcatctgtaaacagagataatttgacttcctctcttcctatgtgaatactctttatttctttctcttgcctgattgccctggccagaacttccaacgctatgttgaataggagtgatgagagagggcatcctcgtcttgtgctggttttcaaagggaatgcttccagcttttgcccatttggtatgatattggctgtgggttcgtcataaatagctcttattattgtgagaaatgctccatcaatacctagtttattgagtgtttttagcatgaagtggtgttgaattttatcccaggccttttctgcctctattgagataatcatgtggttttggtcattggttctgtttatgtgatggatgacatttattgatttgtgtatgttgaaccagccttgcatcccagtgataaagctgacttgatcatggtggataagtgttttaatgtactgctggatttgatttgtcagtattttattgaagattttcacatcaatgttcatcaaagatattggcctgaaattttctttttttgttgttgtctgtgccaggttttggtatcaggatgatgctggcctcataaaatgaggtatggaggagtccctctttttctattgtttggaatagtttcagctccatcaggtcatttatgtttttctctaaattggttattctagttagcagttcctgtaagcttttatcaaagttcttagctttcttgctttgggttagaacctgctcctttagctcagaggagtttgtcattacccaccttctgaagcctacttctgtcaatttgtcaatctcattctctgtccagttttttgcccttgctggcgaggagctgtgatcctttggaggagagaggcattctggtttttggaattttcagcctttttgcactggtttttcctcatcttcatggatttatctacctttggtctttgatgttagtgaacttcggatggggtttctgtgtggtcatcctttttgttgatgttgatgctattgctttctgtttgttagttttccttctaatagtcaggcccctcttctgcaggtctgctggagtttgctggaggtccactcgagaccctgtttgcctatcaccagcggaggctgaggaacagcaaagattgctgcctgctccttcctctggaagcttcgtcccagaggggcacccaccagatgccagctggagctctcctgtatgaggtgtctctcgacccctgctgggaggtatctccttggggtcagggacccacttgaggaggcagtctgtcccttatcagagcttgagtgctgtgttgggagatccgctggtctcttcatagctggcaggcaggcaaatttaagtctgctaaagctgcgcccacagctaccccttcccccaggtgctctgtcccagggaggtgggggttttatctataagcccctgactggggctgctgcctttcttttagagatgccctgcccggagaggaggaatctagagaggcagtctggccacagcagcttttgagagctgtggtgggctccacccagtccaaacttcctggtggctttgtttacactgtgaggggaaaactgcctactcaaacctcagtaatggtggacgcccctacccccaccaagctggagcattgtccaggtggatttcagactgctgtgctggcagagagaatttcaagccagtggatcttagtttgctgggctccatgggtgtgggatttgctgagcaagatcacttggctccctggcttcagccccctttccaggggactgaacagttctgtctcactggggttccaggcaccactgggatatgaaaagaaactcctgcagctagctaggtatctgctcaaatggccgcccagttttctgcttgaaactcagggcactggagggaatctcctggtctgcaggttgcaaagacagtgggaaaagcatagtatctggaccagatagcacggtccttcactcgtggccctaggggagggagtttcctgaccccttgtgcttcccaggtgaggcgacaccccaccctgcttctgctccccttggtgggctacacccactgtctaaccagtcccaatgaaatgaggtaggtatctcagttggaaatgcagaaatcacccgccttctgcgttggtcttgctgggcactacagactggaactgttcctattcggccatctttcccggtaatcccctggttttatgtctttatagcttatttttccattaaaattttgtaatcagcttgtctagtatcaaataaaatatttttggtgttttcattaggatgatgttacatttagagatgaatttaggtagacttgacatttccatagtgttgagtctctatatttagaacatagtatattttactattcaggtcttcctttattcccaacaatatgtattccctttttcatgattgattgactgattaatttttagagctgcaatctcactctgtcgcccaggctgtgtacagtagtgtgatcatagctcactacagtctcaaactcctgggctcaagcgatcttcctgcctcagcctaccaagtagctaggactccaggcagatgccaccacgtctagctaatttttaaaattttttatagagatgatgtctctctatgttgcctaggctggtctcgaactcctggcctcaagcaattcttccaatcagtctctcaaagtgctgggattacaggcatgcaccaccatgcccagcccctttctcttgtttttaaattgctacatatgtgtatatgcaatgtttttaattaaaaaaactttacagaaagcacctgacctgtaattacctagattaaaaaacaaaaatagaactttgccagagaaaggaaaatagaaactcttgatcagagaagagtacgtggaataccctgtggcccttcctaagtaatatactttttgacttagtgatcatcatttccttgctttacagtcttactgcccatgtaggcatctctaaataacatagtttgcctgatctggtgcttcaaataaatatagtcatgccacatatattcttttgtgtctcacgtgtccgtgtgaagagaccaccaaacaggctttgtgtgagcaacatggctgtttatttcacctgggtgcaggcgggctaagtccgaaaagagagtcagcaaaagggtggtgggattatcattagttcttataggttttgggataggcagtggagttaggagcaacgtttttcggacagggggtggatctcacaaagcacattctcaagggtggggagagttacagagaaccttcttaagggtgggggagattacaaagaaccttcttaaggatgggggaggtaacaaagtacattgatcagttagggtggggcagaaacaaatcacaatggtggaatgtcatcagttaaggctattttcacttcttttgtggatcttcagttgcttcaggccatctggatgtatatatgcaggtcacaggggatatgatggcttagctcgggctcagaggcctgacattgctgtcttttgctcaacatgtttatgaggtttgtccgtgaatgttgcctttttataaaacactttttaaaaattaatatattcagatcaccatataatttttaaaaatttctttcaaacatgaaacagaccttactttcctggaatgaatcaatccaacgtggatatataacttttatgttatattcatagtttatagccaaattcatcttacgaggactggtctacttctagtttacctttacctttactcctctgaagtggtcctttagaggtccttctgaaagcctaaatttttaccagggcctctcctccttagtgggttctgagctccagtttttgtccctgcagcactgaaaatggctagaagttcagtttagcttcttaagctctagattcggcttatacatctgcaaagaccttgagggggaaaatggtgccaaatgtcttacttctgtaaatttgcattctctatgagaatatttatactatatcttcagaactgattcttatttgtctagcttgtttggttgttctcagtgaggtagttggtctacataggctagtctgctataatcagaaggaaatatcaagaaataatataaattggcaatttaagattcagtcaaagtgcaaatagtattatcagtgaatagtgatgataattttatgtcgatgcctctgggaggaacaaaggtagcacaagctacctcaaataccagaaaagacatttaatatcctaagggttgctaaggtgatctggctgtggcatctgtcaccccaccaatctcagattaattctgatcatctcaaaagctgggcagaatctcccttctccctaattgcttcatatgtatcccaccagatgcttcctcctggtttaatcaattacccatgccaagaaatgaagagttatttatcctaacttctatgcatcttctcccacaatgtccaactggttaccaaattacgtctattttatctcccaatgtttatataatttgttcactcctttccatctccactgcctttgcttaggtctaactgttataatttgtctgagttattgaaaagacctctactgtcattcctctatcaaaacaaggaaagatctctctaaatacaaatctcgctcaaacttttggtactgtgcttaaaatccaaaagtggctctctataacccatagaatgaaattacatatgttatgtggctgtcctccctgtggcagatactgaaggcaggcaatgtgtgatgtgggatactcagaaacttctgtccttgttcagggactacccctttccagcatatgactggagcacatgacaacctctctggaccttgatttcctcctttacaagaagaggaaattgaaccagaatatttccaactccagtgactttgtgattctgaatcattgccttaaaatatattgtttgcttttaaaaattaatcttatgtttataccaacatccatattaggttgtacaaattttatgtagaataatctcagacatcaactatgtaatttttatgtagcaacaattgattttatctgcagtgattcatgactcaagtgggaaactaaatcccgatttaactaaatcattttaattgacgttctccaccattaaaaggcctgtagaagtccctcaagattaagatacatgcaacctgtgatcctagaaatcccttcctctgtactagcctgaagtgtgagggttatcttattatccagttacatctcttgactctctgctcattcccacccttgcaaactaagctcttctctgttattctcagccccctcaacaaaaatacctcatactatccttctacatctcatgtgatgccccttcctccttgcatgctttctcccattgcccatgtctggctctctcttacttggcctttagaactcagctttgcctcacctcctctaattgccttctctctctttttctgggttaggtgtccctcctctttttcctgttctcttgacacactctgtagatatcactgtgcttctcaaactacattgtaatatatatatatatatatagagagagagagagagagagagagagaggcatttggatacatgcatatatatatatatacctcacataactttcagtgtgtggcagatttatggaaaattatgtttgtatttttcttaagttctcttaggaatatgtttcaaataagcatagctttccagactgatgttaatacttggttctagtcagaaaatcttgtcttcattttgtcatctttcttcttttgtgctggcaagagctgacagctatttaaatgagaattaaaaatagatccctgtgaagtacatgttccttttttttccctgccaggatataactgaccacagaactgggattatctttctctctcttaaaaaaaattctccatgggctgtgctatctaatatagataaaatctagtgatgaaaaaaataactcctaagagatattccagtggtccaaatacttttgccactcctattagaaaatatgcctttttcttattcttaaaggatattcaaataatttaaaggttaaagtgccaccagtttatgtcaaactggtgtttatgaaaaccataaaaatgaaatgccaccattataatctgtgattaatctacattgtgaatttgctttgactatgggatgtgtcttgcctttctgtattattatcacaaatggaagaacctcagcctgtggaaagtcggaactggggtgctggagaaaaagggtaactgtttgtcagagaaggaactatgtttgaaaggcttttggcctgaggaaggtagattctaatttatcgtcagaagtgactggagcaaacctggcttaagactgaggctgagaatgggctctaaggcacactctttgtttgtttgtttgtttgttttttgagacagggtctctctctgtcacccaggctggagtatactggtgcgatcacggtgcactgcggccttgacttccagggcttgggcagtcctcccacctcagcctcccaagtagctgggaacaggcttgtaccactacacctggctaattttttattttaattcttttgtagagatggggtttcactatattgcttagggtggttttgtactccagggctcaagtgatcctcctgcttcagcctcccaaagtgcttggattacaggtgtgagctaccgcacccggcctaaggcacactaaaaagatttgatatgcgattggatcatttgtttgttctttcatcaaatattcattgagttttataatgtattttataatgaagcctacatgacatccattatgtcacctcagggctgctggtcactctgaactaacaatatctcaggagactgggagttggttgggggtagcttgctgaacccagaagcaagctatgtgtgctccattgattctataatattccagaattcattcatttagcaaacattcactgacatttgttaagggcccagtgctgttctaaaccagctctgcagagatgaccctgacatagcgactgccaactatggttttcttagttggggagtgagggaggtaaagagaacattaagatgtcaggcagaggcaaagcctgggagcactgaggaggggtcattaagccaggcaaggagagtcacgaggcttctagaggaggtggccattgaactgactgtcaggaagtttgagagagtggtagccaaggaaagagaagggactttcagactttatccactttggtgttctctcttttgggagaccatggctatccattcacgacagattaatttacccttttatttcaacttctctcataatgagatttgagtcattctttctacaagtagttctcagcaaatctccaacccaggaaattcttccctatatctagctatgcccaccccttcctggaaatccagactctgtcctggagttctgacttttgtggaaaccatgagtagggtgttgatgatgaagttggaagatttgtgaatttatcctgtgttacttctgggattcagaatgctcagtgctggcatggaggaactcacatcgtaaggaggcactatgcgttttccttccactgtttatttttttgctaatttcttttcttttctgcaaaacagtcatattagccagtcagtggagtactttattagaggtagcatgctttagtagctatgtgtcacattgtaaaggagaactaagtttcataattatgaaaaatgcttagagtattcttgtatttatagttttctctgtgaagggaatgagtattctttataggattctgggcagttagtttacttttactgggacttcctggggaatgatgcactatgtgactggatactgcagtcggaatctgaaattgctccgtaaaacagctgtccaagtcacttgcatgcctctcttgaattctatgctccctaacaatccacatctctaacaaaactgtcatagttctatgtttattagtgatgggtctaagctctctgtgggtttttaaagataggtgtataacttcagtgtttcccgtcagctaaagtaaactacaccccatgttgtggggtgttgaggaagcactgcacacagattgtaagctttacatgtgagctttctattgtaaccaagcaactgacacattagacacccctttgccatcagcttacattctctgagaacttaggtcagtgcctaaaataaccctgttaattgtgggggcacatgtggaatgaaattccacttagcagtctgggagctgagtgactgaggatttgaaaccttgctatagttacagttcataacaagcgtctaggcagttagaccttaagtgttcaggtatggaaagaaagtcatatgttatgttttagattctgtttgtaaagctggttaactagagacagctgatgaaaaaccaaatcgacttgagttacaagatctgggctttctctgctctgctttcaacctgttggttggtggtggagtagctgacagaagcgaatggcttggctgagggacatgaagtgacagcagcctgtttaggaccacaccacattttggacctcttgctgtgcagttcaggtaggctgttgtttatctggcattccttataagactgacagaagtcattaaactgttcagtttcagagttgggcatgagaatctcaagcctctctcctgcacatagcacgtttatgttagtggacactgcttcactccctaactagacagtatgccaaatgaacgtcttcgtattgttgttacccaagttcacttaaattctaggacataagggaggctgagagcattcacacaaagtgcgacttatctggcgcgtggtaaaatgcatctttaaaatttaccttcctcttttctgttttattttccttattcttgttccaaaaggcaggcttttgtgtttgtgggaaacagtgggagaaaatgttaagcctgttagtatattccagaacatatggttttcttatttttttaaactgcttaatagggtctgggttttatttgaagagtaagatgaaaatcaacactactcttttccaaataaactcagttaaactactgtttgtgcccgtatcagtgtaagtaacataaattgctgcaatattgttgttcttcttaccccaatgttgacctgtattataaagtatcaaatttagttttggcttcaagtatctggcacataaagtaagtatacaaatgctgtataataagtatgtgaatgctgtaaatgatgctttgggacttctacctgattaggttatttaatccagcatttattcaaacttatacctcatgtcacatgacagacatattcctaaaacatgtaaatcaggttttgtaattagaatgacttaacacatacttggaaagctgatcacttttaaggaatctatgtataaaatgaatagagagttacaactaaatttatgctttgatggttcttttttgcatgtcaggttcttaaattgagattcactgatggtgcataactttggataagtttctcaggaacaaaaactgcatttttatgatcttgaagtatacacacagatgtacatgtatatgtacatgtgtatatatatgtatattatatgatcacatgaagcccttgggggtccttagaaggatgtctaaggggatttgggagtggcctattgatatattggatgttaaattgtgccttcggtggagaaagattttctggagagaagggtcatggtctgagacttgagattaaaaaaaaaaagttgaaaagaatattttcctactgtttgtatattaatgtcactaatatacttgaaaagctgcagtattattacccatctaacatattgttaatgtattgcagcctcaggaattattagcttgaaccatatgaaattgccaatatttgacaatttttgacctataaaaatggcaattttgtatggctcaacctagttatttaatgaacattaactcatattaatgaaaggttagccttaagtgcccaacagtagtcgtatgaaccaaatatattcttataattgaagtatgagagctgtctagttaaaaagtagatcatccagagttacttcctgtgaataaatccagtatgcatgtgttatgtccttcttttaattcttaacttctttgtttggtctcttaaaaagaacttatgtttctgccaagtgctgcctacggtgtttttgagatccggagaccgtgggcatacatcctcaatggctgggagttgatatttagcaggatttgggggttatctttgagaaagttcatcctctggatagcttgccagtaatcgaatgtgtgtcacagtgttagggtctctctatgcatagtatcttagtgttctttttccttttctagagtgaaatctgaagtcattgatttgaaacctttcctcatttttatataggtgtttggtgctataaattatctcctaagtcctgcttttagtgagaatctcatgttgtatgtttgttttcattcatttaaaatgctttctcatttacattttgactttcttgactcatggagtatttagaagtgcattatttcttttctaagtatttggggattttccaaaagtctttctataattcagttgtggtcagagaacatactttttataagttgaatcttttaaaatttattgagactcattttatgatcatagtctatcttgggaaatgttccatagacacttgaaaagaatgtattctactgttttagtagaaaagaaagtattctactgttttggttgactctcctaatttacctaaaatggcactaggtcaagttggttgctagtgttgttcacatcttctctctatgcccttagtgattttatatatatatatatttttttccaatcaatttttgaaagaggggcattaaaatctccaattaaaattgtgaatttgtctgtttctccttgaagttctttcagtttttgctatatgtattttgaagctgtctcattaggtgaattaacatttaggattgttgtgctccttgatgaactcatccctttatcattataaaatgatcctttttatccttggttatagtctttgctctgaaatttactttttctcatgtcaatatagccatttcagctttctttgaaagtcttttcttttttagggagtttcaatctaaggtatttatgtaaaaactgtgaaactaatttattaaaatacttattcgattaatcaaggtataagtagaattcactgatagttttcagtcgtccttctacaattccatttctacaatgttatggcttttatagtccttcctcctccattgtcatgtgactgtcattttacagcccacataatgcaagattttcatatacttaacatttagcatgaaatgagcactggccaattagaatgagtgccagatataaaaggtatggcttcactggtgcatgctggctgaatatcagtcctgaatatataacaattaatgtctcctgagttaggtgcaggagccattttttttccagtcattcatatgaaactctagcttctatagataccttaaaaattaaaataatctttaacacttagaattctaagcactatttagtaatcaaatatatcaatatgtatatcaacatcttaaggcatgacttctttatattaagggaaaattccacaacagaacttattttagatattggccttaaaacttttattttagatattgactattttatgtagcaaatatttgttcattaatccaccagtttgtttgctttttttaattgaggctttcctgtaggtcagccattgggaattcgaggatgagcaacactacttggtcttgcccttaagaaactactgtagtcagggagcgagaactattcccagttctggtgcactcaagatatcatgtggcagaggggtaagtgggcgggagggtgtaagaggacatcccttggcctcacaagatctctcaaggtgtaagagccaaaaacaatttaacttcatttacatatgtccaaaaaggtagcaattaatttgtaatctatactttgttccattcattgagaaacttcacttaccttgtaatcagcataccttcaataattttttttttttggtccatgtctggggttttactggaacccttcctttgctttccatactctatgtagcacatactacctagtggagtactcacacattgttggcactcagtaaatatttgttgaacaaataaatgaatgaatatttgcccctggtaccatggaggatataggaaaaaattggagctgttgttcagccctttcatgaactgggtattacctgaagaaagtgaagcatcttggctgttagcaatgttcaatttctttatcagagtagtggttacacatgtgttcaccttatgattatttgttatgatttatcaacttttatcaagctatatttcacaacacaaaaacttaaaacacatgataaaaaataagtgtaacagcaaaaaaaaaaaaaaaaaaaagagagaaagagtggaagaaggaattttaatttttaagcctcccaaagttctgggataataagcatgagctactgtgcccagcctgggctgtcattttttatacaattaggaaagttgttctgctccctccttcagttttggatgatgtttgattttagtcttatgtagacagatctttctgtattataatttacactgtttagaagataaatatggtagataatacaaagcagtgttattgttgctcagaatagaacttggataacatttttgacactgtaataataatattaaatatcactattaatatattacatgatggttgagatatttacataatatttattaatcttatcattggtatgtattataaaactaaaaatgatactgaatattattaatatatattttacatgtttagtttttcaatcattaatcacttaaaaagagagcgagattagacacagtattaatttgttacatggtttttaacctaaaactctgacaattttagttgatgaatactcattcataccaaagacctattattaggaatagaacttgttaaatatgtacatatgtacctgattaaaaaaactaaagctttgcagtaagaatttgtatttgtatgtaccaaaacaatatatctatatttagctcttatctataaaaatctaattgtaattgatatgtctaagaaacacccaaaactcagattttgattcttttttccaggatctttgtactttatccagttagactaggtctttactttcaagaaaagagagacgagaagagggaaggaaaactcacttaacatgtttcatcagcatgatccatgaagttatcagcaggaaatataaacagattattttaagcaatgatcttgctaacaaaatacttgaatgtgctttgtagagaagtagttacccacacataacccatgacctgttcatttggcagattgccatgaagtatttacttgataagattatttattgacatctagcttaaaatgaatattgcattatgtctgaatgtgattcttattacaaggacagagggataatacaatagtgaaccaatgatcacttcctatacttctgtcactctgtgacgctgagcatacttccccagagtccctggttggaaggagggcacacttactatatgggatgcataggtgccaatggttgaagttgtgttcatgcagcatatctacccagaattggtatggtgttgccagtgtaggtgctaatactacttagaatggtgaagatttgagtacagaagcttccctgagaagttctgtactttagtcttaattaccatatatggggaaaagtctgtatcaaaagggctgtgtattcttgactgatctttgtgtctcccaaccttttctctttttctttgctagttatgccagatgtttctagtgtctacaggtatgatggtcatagtcaccaccatatcataagataccttcccccattccctttatcctgacttggtataaacaagttcctttttcctttaccttaactggggcaggtatgtatacagggaaccttcaaatggactcttaaagaacaaaggtcaagccctgaagtttcccattgcaagtgcattctagcctgtggcacaccaaagtatttggaaagctctgctctatcagttattcaaggactgaggttccttccctcctaagcaaccctgtccaataaaaatacagtagaagccacaaatgaatcatacttgcgatttttaaattttctaaatcaagaaagtaaaaacacaataaattttaatatctcttatttaacccaatttgtccaaaatattgttttaacatgtaattaatataaaattattaataaacaatttcaaattcttttttgcacacaaagtttttgaaatccagtgtgtatcttatacttagaatacatctcaatttggactagcaaaaacatttcaagtgctaccacattggacagtacagatctagaggttcatttttctaggacctcagaatcctcgatcttcagaatccagtcagcagacaaggaaaagagagtacataaaatatctcaaaggaagttttaaggattcaacctggcaccaaagtatatcacttctacccacgttccattggccagtatttagtccatatgacctgatctaactaactgcccagggcacctggaaaatgtcatttagctgtgtgcccaggaggaaaaaaaaataggtttggcgagtacagagtagagtctttaccacagcataaggtattattattaccatattttacagatcaggaaattgatgcccaggcagattaactgacactcttgttaatgagaaaatgtaagtagatgcgaggtcttcactctctggagtgatatttcttccatcagactgcccttctttctttcctttatttgtccttcaacctcccctttaactctgtgcatgtagatgcagctcttgcagtaaacctatgtcttcaatattttatcacattggctctcctaggctgtactctgacttaatgacagtatcctattacttctgttttagaaaatgataagcgcccagtataatgaagcaaatatgccttattactggatcgtttaactaatagtactattttcagcattgcattatcattttgagtgggccttttccttcctcatactgaagctcctcattcaaagcaaaagattgttaaggtcctcatcaagccatttcaatcaatgtataaattgtattttatgttataatgaacagtctgttcaattgaagtttttagctttttaaaagtgcttagaagaatagtaacagaagtgctcttaatggtgaaattattgaactgaagtgcttggataagctgttttatttcttaaatgaaaggagatattttagatggagaaatgagataaatattcctcaaaggagactggtggtaaagagtgactgctctccatggattactgattataacacaagtgtccatcaagagcagcttttattgaagacagtttaattggaccactgccctttagctttaaattacccacggcaaactggtttagagtttttgttgctgtctgtcttatatttgtgaatatgaaatacatttacagagccaaaaatttaaaaatatgaaaagatatacagtgaaaacgccaccttttatactccaatgcagagagctggcctttctaacagtttctcccttttgtaacccaactttgtaggtactcattcttctcttcttgcatattcttctagaatttgtatatgcatttataagcaaatgtgaatatatattcttagttttcctcctgttttatcctatacatactgttctgcaccttgctttttaaactttatacaccatgaagatctttctgcgtcagaatataaagtcttcttattatcctcattcttatagttgtgtagtgctctactgaataaatgtaccatactgatgaacatttagtctgtttccaatctttggatattacaaactgtattgcaataaataagcttgaacataagtcatttcacaaaaaatgtaaacatattgcatacataaattctcagaagtagaattgctagtcaatatatatagtatatgcatttggaatttaatagaaatggccaaactgctttccacagtggttgcactaatttaccgtccaaccaggaatacttaatagtgcctatttcatgtgcctttccccatagattgtgttatgaaatttttttttgctctgtgtctgaaaatgatattttagtgtagcttaaaattatatttcttttactgtgagaaaagtgagcatcttttcatatgtttaacgatcatttgtgttacttgttctatgaactgtgctcatatcctttccctatttttcagttgtgttgttggtcttttcttttttgacttataggagctctgtatttattatggggataagctgtgtggtataagctgcaatattttttctaccagtttttcatttgtcttttgactttacttatggcatcttttttcattactatgcattccttttctttttctactgtagtcaaatttatctttcttttaatggccctggattttgaattcagaagtctttcttcactacagggttatatgtaacttacagggtttttttttctagtaatttttacattttgatccccttttgaatctttgatacatttgggatttatcaagatgtataatggatccaacttactttttgtcagatatttatctagttgttactcttcactgatttgagatgccccctttatcacatgcccaaatactcatgtatatatatttgggtttattttttgacttattcttcccaattatctgtctgcattcttgtctcaatcacatagttttaattactgagactttacaatatattttaatatttgctagactaggttgcccttattgcccttttttcagttttgtctgactattcctattgtccatttttttgttagaatccaactctttcccatcctacctttcaacccttccccccataaaaaggcaagtttgttattatttatattaacatatattaatgcattatattgatatattaattattttataagtatacacatacattgataaaatagcttagtgaggttgctattttgaggatatggagttttcctatccaataatatattttattattcaatttttcttcttaaaaaattattccatagtactttaaagttttcttcatttaggtcttccacatttctcttaagtttattctaaggtattttatctttgttattgctatattgttaatggaaccttcagttatagctaaaaagagcttgttatttgtatattttattactattgattttcaggtattaatttttttgttgtttgttttgtttgttttttgatatagggtcttgccctgttgtccaggcttgagtgtggtggcatgatcttgggtcatggcaacctttgcctcccaggctcaagcaattctcctgccccagccaccaaggtagctggcactacaggtgtgtgccaccacacctggctaatttttgtatttttagtagagacaggtttcgccatattggccaggctggtctcgaactcctgagctcaagtaatctccccacctcggcctcccagggtgctaggattacaggcatgagccaccatgcctggccatttggagatattaattttttattccattatctgattgaatgtttttgctttttggaatttttagtcaattattgagttttcccaaatatacaatcatatcatctttgaataatggtaggcttacctttttcttcccaatagttactcctctggtcccattacctttcattaagttattttgtcacaataaacaactctcagatcttcatggctgacaacaataagatacagtcgtgctcatgttacatacccattagggtaggcctcagctctgctccatgtctttgtcatctgggactacactaaaggagtggctccatctgggatatactagtcttctgaaatcagacaggaaagcgtgacaacagaaccaattgatggcttttagaattccagctaccttattttggctcacatttcattgtataaagcaagtcatatggccaagcctgatatcaatggtgcaaggaagtacagtcctttcatagggaggagcactgaatattagaaatgaagagtacaatctactataacctctaattaatttttccagataggcacagcaaacttcaaataacataatcataactcttagagcccactagctccaagtacttaatttgtatagacctataattgttagtgttaattatcagttggttctttctatatgacaaaccactgcagttgactcaaggtggctgatgttggccaggcttagcaggcaagttccttttcacatatctcgtatctgccttgaatcagtgagttggccaaggtagggctgcatctatggtgaggcaaatgagggacttctcaggcacaaaatttaagaggatgacaaaaaaaacttggtaatcaagatatatgatattttaatatagtatttttgaaaaccaaaattaatgcaaccaaatccatgatgaacaaaatatcaaaattttaaacaaagacagaaataagaacaatgctgtgccaagccatattggagcctaagccaaaagggaaaattagtaatacttattctgtctttatgaaaaattattgaaaaagtatcccttgagtgttatgtgtaaagtattatgttacatgcaaaatgtatatttttatttatgaggtatatataaatagagatgattctacttagttaagaagtcatacggtatttatatcaaataattgtagctcttttcacaattacagtctgataatatgcacagtagtttgagaattcattttttgaaatctcctttagacatttttgcatttttctttgaaagtcttacatggtggctaattttcatgctttttatggtagatttttttaaaaaacaggcaaaaattattaagggtcaagtgttgggtaagtaagcagggttaagctgggtattaatcttgatcaaaaataagaaatgggctaagcgtcgtggcatggacctgtagttcaagctactcgggaggctgaggcaggagaatcacttgaacccgggaagcagaggttgcagtgagccaagatcatgtcactgcactccagcttgggtgacagagtgagactccatctcaaataataataataatgataataattataaaatgagatatacacataaaaaagttaataaactgcaaatgccataaagttgttatttattattgatatagctaaacaagtttgggtttatgtgtttctgaatcaggggctggataactgatccattcacagatttattgattaatgaatggactgccctcacctaatggccgataagtctaggtgtgtctagatactcacatatgcatacataatcaaggccagatcttacaaccaagcatgactgaaattctggaggaagggacagggaacagttgatatagatgtggtagggactggtcaccccatagtagagcatttgctactctttgtagtcttttattttcagtttctacatcacgacagaacaaatagaactgtggcttttgggttgggtgtcatggctcacacctgtaatcccaatactttgggaagtcgaggcaggaggattgcctgaagccaggatttcaagaactatgacttttgtcatagttgggattacaggcacctgctaccacacccggctaatttttatatttttaccagagacggggtttcaccatgttagccaggctggtcttgaactcttgacctcaagtgatctgcccactttggcctcccaaagtgttgggattacaggtgtgagccaccacacccagcccctcattttagttcttttacctcaaaaaaattgcgcatctctttttctctgtgtgcatgtataattatacacattcatacacacatatacacacacacttcttaggaaaacattaagaaaaaaagtctaggtaaatgcttaaaaatcattttttttcctgagttatacaaaggaaggagacactggtgactagcataagataaattaaatatattagagggtttttgtttgttggctggcaagattgagtaaaatttttgaccatcttctttccagcttagtcagttatacacatattgtctgtatctatccaacaattgcttgttatttgtcagtgatattagtcaggtaattatagcatagcaaacctcaattgggcatttatagaattacttatagaaaagtaatcagacctgttccaaaatttgtagtctaatgtttgcacaaggcacagtagtaatcactaggataagtaaggtacaattcttcccctcaaagactttaccatccagtatctcacaatgtaagaaataatcttaaggtggaaggctttacaattagcaaaacagaaacacaggcctcaaattaacttctacatttaaaataagggtgttggaaacatcaaaatgcaatggctgggtagttgtgcttattaagtggtgtgtttgagcatcagaatgtatttggctgattcagcacattgtggtggttttttttttttcttccatttccatcctttttttccttcctacacacgcagcaaggtatttcactcagctgtgaaatatttaccattgcaaggcaacatataattaagtgccggaatgagtgatgcagtcaagtgctattggagatcagcggacaaagaattcagtgtggcctgggacaggcattgtagaggagacagggcttaaattggatcttgaaaaatatttgatcgagcacagaggagggataggatgatgatgcaagcaacagcaatgccatgagcaaaaggcaagaaccagaatgagtcaggcttatttcaaggatagtatgaaacccatgttctctgaaatgaggatctgggtaggaggtgaagctggcaaggtagactgggaagcagctgataatggtagaaaggaacaagccatggcctgcaagcccagagacctgagttctgtcactaactggtctgtgtctttggcaatcattgaatcttctacttcaattatctgtgatgtgaaatgatgctttcagactaaaaaaatctctaaggtggcttcctgttttaaagtattttgtgattcttttatggtgatccttgataaactggaattaggacttttgaatctatcctaacagtccttaaggttgttcttaacaagaaaatcacataatgaaagagggaattcatcacatagtgaaagaggtaattattggtattaaattcagtgaagaatgattgccttgggaaaagggattagacatactggaggaaggaaaccagcttgaaggctatgctgatagttcatatgggaacagggtagttgaaatagaaatcaaaaggagacagacactagaaccattgtttattcattctatgttgatcatcaaaactatgctaggttctgaagatccggttgtaggaaagacagaagaggcccctattcttgtggaacttacattctaacaaaaggaaaaactcagcaggatttggtgattgaccaataggatatttgtgcctttaagagaatgacacttactgcaaggccagatgtctagctacaaaggattgaccacataaatgttgaacattcataaaatgaaatactaggcagccatacggaattatgaaacatacttatttacatgggagactattcatatgttattgagttagaaaaacacaaatatagaatatgatctagaaaattatataccattttatatgaataataggattattagtgatttatctgattactcttcattcggtggttgtttattgagtacctactttttttttttttgatacggagtctcgctctgttgccaggctggagtgcagtggtgcaatctcggctcactgcaacctccacctcctgggttcagcgattctcctgcctcagcttcccaggtagctgggactataggcgtgcaccaccatgcccagctaattttgtatttttagtagagacggagtttcaccatgttggccaggatggtcttgatctcttgaccttgtgatcctgccttggcctcccaaagtgctgagattacaggcgtaagccaccatgccctgcctcttttttttttttttttttttttttgagagagtcttgctctgtctccaaggctggagtgcagtggcgcgatctcggctcactgcaacctctggctcctgggttcaagcgattctcgtacctcagcctcctgagtagctgggattacatgtgtacactaccacgcctggctaattttttttgtatttttagtagagacggggtttcgccatgttgtccaggctggtcttaaactcctgagctcaggcaatctgcccaccttggcttgtttattgagtacctactttgtaccaagcattgtttggggctcttaaggataagtggtaaacaagatggacacagtctgttattagttttttgtcttatcttttctaacttttttttgtaaggaactcacattatttttatggcaaaataatttcttaaaaaagtttaaaaaaatccttccattggccatttgtgtggtatgtgtgttttatgaattctccttgaccatacatttggagtgggtgcactcttttaaattacactgttctgtcctgtgtcttgtccaggtcttgcacaagataggaggtggctccaggacaccagtctccttcttagggtagattagggcactgtctgccctttggtgaagccagcgtggtcagaactcccagatttggtttggctccaaggcaaatagagtcctgctgggactctgctggctgtttatagtcctttcaagggtccggtcattccaaccttggtgtctatttacgtttgccgtatgttacttgacgctccttcattcccgttgaagctgcctctcccggaaatctctgtcattccataagccctagctgctgcctcaccgtgcagctgacctcatgcagattgaaaaacaaaatgtattctggctacatttaaaggaagttttgaggccagttgatgggcaaggacttggctgtattactttgtgggcggagcgcttaaagggggatctagcactggctagcaccagattccagggctcttacacaaaagcctttgtgttattttttcctccctctgcccagctcttctcccatgactactaatagtgtctctctgctataatgcactcatcattgccttctatttttaaaatgctagatcttgcatatgccaaagaacaaacaggcaagcaaaaagccaccgaattattaaaaagtattccatgttcctataataaattatataagtaaacatatggatacatatatatatgtgtatatatatgtgatatatatgtgtatatatatatatatgtgtatatatatgtatatatacatatatatatgtgtatatatatatacatatatatatgtgtatatatatatatatgaagaattacctacaatcttattccctggagatattttgatacaatttctctgtatacttgtttttactttgtgctcacatggtttttctaagcttttgttctaccacttatatagcctacttatagaccttaagctgtgtctgtaccaatgttttccacctaagatagacctattctttctatagagaacaaatgctattataatttggtacttaactactttttctaacttcaagatggcctcttggccctcatcatatgatcacagaatatttgttcatttcaaggaagcattcatttagtttttcgtgttagctctagttatgtgaaatctctggagtcatgctggccaatctaatccttactgtttggattctgtgataacaccgagggctccttggggtcactgatgatcttgagctttgcaccaacctgaaggaagaaggaggagaagacgttcctctgaccaaaatcatcccacacttaccctctatcatctgtttagagtgttagaacattgttgacatttgtgtgagcagtcctggagcacaaatccttgatacagtgtaagtgaatggacaagcaacacggacaaagtttaattgcagggtccatttttttgctagtttcagaaataaattttccttaggaatttccttgttgtcagtgttttctctctgattattgagttcagctcttttcaggccagacctctgtacatctagctttctctgtcttccagagtctgattagtgtcacaaagatgccatgcaattccaaagaggcaagatctttcttgtttcagtgtttcaggtctttctttaattcattctgtttacagaaatcatctactgctaccttcttggttttttttttttttttttgagacggagtctcactctgtggtccaggctggctggagtgcagtggtggatctcagctcactgcaacctccacctcctgggttcaagcaattctcctgcctcagcctccaaagtagctgggactacaggtatgtgccaccacgcctggctaatttttgtattttttaatagagatggggtttcaccatgttggccaggctggtctagaactcctgacctcaggtgacccacccacctcggcctcccaaagtgctaggattacaggttgtattaactattgataacccctttatatatttagttccccataccagttctttttgttcggccgtctacttttggccacacattttttcctcttttcactgagctaaactgagtgctgaattgcagtaataatctcattttaaatgtctcgttcatctttctctttcctgtgttttaaaattttatctttaatagtgtaccttactatttgtaagtcacctgccttctcccctctgttttggaagcaggtaaagtataaatcatagagagatcatataagttgtcccatccttgtaaatctctcacatagtcttatgcatattttctgtatctccagctcagttgtccctcattttgtttctttaattttattacttactttacttgttaatttacttgtagacatttggattttcactagacattcacaagatggtttctgtctgtagttaaatagtggtgggatgggcataagatttagggtactgtggaggggtgctttttaatcatgttgattaatgttgaaagaaatgacttgaggtttggttgatatttatatttactcagagctaattttttgattctgtttttccttttgtttgccttctgaaactccactcgttgtttgatatgagtagaattctgtgtgtataatcagagagaagaaagttctttctcactaagtttatggtcaatctaagtaagcaatgagtttaaaaattactttatagacgaaattaatctggaggtttagaaagtgcattgaaattgaatttgtttcttagctggcaactgatttcaaaactgaagcacttttgagtgctttgagggatgttagccaatgttataggattatttgaatgaacccttcatcctccattttggtgtgacattgggacattaataatgaatgattactgtacttggtggtcagatatgctattctgatccatgtttatttcccagaggggcctctggaaaagggcaatgagggtggatttaaaaccacagtattggaattcgataactttagtcttgctttgtatgtctagggcttgctgaagagtagttataatacggacagtcagtcaagcaaggagcaggcaaaataccaaaatagattttcataactcagacataagctggattctgtgttttaatttaggctctaatgctcagcaataaattttccagaaaatgttctagattgaaaatctatcagtacaaattatttgggttagtgaaagtaaacataagtttatataaactaattagcaaaaattatatgttgcaataaaccctaaggaattttgaaggactgaaattttagtcatgcaaagtttatccccaagggaggactaagttctcagatgtctttactcccccagtaattactcaaaggcttgaaagtggaagattctgtatcttagggtgttggggtcactccaggaggtaaacaagatcttgctttgtcaagtgatggaaactgtccatagaactatctcctcccttgtgggtttatatgaaaatgtagaagaggattggtaatctattcagctatactccagggcaaagcaatcaatcaaattaaaaaggagatggagtgagtaaggttcacattcccactcttatttcagattaataagtgtattttccttacctatgtctttatttcaattctgctaaacttaaggaaaaaacaatcagagcaaacacagttaataatcctagtaaccagaattaatgatatgttatttatctgtatacctggctaatgttacctggccacctgacatagagccctaaaagaatgagggtgactgtggagtgagagatccctgcttacacaaaaagaatgctgggaatctgaggatcctgctgctttggtataattcagttgcctgctttgatattatactttgtatccttcttgtgcatagtttgacatgcattccctgactgttgttttgccatggaactgacttaacctcttggttgtttaactttttattttttttcttatttctcacaaaagaaatacatctctagtggagaaaaattttaaacatacagataaacagtacaataaaaatcatttgtaatgctgccacctagagaaaatactatgaatagctttgacatattttttactttagtatacatagctatactttttttctatatagaactcttttataacttacttcttttctggtaacaatatgccttgaacatcttctgatgcgattaaatatattttacaatgtttttagcatctgtgcattttttttcattatgtggaataccacatcatgttaaactcatctctctttttataatttttcaccattataaacaagtatttgacagcatttcagtaggtaaattcattattgccttagaaaagaatcctgtgaataaaattgttgggtcaatgggaggtaatggagctttccaaaggttaatcgacagcttgccttcccatctacccgatatgaaagaatgatactggcttcagaatctggatttgttgttatctaattttcagaaccttaaccaaaggactttgatcctatgaggcttcatttcctgttctggactctcagatgtgagacctaaaaacttgtgtctataatattagctctcaacagacatactgtagttgtttaaatacaaatcaacagtcaagccagttgctgtggatatttatttatgtgggggaggaaggcatagaaacacatccttagaagctgtgccatggtcttactgatctaaatagataaaaagtacatctaagaaagagctgccaaaggtcatacaatgagtcagcaatgaaatcccaaatagaactttgatttccttaacttctttctcccagtagaaaaagtactaatgaataggtcaggagaaagcatttgtaaattaacctgtaagatcctttataccttgaaacactccaaaatttcaatggagttactagaaatttacatcagataaaacaaatctaaactgctaatggatattgatagattctttacaagataaaatcttaaatgactgtaatgaagaaaaagcaacaggtggtatagggagttgaaaatgagactcaaaggaatctgtgtatacctcttgcctgggaaaggataagtaggagggtggaggagtaatggcctgaacccagcatagcaactaaggaaaacacaacaaaaagggcctctcaggacattaatcctggagtgaaggtgggggtcttaactttcattctgaatgaaccatagacctttcctcctcagcttggtggtatggatctgcactgttatttcagggcctgtggcagggtgacctgcaggagtcctagaatgtattagtctgttctcatgctactaaaaaaagacatacctgagactgggtaatttataaaggaaagaggtttaatgggctcagttccacatggctgggaggcctcacaatcatggcagaaggcaaaggagaaacaaaggcaagtcttgcatggcggcaggcaagagagcttgtgcaggggaacttccatttataaaaccatcagatctcataagacttattcactaccaagagaacggtgtgggggaaactgcccccatgattcaatgatctccacccggccccacctttgacacatggggattattacaattcaaggtgaattttggttggggacacagcaaaactatatcagagagatacctttcaatgtacctaggactggaactcaagtcttctgattctcacttagtactcgttctactacttggaagaaataacagtaattttacaaggtttttcagagatatgtaaaaacttctgggtaactaaagcttgggctgtcttatgggtggagtacacaaaataaaagagaaagaaaacaaaagaaaatctttgggcttgagagtacaggtcacccatctagcactgtctttatagatgaggaaactgaggctcagcaatctatggggatacagataaccaatacacacaggggccaagaattcagactctctgatgcctagcgtgatgcaaagtgatctagatacattttttgcttcatatattcttttcatgatcatcttgaagctttcgtttcatggtttgtgaattcaatatcggtaacatcagtatgtattaagacttcatttacatgtggtactaaactctgtgaagcaaaatagacaaagtgcttgccctacaagaatttcctaaggcaaagagacatagacagaaatgacctatacaccactgaacaaacaaagcaaatatataaattgcataatttttgccatgtgagatggtgaatgaagagatgcttacagtctgttgcttgaagagaagacccatcttcataaccctgtgacctacagtagttacattggaaagaaaaacaaaagagtgcttcacctggcatacctagcattagagttgagtttctttggtatatcattgatgactatcttcagtgatttttgtcctttttgcgtattctgtgatgatctgcaaagactagaaggtttgctgaggcagaaagcctctcagggtatgccttctaaaaccaaagggcttttccctctttggaggagaattaatgatcacgtgtttttgtcatatttttattgagcctttttttccttctggatggaccttgaagatggtaaaggaacttataaattcccaatttttaaaactgtataatatgaactgtggtgaacagtgagactaggatataagttgtttgctctcaaagaccagataaagacaaatcagaggtgaaactcctctcttctgtgctgaaaaaaggcaccttgatcaggtttcttataaatacctgtcctagtctttcgcttcagtaccagtactagtagtagtattaagatagtattgctattctgaaactatcgtatatgtaatgtgaaataaaacgaaaagtaagtatgagatcttctaattctattaccacaaatttttggggtggaagaaaggaaatacggatatactatagaagatattaggtaaaaaccctgtattcctgaatttgaattggatatatcaattgtgaactcataggtgttttatttttcaatacatgtttttcctagctctattaatgaaaaaagcctagacacagtgaccaattcagtagtaatgaacagccctattgccttgatggtggtctgaaaaatcttttcccattaaaggaaaccaagccttcttagaaaaatatctgattttacatcacatacaagatgagcaaagaagctatcaaagattactattacagaatagtcaacttgaagctagattgaaggagatcccactggccaaagatgggcaactctcaataaggttagaactgcagtgaatcaaaagtggatcatatatgtttaaatccatgagtatgcaatgatatcaagtaagacgaccagttggttaccttctgaatatgacagaatcaattcatttcctcgaaaactagctaaagaaaattaaagaatcaaatatttatcttaactttcctttatgaattttacctgtatgagcaaatagttgataaagggaagcatcttctattgaagttattctagctaataaatgaaaacaaaatgatagaatatcatcatgctggaggctgttcaaagatggcagaataggaacagctgcagtctacagctcccagtgtaagtgacgcagaagacgggtgatttctgcgtttccaactgaggtactgggttcatctcactgaggattgttggacagtgggtgcagcctatggagtgtgagccaaagcagggcggggcatcacctcaccctaatagctgtgcttttccagtggtcttaccaaatggcacaccaggagattatatcctgcttctggctcagagggtcctatgcccacggagcctcgctcactgctagcacagcagtatgagagcgaactgcaaggcagcagcaaggctgggggaggggcgtccaccattgctgaggcttgagtaggtaaacaaagcagcctggaagctcgaactgggtggagcccactgcagctcaaggaggcctgcctacctctgtagactccacctctgtgggcagggcatagctgaacaaaaggcaacagaaacttctgcacacttaaacctccctgtctgacagttttgaagagagcagtggttctcctagcacggagtttgagatctgagaagggacagaccgcctcctcaagtgggtccctgacgcccgagtagcctaactgggagacacgtcccagaaggggccgactgacacctcatacagctgggtgcccctctgagacgaagcttccagaggaaggatcaggcagcaacatttaccgttctgcaacatttgctgttctgcagcctgtgctggtgatacccaggcaaacaggttctggagtggacctccagcaaactccaaaagacttgcagagggtcctgactgttagaaggaaaactaacaaacagaaaggacatctacaccaaaaccccatctgtccatcaccatcatcaaagaccaaaggtagacaaaaccacaaagatagggagaaaccagagcagaaaagctgaaaattctaaaaatcagagcacctcttttcctccaaaggaaagcagttcctcaccagcaatggaacaaagctggatggggaatgactttgatgagagaagaaggcttcagaggatcggtaataacagacttctctgagctaaaggaggatgtttgaacccatcgcaaagaagataaaaaccttgaaaaaagattagacgaatggctaactagaataaacagcatagaaaagaccttaaatgaactgttggagctgaaaaccatggcacgagaactacgtgacacatgcacaagcttcagtagccaattcgatcaagtggaagaaagggtatcagtgattgaagatcaaatgtatgaaatgaagcgagaagagaagtttagaagaaaaagagtaaaaagaaacgaacaaagcctccaagaaatatgggactatgtgaaaagaccaaatctacgtctgattggtgtacctgaaagtgacggggagaatggaaccaagttggaaaacactattcaggatattatccaggagaacttcaccaacctagaaaggcagaccaacattcaaattcaggaaatacagagaatgccacaaagatactccttgagaagagaaactccaagacacataattgtcagattcaccaaagttgaaatgaagaaaaacatgttaagggcagccagagagaaaggtcgggttacccacaaagggaagcccatcagactaacagcagatctctcagcagaaactctacaagccagaagagagtgggagccaatattcaacatcttaaagaaaagaattttcaacccagaatttcttatccagccaaactaagcttcagaagtgaaggagaaataaaatcctttacagacaagcaaatgctgagagattttgtcaccaccaggcctgccttacaagaactcctgaaggaagcactgaacatggaaaggaacgaccagtaccagccactgcaaaaacatgccaaattgtaaagaccattgaggctaggaagtaactgcatcaactaacgagcaaaataaccaactaacatcataatgacaggatgaaattcacacataacaatattaaccgtaagtgtaaatgggctaaatgctccaattaaaagacacagactggcaaattggataaagtgtcaagacccatcagtgtgctgtattcaggagacccatctcacatgcagagacacacaaaaactcaaaataaagggatggaggaagacctaccaagcaaatggaaaacaaaaaaaaagcaggggttgcaatcttagtctctgataaaacagaccttaaaccaacaaagatcaaaagacacaaagaaggccattacatagtggtaaagggatcaattcaacaggaagagctaactgtcctaaatatatatgcacccaatacaggagtacccagattcataaagcaagtccttagagacctacaaagagacttagactcccacataataataatgggagactttaacaccccactgtcaacattagacagatcaacgagacagaaagttaacaaggatatccaggaattcaactcagctctgcaccaagcagacataatagacatctacagaactctccaccccaaatcaacagaatatacattcttctcagcaccacatcacacttattccaaaattgaccacatagttggaaataaagcacccctcagcaaatgtaaaagaacagaaattataacaaactgtctctcagaccacaaggcaatcaaattagagctcaggattaagaaactcactcaaaactgctcaactacatggaaactgaataacctgctcctgaatgactactgggtacataactaaatgaaggcagaaataaagatgttctttgaaaccaacaagaacaaagacacaacataccagaatctctgggacacatttaaagcagtgtgtagagggaaatttatagcactaaatgcccacaagagaaagcaggaaagatctaaaattgataccctaacatcacaattaaaagaactagagaagcaagagcaaacacattcaaaagctagcagaaggcaagaattaactaagatcagagcagaactgaaggagatagagacacaaaaaacccttcaaaaaatcaatgaatccaggagctggttttttgaaaagatcaacaaagttgatagatcgctagcaagactaataaacaagaaaagagagaagaatcgaataggcacaataaaaaatgataaaggggatatcaccaccaatcccacagaaatacaaactaccatcagagaatactataaacacctcaacacaaataaactagaaaatctagaagaaatggataaattcctggacacatacaccctcccaagactaaaccaggaagaagttgaatctcttaaaccaataacaggctctgaaattgaggcagtaattagtagcctaccaaccaaaaaaagtctaggaccagacgcgttcatagccgaattctaccagaggtacaaagtggagctgctaccattccttctgaaactattccaatcaatagaaaaagagggaatcctccctaactcattttatgagactatcatcatcctgataccaaagcctggcagacacaacaaaaaaataattttagaccaatatccctgatgaacatcaatgcaaaaatcctcaataaaatactggcaaaccgaatccagcagcacatcaaaacacttatctaccaagatcaagttggcttcatccctttgatgcaaggctggttcaccatatgcaaatcaataaacataatccatcatataaacagaaccacagaaaccacatgattatctcaatagatgcagaaaaggcctttgacaaaattcaacagcccttcatgctaaaaactctcaataaattaggtattgatgggatgtatctcaaaataataagagctatttatgataaactcacagccaatatcatactgaatgggcaaaaactggaagcattccctttgaaaacgggcaccagacagggatgccctctctcaccactcctattcaacatagtgttggaagttctggccagggcaatcaagcaggagaaagaaataaagggtattcaattaggaaaagaggaagtcaaattgtccctgtttgcagatgacatgattttatatttagaaaaccccatcatctcagcctaaaatctccttaagctgataagcaacttcagcaaagtctcaggatacaaaatcaatgtgcaaaaatcacaagcattcctatacaccactaacagacaaacagagagccaaatcatgagtgaactcccactgacaattgcttcaaagagaataaaatacctaggaatccaacttacaagggatgtgaaggacctcttcaaggagaactacaaaccactgctcaatgaaataaaagaagacacaaacaaatggaagaacattccatgctcatggttaggaagaatcaatatcctgaaaatggccatactgcccaaggtaatttatagattcaatgccatccccatcaagctaccaatgactttcttcacagaattggaaaaaaactactttaaagttcatgtgcaaccaaaaaagagcctgtattgccaagacaatcctaagctaaaaggacaaagctggagacatcatgctacctgacttcaaactatactacaaggctacagtaaccaaaacagcatggtactggtaccaaaacagagttatagaccaatggaacagaacagagacttcagaaataataccacacatctacaaccatttgatctttgacaaacctgacgaaaacaagaaatggggaaaggattccctatttaataaatggtgctgggaaaactggctagctatatgtagaaatctgaaactggatccttccttacaccttatacaaaaattaattcaatatggattaaagacttaaatgttagacctaaaaccataaaaaccctagaagaaaacctaggcaataccattcaggacataggcatgggcaagtacttcatgactgaaacaccaaaagcaatggcaacaaaagccaaaattgacaaatgggatctaattaaactaaagagcttctgcacagcaaaagaaactaccatcagagtgaacaggcaacctacagaatgggagaaaaattttacaatctacccatctgacaaagggctaatatccagaatctacaaagaacttaaacaaacttacaagaaaaaatcaaacaaccccaacaaaaagtgggcaaaggatatgaacagacacttttcaaaagaagacatttatgcagctaacagacacatgaaaaaaatgctcatcatcactggccatcagagaaatgcgaatcaaaatcacaatgagataccatctcacaccagttagaatggtgatcattaagaagtcaggaaacaacaggtgctggagaggatgtggagaaataggaacatttttatactgttggtgggagtgtaaactagttcaaccgttgtggaagacagtgtggcgattcctcggggatctagaactagaaataccattttacccagccatcccattactgggtatatacccaaaggattataaagacacatgcacacgttatgtttaatggggcactattcacaatagcaaagacttggaactaacccaaatgtccatcaatgatagactagattaagaaaatgtggcacatatacaccatggaatgctatgcagccacaaaaaaggatgagttcatgtcctttgtagggacatggatgaagctggaaaccatcattctgagcaaactatcaccaaggacaaaaaaccaaacaccgcatgttctcactcataggtgggaattgaacaatgagaacacttggacacagggtggggaacatcacacaccggggcctgtcttggggtgggggaaggggggggagggataacattaggagatatacctaatgtaaatgatgagttaatgggtgcagcacaccaacatggcacatgtatacatatgtaacaaacctgcacgttgtgcacatgttccctagaacttaaagtagaattttttaaaaaaagaatatcatcatgctacaactcccaatacattaacagatctaggcaccgctgaccagcaattactaaaatagttgatatcaccaactatcgaaaaaagaacaaaaatcaaagttgaatacctctctctctctcttttttttttttttgagacggggtctgattctgtcgcccaggctagagtgcagtgatgtgatctcagctcactgcaacatccgcctcccagggtcaagccatcctcccacctcagcttcctgaatagctgagaccacaggcacacatcactatgtctggctaatttttgtattttttgtagagatggggtctcactttgtcgcccagactggtctcgagctcctgagccaagcgatctgccggcctcagcctctcaaagtgccaggttgcaggtgtgagccaccatgcctggccatgaagttaaatactcctcctgattaaaaaaaaaaaaaaaaaaaaagactgtggtacttactgttttgtcaaagaaattgaagctgaggtgaatcaggcctcaggatccagatgccagtttttagaaagtaaagaggacagaataactggcaggctggattgcttcatgtggcttcaatcaacaaatccaaattgtggaaaactctgcaggtctaatgcccgaagttcttcaacagataaattgtatgaaaaaggaaatacagatagaaaaacagattaaaagagacttaagctgggtgtggtaacacgtgcctataatccagctactccaaaggctaaggtgggcacatcatttgagactagcctaggccaaacagcaagagcctgtttcaaaaaaaaaaatggagaagagacttaaaagacatatcaagataaaaactgggcaaaagtaaattattatatgcaggtactcttgtgcgggaatgattgctgtgcaaatcaggatagtggtcacttttggagggatgaagcctctgtgatggaaaggggacaggcggaagcagttctggggtggggatggctggtaaagttctaaattttggcctgggtggttgttacaagagtgttttccttataataatttactaagccatatatataaacatctggtatacatgtaaatagcatatttactatatacatatatattacatacatatattaaatatatttatttgtgtgtgtgagacagtcatttgtttcattttatgataaagtgtacaaaaaagcaaaagagaaggcatgttagaaaaatccacaaacctgatgctgccctagagattattacaacactatcagtactgggtaaataaagttatggaatgttgttttctggcgcacaaagaatgtaaattctactgtagatatatttgtgtaatatcagtggtgggctacctttcaagtgctgggagcttttgcttttacagtgcttagcagcaggcttgcacgtagttcccacttcagcatcagtcagcctagacagatgacccatttctggctccgtgtttttcaatgtgtggtgcatagaacaccagcatgatggccatcacatgcttaagaaaatgcaggttctttggccctagctgtcttgaaaaggagtagcccaggaatatgcatggttaacaagcacactgcaaggtaagaaccaccactgtcttctctattaatttctacctgaaacactgctaaaaaaaatcagttctatgaagatgtcttggggaaggtatagatattctgaacaatttccagaagagctattgagagtcaagaccacagccatgatttttttagtgaatgaactcagattttgatcctgcattgtgtcatgtagaatactgaatgcaagaatgactaagcagtagcttgcttagaaaaacaatttctccagtgtacaataacaatggtcagttttcctccaaactttttgtttagggtttattcctggtcaaataagtcagagcctggtattaggtatttaaagtgatagctcaataaatgaatcctctgaagctttttaataacaattttatgcaaaaaattttcaaagcatggaaagcaaagcaatctacgtttgtatatggccaggtatatcctgacagaacttctaattggtcctttctcagttgaaggcagaggagactttcagagacgtgaaggcagaagtgtgaatgcttccaagactgtattctgcatcttcatcattctctttctatcatctcttccacgcttccaaatctgctcgctttttcagaccctctcctaatcaaagcaggaggtgacccaatgtcagtgactgctgacattacttgctgagtaagtgccaattagtgtaaatatacttcagaaagaaatttaagctactatttgctttttaggggtttacctctaatttgtaaaatacaatattttatccaattgaattcgacttcacaaacatcctttgcatctgtatggcggtgtcctaacagtgtggcattatagataaccaagacaaataagacacatttcctgcttctagaaagatacagtctagttagggagatggatgagtaacagccaataataatagcaaatcatttccacataaattagctcattttagtcatcacactctcataattttagcactaaaaagaataactactgtttatagagttcttcaaactttggagagaagttctgtgattatcataaaaagtcaggattattcccactgcgctccattatggtcattctttttttattatttttaaatttgagacagggtctcactctattgcccaggctggagtacagtggtgtgatcatggctcactgtagccttgacctcctgggctcaagtgatcctccctcctcatcttcccaagtagctgggactacaggtgtatgccaccaggtctggataatttttttatttttatttttttgagacagccttgccctgtcgcccaggttggagtgcagtggcgaaatctcagctcactgcaacctctgcctcccggggtcaagtgatcctcctgcttcagcctccagagtagcttggatgacaggcacctgccaccatgccccactaatttttgtatttttagtagagatgcagtttcaccacattgccccggctggtctcaaactcatgaactcaagtgatccgtccaccttagcccccacaaagtgctggcattacagatgtgagccacagtgcctggcccaggcttgcatactttttgtatcttttgtagagatgggtttttgccacattgcccagggtggtctcaaactcctgggctcaaggggtccttcgaccttggcctcccaaagtgatgggattgcaggtgtgagccaccatgttcagcccattatagttaattcttaatatgacaaaagaagaaactaggcttattagaaaagtgtatttgctagaggaaaaataaagaagaggtagtctagtttgtgtttttttaaatagtatttttgtaaccagtttagattcacagcaaaattaagaggcaggcacagaggtagcccttatatccccttgcattaaggtttccacacatgcatagctttccacattgtcagcacctcccactagggtggtacatttgttacaattgatgaacctactttggcacatcattatcaccccaattccatagtgtacatagtgtacattgggttcactctgtcttgtacattctatagattttgaggaatattaaattatgtgtatccacctttatagtatatagaacagtttcactgccataaacatcctcttctctacttagtcttccctccttgccccaaacggtctgggagccactgctttgccttttccggaatgtcatataaatggaatagtacggtttgtagccttttcagattgacttctttcacttagtaatatacatttaaggttcctcatgtcttttcatagcttgatagcttacttctttttagcactgactaatattctattgtctagatataccaaagtttatccattcacctactgaactccttggttgcttccaagttttggcaatccttggttgcttccaagttgtggcaattatgaataaagccgctataaacatctgtgtgcaggtttttctgtggatatgagttttcaactcctttgggtaaaaaccaaggagtgcgattgctggtttttatggtgagaatatgtttagctttgtaagaaaccaccaaactgcattcccactacaatgaatgagagttcctcttactccacatcctcaccagcatttggtgttgtcaatattctgaattttggccattctaatgattatgtaatggtatctcattgttttaatggtatctcattgttttaatttgcatttccctgatgacttatcatatggaaccatcttttcatattcttatttgtcatctgtctattttctttggtgaggcatctgttaaggtctttggactgttttttaattgggttgtttgttttctttttgttgagctttaagacttctttatatattttgaataatgatccttcataagtcttttgcaaatattttctcccagtctgtggcttgtcttttcattcttttaatgatgtctttcacagaacataaatatttaattttaatgaagtcagcttattaattctttcatagattgtgcctttggtgttgtatctattaacaaaaagtcattgccaaacccaaggtaatctagattttcttctatgatatcttataggattttatggttttgcattttacccttaggtctgtgatatattttgagttaatttttgttaagggtgtaaggtctatgtctaggattatcattattattattacttgctagtagatgtccaattccagcaccatttgttgagaagactgtcttttctctattgtgttgcctttgctcctttgtcgaacatcagttaactattacttatgtgggtctacctctaggctgtctagtaggtctacccttaagtctgtgatatattttgagttaatttgtgttaagggtgtaaggtcaatgtctaggattatcattattattattatttgcttgtagatgtccagttccagcaccgtttgttgaaaagactgtcttttctctattgtgttgcctttgctcctttgtcaaagatcagttaactgttacttatgggggcctacctctaggctgtctattctgttcattgatctgtttgtctgttcttttgccaatataattgtcttgattaatgtagctttgtagtaaatcttgaagttgggtaatgttagtccccccgttgagttctttttaaacattgttttggatattctgggtcttttgcctcacataaactttattattattattattttttagacagagtctagctctgtcccccaggctggagtgcaatggcgtgatctcggctcactgcaacctctgcctcttgggttcaagtgattctcctgcctcagcttcccaagtagctgggattacaggcatgcaacaccgctcccagctaatttttgtattcttagtagagtttggatttcaccatgttggccaggcttgtcttaaactcctgacttcaggtgatccacctgcctcagcctcccagagtgctaggattacaggtgtgagccaccgtgccgagcctcttcacataaactttagaatcagtttgttatctataaaataactttctgggttttttactgagttgaggctgtacatcaagttgggaagaactaacatcttgataatattgagtcttcctatccagaaacatggaataccactgcatgtatttacttccttgatttctttcatcagagtttgcagttttcatatagatcttgtacatatgtttttagatttatacctaagatttcatttggggggatgctagtataaatggtattgtgttttttatttcatattccaattgttcattgctggtatataggaaagcaattgacttttgtatattaacctcatattctgcaacgttgctatgattgcttattagtcccaggagtctactttttttttccatcctgtcagattttctacatagacgatcatgtcatctttgaacaagacagtttcatttcttccttccaaatctatgccttttctttcctctttttatcttattgcaatagctaggacttctagtatgatgttgtaaaggagtgctgagaggaggcatccttgccttgctgtcagtctttgcgggaaaacttctagtttctcactgttaagtttgctgttagctataggttttttgtagatattctttatcaagttgagaaagttcccctgtacttctcctttactgagagggatagttcacttttggggaaataaaaatattttgccatagggaaatctatcactctgtttttggagaaagtatgattttgatagtcaactgaagattatactctgcaataggaagattttttgtataaagttgcaatttcaatttcaaaggtttacttgtgagttttattgcaactaactgtgatatttctttaatctgtattttaaaatataaaatacatgtattaggtcagaatctctttttagctttctgtaataaacacatacacatatggtgaacatatgggtaaagaaacttttttttttttttttttttttttggagacaggttcttgctttaagacagtttttttttggagacaggttcttgctttaagacaggttattttattgctttggccaggctggagtacagcggtacgatcatggctcactgcagcctacacctcgtgggctgaaggcattttcccacttcagcttcccaagtagctgggaccacaggtgtgtgccaccacacttgactaatttttaaaaatttttatagtgatggggtctcctgtgttgcccaggctggtctcgaactcctgagtccaagcaattctcctgcctcagtctcccaaagtgctgggattacaggcatgagccacctcacccagacattaggggaatttgcctttctttccttctttttttttgtgtgtgtgttttagaggattgcatttgtgcaactttgtggaactgaggtgccaagtgttgcttcagtacctgggtgaggatgttgctgggagggcagacttccttccagatgcacatggagccctggagattggcaatttgaggcaccttggcagaatgttgatccatgtacatttgtaatttcacagggaaacctttaagatgttttgagagtgattgagaaagggtatgatggcctcatgatgaggcagcaaagagatcgtctcccagggacaattagcaggaactgagaagtcacactcaagagttattacagtaagcattcagagcaatcacaagaagggtgcctcatttctgtctctagctggtgaaaactggacatactggttaaatatatgagttaccttaacatccctgtatttgtttagaagaaataagatacaatgaaaaagtgtacaataatatgttttacaaaaggaaaaggtacccctctcacataagcatacaacccaatttaaaaaacaaaaaacaaaaaacaaaaaacaaaaaaaccaacggactcagccaactagagtttatttgtaaacagtctcaggtcacctcagtgtttgtatcagctgcttcagtaaccacagaagattcctgtctcattgactggagacagcagcttcaattttgagacagcaaggtatctggaaggttgagtgaagtcagcaattggtaacataatgtattcaatacattttggtctgtgagtactgcatgccatggtgctattatgctatatgtgaattaaacaaagcaatgtagagggtcactttcccacattagcacagtaatatctgtggaaaaaaatcttatgcaacttttaagatattgttaaccattgtcatttgtgttaactcactttgagatgggcttctgattagcttcattttcctttatacttgctagaaaataatatgggagctacacagaattactatataaaattagtgctgatgatcacagtaccgtcatgactttaaagagttgtgctttttgtaattttcaagaatacgaaggcagtatgtgatccaaaatgaattttatgtgtattttactgagactataaactgcttttcctgtaattagtttaaaaattatcatacagcagagttgactttctttttggtgtacagcttaacccatgtgtagatttgcataacacctccacaatctataccaaacagttccatcagtctgcaaaactcccttgtgctatcagtttagaatcatgccctccccatccccagtctctagtagtcactcatctattgtctatcattatagttttgtcttatgagaatattatttatataaatagaattatacagtgtgtaacattttgagactggcttctttcacttagtgtaatgcctttgagatttatccaaattgttacatgtatagtggttcactttttaaaaaactgctgcatagtgtataggcataccatagttcatttatctgtttacacattgaaggaccacttacccatgatcagtttacctattgaaggttttagcaattgtgggtggagcttcttttcatttttgtgtgcatgtaagttttcatttctcttggataaacacccaggagtgggattgctgggtcatattggtaattgtatgcttaattttataagaaactgctaacctgttttccagagtgactgtgccattctgaattcccataagcagcataggagagttccagttgttctagaagtccttagcagttggtgctgtcagtaatttttttattctaggcatttgaacgggtgtaaactggtatctcattgtggttttaatttacatttccatcttggcttatgtagttgaagattttgtaatgtgtttatttgccatcattatatctactttggtaggtcagcacttatgggaagggtgtttttttccccttaggggtccatctgcttctgtgggaatggggccaatttaccttgcccagttatgtagggagtaggatgtgaaaacctaagttaactggcaccaatgataccttagtgccctttatatattgttttccctggatagtttcctggcaatcttgacccatgaccttgttctgactacgttcctacatctattacaaaggagccaaatcatgtataagaggaacagatggcatgtgcttttacatgatgctttcgtggtgccaagtctctatgtaacattttgtattgcaggatggtgtggagtagatgagaaatgtatatatggctattctgagctggtagcataaaggttacccaagtgtttttctctcctaggtatgtaagatattctgcatctttagcatcaaagtgagatgccagagacagaggctaacaaatctgagttatgaatcaggagtatgagggagtggagactactgccaagatagtagttgaacagtgataactatagatgctccccatatcagaggcataccccatagatgctagcaggagggtagtatttgaggaaagggtcactggagaagctggtggcatggatgaggctgaagagcacctgtagtgggagacaggagtgaaaaagttgaacaaatagaggttggtggcataggggaatttctgatattgttacacaggtgaagtgatagtgaagtccacagtagagctagggtagagacttgtcccagtggaatggatatgaaggtcctgggagctgtagagtaaaggaaatctgaggctaccatgttggttggttcatcattgtcaatactgacattaccaaagataacgccatgcttggtatagagagagtgaaatgtgaaccacttgcattcttcagtgtaatgtagaggagtaaaagggaagaatgtaggtaacagcaatgagggaggaagatggtaaggtttatcagactaggcacctactgggaaaaaagggtgttagtatgagagtgaaagagtaatgatcagaaagtgccaaagtggctaaaaggcattgaggccagcctttcccccatcatccctactatagtgtctcaggtgaggactgggagaatgagcagccttccctgggaggacaacaggggaagtgggattcttgggcagaatcaggtttgggtgagtccaggtagtagatggattctgtgaagaagttaaggagtgtttttttacaacagaatggggggaagtgtacagaatttggaagaactcagccgtgggagggagggagtttctcaaagtggcacagaacaacacagaaatgaacatcctaagaggacaaaagatacaggcatttattttggggtagtggtcaagaggtgtggggaatacatgaagtaggtgctccaaccagaaatcccgggcaatgtggaatatctgatgatagcagtgagagccctgctcttttgtgatgaggccagcagagacgagctaatctggctgtgattggttcccatgcactggctaatagattttttgccctaaatttcttttggattgcattaccttgtgggtcacatttgggagaaccttacctaattagtgcttcaaagttcatctagtttaaacttttgctctgtttcaagttataatcaccagtttgcaccactgtcaccaattagttcttgggtttcaagaactaatattggagcactcattggaattgtacaacaattaatattcataatttagcacaatttatcattcttcaatagattttttcccttgtacatttttaaatacagattatatattttcatttttctctttaaaaaagtaactgaattacatgaaatcagaaggttatgtttccagcatagaatgaccgttttgacactgatggtagggctcagaactcaaatgctatcttcaaattttggccttaacaaaaatcataaataaaagctcagttttaaaaaatcactaatgtaaaactaaaaacgagcaactgagcccttttagctgacaccatcattttgatgcttaatggtctcttaaattgtccaagtaaatactaccattgatgccactcatttcatgctgctggcctctgacagcacgatggaaatttgggaacttgtaagaacaagtgacatgtcagataccaaatcttcctacctaatagtatgtgtcaaggagactgagactgagttagtaatgtttttgtttaaaatgtctgcatgaaacgaaacaaaattgtattttgtcttttttcatctttggaatttttctggctttgtttcataagagtgattctgcttgcaaagtgtgggttgaaaatttcgatatccactgtgaatttaggctgggtgcggtggctcaggcctgtaatcccagcactttgggaggctgaggtgggtggatcacctgaggtcaggagttcaagaccagcctggccaacctggtgaaaccccgtctgtactaaaaacacaaaaattagcggggcgtgtggcagccgcctgtaatctcagctacttgggaagctgaggcaggagaattgcttgaacccgataggtggaggttgcagtgagctgagattgcgccattgcattccagcctatgtgacaagagtgaaactctatctaaaaaaaaaaaaacaaaaacaaaccaaaaaaaaaaaaaaaacactgaatttgaatattaagttgtatacttgtgggagagtgacaattgccccttacatcaaataccccgtagttcattgagaatggctgagagtgcctatgaagcacacattctaggttatctttcttcaaaggtgtctaggtgatgtttctaacctgaaatattgtgtgcccagtgtagcttagtgctagcaaataaaacagccactggttcccttccagaatacccaacaaacaataaaaaagagagcagtgaattggagagatgcacctctcaccttggctgactttcaatttgggcatctgatggaatagtaggatttgtgtggtttagaaaaagattgatttacctaaatgaccgaaggcccagtgcacaggaatatggcctgcaactgggtatctgaactaaaacaaaggccccaggtatccaatgtgctactgttggccctgataattggtgttaggtaagagtgtacttttctactaccctcacctccctccaggataaggcaaagtagtcctcacatatgttgcttttctttactgcaggacatttgtgaagatatttctgatcatgttgagcaaatccatgccctccttgaaacagagttctccctaaagctgctgtcttactctgtcaacgtgatagtggacatccacgcagtgcagctcctctggcaccagcttcgagtctcagtgctggttctgcgggagcgcattctgcaaggtctgcaggacgccaatggcaactacactaggcagacggacattctgcaagctttctctgaagagacaaaagaggtgagtgttttccttgaagttaagcaatgcatttccaggtatgaccaattgagaatgttttcagtttagagatgtaggataggaattctttgtaggtaaataagcaggccctgatgggctttgaatctaggcatagtgactagaagctagggcacttccaatatgaatggggctttagaccagagttagctcatacctggtaatttgcacatatgccattcattgttattgatgctaacctggcttccttttcctcttcaattatttaataaatatgtattgagtacttattatgtgtcagacactcagtgctaagaatataataatgatcaaaacatggtttctgtcttcaagtagctttgagtctagaggaaaatggagccaagtgaatagacattcaagccaaactgtgataagtctacaagatgccattggaggacagagaaagagtcacctaattcagatgggaggctttccaaaagaaatgactctacctgagacgtaaaggagagacaggaatagactggtgaacagaggcagaacatgttctaggcagaggacatggcattatcaaatacccagagataagaaagagaatggcaggcccagagagctgccagtagcactggagcaaaaagcccaaggaaccaggaggcgggatttgggctaataggtaagctgaggtcagatcatgaagataaagagctttctaaatccatattaagagatttggacttcattttgaggacaaaagaagtgtttgttcagcaaactcccatgattcatgttttagaagaatcattctagatacagtgaatcaaatggacattagaatattatacaaaatatatttgatttttcttatttatattcagtacctgaaagattttattgttattcttgatgaataacttaagaatggaccctgtacatctgaattcgagtgaactgtctcattcttaaatacaatggacatatatttatagaaaaaaaagtgtttttgcttgctaagcagcggctgtatgtatacatatatgtacggataccatatatggatacgttgcatgtagggagtggtgggtgtgtacgcgcaggcatgtgtgtttagtccttcggctcttaatacccagtttagtgttctactattagtttgtggaaaacatatattctacaagtttataaggcacttacattaatatatgagattaaaaggccttataatgagtgttgcataattcattaatttattgacattaatgtttcagtggctccaacattatcaacaacaccaaacaaatctgtgcctattctcataaatcatttattgttgttgatttttgtttattcaaaataaagtttcttgctgtggcaaactctccgcagtgcctagaagtctataggaatcaaaatcgactaggcttacctctaactttaagtcacagtctttgttttcagttagctctccttgttactgtggcaggacttcagtagagtaaccacgggatgaatatgtgagttgcgtgttagttcccagatgccatccctcccaagttagatccctagagggttctcaactgggactgttgtggttatgggagactacaaagaatctcaagctgaccaactttgccctaaatctgatatccttgatagaatgtgctaatggagatcagagatgaggaaggtttgtataacctctagagagatctttctttagatatctacctggcatcttcaagtctatatattcttttcttcccccttccccatttgttgtccaacacccagtgctctgtccaacatccaatgctggtcagtgatcaaatctgcctgctttctactactagaaggagattaaaaatcattgattcaaatcatatatttattaaatcaataaacatttattgataatcagctctgttgtaggagctggagatatagcagtgctctagggtttgttgttattattgttctgtggaatacattcatcatacacttaattgaacttgtatcattcatgaagtagtagctcaataaatgatgaagagccatggacggtaattgttgctggccactgtttttacaactgtgttgtgaatttacaataagtagcatctattctcacaacacgaactcagcaattatgaatggatttgattggaagcagtttagtgcattcttatgtttgaagtcagtctttagtcctgttgtagagattgcagaaaatttttgtgtgaggggtaaaggaacagtagattttcagttatccgctttatggatatatttctatgaattaaagttctgcctctataaccatacttcctgaaattagatttctgatcctttatttctgtgtgtctagtgtgactctatgaggatgtttaaaagactgcttagttttatttatttctgctagcacaatggaattgtaaaaagcaggaagataattaggataaaattatcagctttctcagaataaattcaactatgaaagatttgtagaatgatgagggaaatggcaaaataaaaaaacacccaaatttaaaaagcactggtaaattagaatagtagatgtccttccagtaaaggaagattcatttttctctttctggaagttagttaaatttcagagccatattaaagagcaagtttgaaactctggagagtggcaaattccatcttcttctcttcttgaaaaaacaatatatgaactttattctttatttaaatatggagcagaccatatctagtaaaaaaaaattggccaataccttactaaaataaaactagtcaataactaaacaaacaaataaagaacacttgaaggcaaagctcaaaactatttaaaaaatatgttgttctgcaattttctatattccagacattgtgataagcactttaaatttgtttcatttaggaaggaaggtgagggatattaaaagtagttcccttttatagatggaaaaattgaatttaagaataggttaagtgaatacttctatgtaacaaacctgcacatcctgcacatgtaccccagaactaaaaattaaaattaaatttaaattttaaaaaagaagaatttaagtgaatatttaaggatataaatctaggtgtacttaaataaaacaaaaccagtttttaactgatttctattttaataataattattgtttcttccctgcctttcttccttctatcttctctatttattggtttcttactatgtataagactctatgcattcaaaggtgaataacacatgttagaaatgaccttcataatttttttggtcctcacatagttctgagaggtaggcagagcaagtgctgttatcctcaatttacaggtattatgattgtattcatcttacagatgagagaattggggtcaagagaggtaatgtcacacaggtgataagagagtgataactcttaataatatcaacacaataggaaacattgattgagaacttaccatgtgctagatggtgtggtaagcacttacctaaatgataccttctgcgtggggatgcattggtccttccagagtgctcacaacatagcactttgtgggttcctccactggcacttataatgggccaaattgtatcaggccaaagtatgtgctatattttgaactacatgagggttagttccagattatattcatctgtgtatctcccacagcacatagttcatattgctgtaaaaaaatctgattagttgaattaaataatacagataatccctgctttagatgtggaagagggagacataatttcagtttgataaactgggaattaatcatgaagattaattgtttgattcataatttcagcaagtagaaaatggaagttctcttaagaactattaatattgtgtaaataaaaatattgaaagatttttgtatatgttttccccttgcctatgagaaacaaacctttgttgtacttcacagttgcttgtcattacttgctcttctcatcaactgctgttctctgggatgcattcggaatcatagaatcccaacgtggtagggctgaaaggaatctgacaaagtctagtccatgtagactaacatgtaaattgatgggcctcttactagaatgccacagcccccacaggtctgaggactcatgatctccgcatctctaagttacgaatgttagatttcatgttcagttggtggcgaaacatagtgttaacaaaaagaaagatctaagaaggcatttggaactaggcttcagttaattatggaaaaggaacagagtaaaatgtcttgcttagaattagaaaaaaaaaaggaggggtgttctttgctcgtgcgctctctctctctctctctctcgcactgtctctctctctatatatatatatatatatatagattttgattttttatttttttttttgagaacaagtctcactctgtttcccaggctggagtgcagtggcacgatcttggctcactgcaacttctgcctcccgggttcaagcaattctcctgcctcagcctccccagtagctgggattacaggcacatgccaccacgcccagctaatttttgtatttttagtagagatggacttttgccatgttgcccaggttagtcttgaactcctaggctcaagcaaaccacctgcctcatcctctcaaagtgctgggattacaggtgtaagctactgcgcctggcctgcttcataacatgttaaatggaggtatatttaagtggagtgggtacatggctaggcggctctcacccagctacaagtactacacaattacatgtgatatttctgaaataagggcagtaaaaccaacaggcaacacccctaactccatatcttcctgagactttattatgtatacacgttagaaaactatctgggaagatgatgtggagggaagcaacagaactaaaaacattagtattactaagcaatattttcagagataaaactcattcatctgctctgagaaactttagagaactttcttttcttacaattgcctctgcatagtgaaatactatatactgtttttggttttgctttgttttttttttcagggagggattttttttttgcattaaaaaatacagtttgaataaaaaatagttaccccgtgagggataaaagactacaaatagggtgcagtttatactgcttgggtgatgagtgcaccaaaatctcacacatcaccactaaagaacttattcatgtaaccaaataccacctgttccccgataacctatggaaataaaataaataaaaataaaaaatagttattaccccacaagtgataatcactcaactgtctcactggttaagatggtatttactcactagttgagatggttggccggactgatatggtgggacaggatgggagagagcttcctctgaagcattaagtgtttttgagtatggcgttttcttttctaaaccaggaactggctagagatttaagaaaaggcagctatactttattctctgagatgtattcagtaaacaatatattcatctaatatatatatatatatattcaatatattcatgtaacatcactgattgagcatcagttattctcgagcaagacagtaccctggtcttaaggtgcaataaccaccagaatggggaccaaatatatttgcaagactatcatgttccctgcttgtccaaaggcaggtggctgacacttcagtttggagtctaatttttacctggactctcaaatttcttttttttaaatctatcatataaatacttttctataacctcatataagcactgcggtgcagtaaccatgataaatgtaacagaaaatcatgttgcaaatttcagctacatattaatttaaataggttttatgagatagttttggaatttaaccatcgttttataatactatttctgtaaaagaataagttctgagtaatgaacaatgaaaagattaaagaaaatacaacctgcttttgaattgggaatctcactattactcttttaaaaattgcataaagtataacttttgtttggctgactgatttctagttcagttatgaagcacaaaagttatacaattccatttaggtgatttttgttgagattgatttcttattttgtgcagtataatttagtgttagcaataactctcatcttgaaactttcctcctcaatatacttcattattaaaaataataacgtaataagagtgaacattcattgagcactcatccatgtactagacttacatatattacatatcttacatatattacctcctttaagcctctcaacacccctatggcatggcttatcatttcctttttatagatgaaggaaataaagcttagcaacatcaagctactggctcatggtcacatagctaattagtgctacagccagaattcgaaacttgggcttttaattattggagttaactaaaactatgtaatcagagaaagaaattataggaaggcatagagagacattctaaaatgttgtcattcattcattcattcattcaacatatgtgcattctgtgtgcagatcactatgctatgtgctacgagtaccctggtaagacaaccattttctgtgtgatttatactgtcatagtacttacaaactagtgggaaaaacaaattgatcagataatcacaatagtatttatttataaattgagatcaatgcttaaagagaaagcagggcttacaataaaatattctgacttacatgtggatctggaatcttgaaaaagtgaaacttaagctgaaatctgagtgataaggaagagtcaactagttaaggggtataggttggaagctttccaggcagggcaagcagcatgtgccaaggccttgaggaaggagggaacatggtattttcagaaagtgaaagcaggatactgtggccgcgtgtggccagtgaggggagaatagcataagaaaggcctctttgggcctggccttgaaagggttttggttgtgttttaaaaatacttatctatgacatcgttgatttctgtcttcagtcatatacttggaagatcttcaaatattaaagcaatatatctttgcattgaagtgtgtcattttttgtttttattatttttaattgacacatgactgtacatatttatagggtacagtgtaatattttgatacatgcacacaatgcaatgatcaaatcagggaaattaacatacctgtcacttcaaacatttattgtgtcttcatgttgggaacattcaaaatccactcttctagctatttgaaaatgtagaataaattgcttttaattacagtcatctgaccctgctatagaaaccagaacttattcctcctatctagctgtaattttgtatccattaaccagcctctagctattcccacccgctacctttcccaacctctagtaactactattctgcttttggcttctctgagttcaacttttttagcttccacatatgagtgagaacatgtggtatttgtctttctgtgccttgcttatttcacttaacataatgtccttcaagctcatacatgttgtcacaaatgacaggatttccttctttttgaaggcaaaatagtattccattgtggatatatgccacattttctttatccattcacctgctgatggacactgaggttgattccatatcttggctatcatgaatagtgctgtaataaacatgggagttcagatatctctttgacatgctgatttccttttctttggatatatacctattagtgggattggtagttcaatttttagcctttttgaggaaaagtttggatttttaacttaacaacaacaggatgcttctaaaggactttaaacaaagaagtaacagatttgcaatttgtgtaggttattctggtggcagtgtggaaaacgaattggaggtgggggcatgccagtttaaagtaatatctaatgggcagaatacagactttggggacagcctctatccagggccggtgtcatcttttggtccaagctactcttatgtaagaaagggacaatagtacagacggcagaagaaaattttaaggattaaatgaaaaagtaattgtagtaatcaaccatcatcatttatagatgaggactctgaggcttagaaaagttaaataaggctttttgtctgtttatctagatgttatggaatgagagtgagtggagtaggagataaaggcagggtgaaggtctgaagggagagaacattccaaaaacaaaaacaaacaaatgagcagtaaaaccagatataagatcctggagaagccagatctgggaaaacctggttgaaaggatcacagggtccagcagccacatggaatccagcttcaattggctcaccacagttcttcctccagaaaaaaaggagatctggggatgtaacaacccttcacttttcagttttcttttttcatttcctaagggggctaggttagatcagtctgttatttagccagtaggcaaaataggatagttcccagggctcttctaccccaaacaaatcatcagtgaaaatcttcccatttgttgtatgaaatcagaaactgcattagtaatgagacaaaagccttaattacagaattaaagatttaacaaattaaaaatagttaatcgtaatgctgtttttttagtgtgagggagttttaaatcaaatcagcctatccagaattatgaatagtaagaaagatgggcacttaacagctcgcaaacaccagtgggagcaggacttggggagaaaaacatgcagagggaggagctgatgctatctctaatgataaagtttggacattcattaattttctccttcaaaagggtggggccaaacagaaactggtcttgaactattatgtatttgcaaattcagtagtttaccttcctttgattcatcaatatatgtttaacacaactggcttattataattaattattctacttaaaaatatttattgagcatctaccatgagttagccactgtggtaggtactggaatgatagcaaaaagcaaaacagacattcgtggagattttacttttacattattttgatcccagaaattgtattacttaaggctttgtttatgaaattcttattaaatgaataatatattatttttaagttgaaaattaagtcaagaatggatttttttggcttgctcttgacatttctgttaaggctgtatactccagattagtgaaaaatcttcaggtgtttaagaacaagatactatataaagcaatgtggtaattgattaatatccctttgtgtatgtcaaaccacaagcaatagggaccaatacatttgacctttatagtgccctgtactgcaatttcatttacatagcagctgatgttgtaattgatgttgcatttactgaaaccattgccattgtctgtttcagggccggcttgattctctaacagaagtggatgactcaggacaattaaccatcaaatgttctcaaaattacttgtctctggattgtggcattactgcattcgaactgtctgactacagtccaagtgaggatttgctcagtgggctaggtgacatgacctctagccaagtcaaaaccaaaccctttgactcttggagctacagtgagatggaaaaggagtttcctgagcttatccgaagtgttggtttacttacggtagctgctgactctatctctaccaatggcagtgaagcagttactgaggaggtatctcaagtatctctctcagtagacgacaaaggtggatgtgaggaagacaatgcttctgcagtcgaagagcaaccaggcttaacactgggggtgtcatcatcttcaggagaagctctgacaaatgctgctcaaccctcctctgagactgtgcagcaagaatccagttcctcctcccatcatgatgcaaagaatcagcagcctgttccttgtgaaaatgcaacccccaaacgaaccatcagagattgctttaattataacgaggactctcccacacagcctacattgccaaaaagaggactttttcttaaagaggaaacttttaagaatgatctgaaaggcaatggtggaaagaggcaaatggttgatctaaagcctgagatgagcagaagcaccccttcgctagtagatcctcctgacagatccaaactttgcctggtattgcagtcttcttaccccaacagcccttctgctgccagccagtcttatgagtgtttacacaaggtggggaatgggaaccttgaaaacacagtcaaatttcacattaaagaaatttcttccagcctgggaaggcttaacgactgctataaagagaaatctcgacttaaaaagccacacaagacctcagaagaggtgcctccatgccgaacacctaaacgggggactggttcaggcaaacaagctaaaaatacaaagagctcagcagtgccaaatggagagctttcttatacttccaaggccatagaggggccacaaacaaattctgcttccacatcctcacttgagccttgtaatcagagaagttggaatgccaaattgcaattgcagtcagaaacatccagttcaccagcttttactcagagcagtgaatcctctgttggctcagacaacatcatgtctccggtgccacttctttcaaaacacaaaagcaaaaaaggtcaagcctcctctccaagtcacgtcactaggaatggtgaggttgtggaggcctggtatggctctgatgaatacctagcactgccctctcaccttaagcagacagaagtattggctttgaagttggaaaacctaacaaagcttctgcctcagaaacccagaggagaaaccatccagaatattgatgactgggaactgtctgaaatgaattcagattctgaaatctatccaacctatcatgtcaaaaagaagcatacaaggctaggcagggtgtctccaagctcatctagtgacatagcctcttcactaggggagagcattgaatctgggcccctgagtgacattctttctgatgaggagtccagtatgcctctcgctggcatgaaaaagtatgctgatgagaagtcagaaagagcttcatcctctgagaaaaatgagagccattctgccactaaatcagctttaattcagaaactgatgcaagatattcagcaccaagacaactatgaagccatatgggaaaaaatagaggtaaggtggttttcttaacatgaatgatttctcacttgagttttggaagtattgctgggagaaggtcacactcctacactctattataaaatgtatggctatttttgataaatctgattctccaaagaaagaaaagaaaaagcacaatgatcaatgcatgtgacaaagagtatgaatcactaggaattgcccttgtcagtgcattagcttgatgtgctcctgcctggtatagaattctttgttgaaattgttcaaatctatcatgactactgatgaatgctggaaccccttggatctaatacaaaattaaatagaatgatagctgtgcacacacaagtagctcaggaatatatgcatagactattccagttaccccagagtgtttttattcatttcttctgactccagaatacattccacatctccaatgttaacttcttgtagaaatagaccagacatttctaatttattagggatcttttttttctttactcttcctcctctttgagaactctggctaataaccatattacctatacatgtaccacccatggactctgggatgtgaagttgacattttggctaaatctgtacttttgaacaaattactagatatgacgtaatgtttgaggacagacttatcaaaaatctcaggaccgacggcttgggcaatgtagggagaccccatctctatattagccaggagcggtggcacacacctgtggtcccagctactcaggaggctgaggcaggaggattgcttgagctgaggaggttgaggctgcagtgagttgtggtcatgccactgcactccaacctgggcaacagagtgagaccctgtctcaaaaaaaaaaaaaaatctcaggactgagctccatagtataagtaattatttgatcttttaagaggcatctgggcaaagagattcactatgattactgtggtaatggccgtttcctcaggaggccattggaagtagatccagctgacttgataattgttaatggtttcttgtttgatgacatatcaatggccatgcttgtctacatataatttgtgtatgactttatggtatgcaacgctctcccacatgctttttttttttttttttttttcctctgagcagagttttgctcctgttgcccaggctggagtggaatggcaccatctcagctcacttcaacctccacctcccaggttcaagagattaccctgcctcagcctctcgtgtagctgggattataggcccccacaaccatgcccagctaatttttgtatttttagtagagacggggtttcgccatgttggccaggctagtctcgaactcctgacctcaggtgatccgcctgccttggcatcccaaagtgctgggattacaggcgtgagccactgtgcgtggcccatacattttttttttttacttgatcttcacagctgtcctgtgaaggaagcaggccatgccagattattctcgctttacagagatggaaacagcctccatgagcttaagtgatttttctcaagctaaaatagatagatagatagatagatagatagatagatagatagatagatagatagatataaagagatggtaggtagctagatagagacaaacagacagacacagatagacagactgacagacagacaggcagagacagagacagacaaaccagacagaccttttgtgtaggaagctgagacgcaaactcacgtcttctgattcttagtccagttttcttctatagtatcatgttgcctccctgaaaggggttgtagtttctccttcgccgggaaactataagataggagagaagaaagagttcaggacccattcagactggatagagaatattgatgtaactgccatgggcactcctcctaatttttttttgttctgttttttgttttttttacatccattcgttgtcgaatactactctgagaccagcattgtgctagacactggataaaggtatagtgcatatggatagaataacctggaggaagaaaatgcaggtttataaacaaagaggaaaaagttatcaaatatacagcagtaataacatattaatcatcattaacatatatcaagtattcgtgtatctagtcctcacaacaaccctgatattaaccttattttatggctgaggagacaggctgagagagaccatgcagtctgctccagagcccatattattaactaaatgccctcattcctgtccatgaggaagtgatcaataagtactgaatataaaaactgtggtattgtagagtagtaataatatcagtggagctagaatttgactgggcagttcttgtgaagtactaaaccttaagtggagctttgaaggatgtacaggattcagacagataaaggaaaaggaaggtggcgtttcaggtaggaggagcataaactaaaacacagaggtagaaatgagaatgagcatggatatggggtacaaagagagctgtcctggttggaaggtttgtcatcagagatcagtgaaagtttccatacctaaagtaggtatggaaaggccatgaaggccacgccaaggcaattagaatttgttcaccaggcacccacagcaacttctctgaaagggactgacagtaataactaatacttcttaagcttttattttgtgtttggctctgtactaagtattttacgtggcttaccctacttaagtcccggaagggaggattttttcagatgaagaaactaaggcagtatgtgattaggaaacttgctcaagtcctcacagctagtaagtacaaagccaggatttgaacccataaccagcattcttaaagcagtgtaggccctggtctctagtagtctttccagaagggttaattggcaataacagaaagatggtcctggcagacatggcggtgaccagggcagaggtgttggcctgtggcagccaacctgaggaactgctgtgatgtggatcaggcaagaggaagggaggggagtgttgaaaaagtgaatgagtccagaaaactggttctagaccttgctagaaagaattcaggagccattcagtgattaaagcctggtgtggcccacagcttggcatattccattctgagccttgtttcatcttttgtaaagagatgttttaacccgatgatgactatgataccaacttccaatttgattccacagttctacaaaaatgcagctaggttttcagcatctggagactggtgtgtctttaatagaaggaaacatttggatgagtagctggtttgaagtagaggtggtgcaggtaattttttaaaaaccgtgcatagatagcatatgatgaaacttttaagaagaaatggtttataggcagttgaaaaatcccatactggagttgggatatgagggaagaggctaaaagaagatcaagttccttcctcaggccagctggaaattgttaatggtttgattgttaatggtggataattgttaatggtttcttgtttgatgacatataaatggccacgcttggctacatataatttgtatatgactttatgatatgcagcgctctcccgcatgctctcccttactacaccagatgagggcagctgccaacctccaggtcaactggccttggctatcacactctagctttggtctcctccttatagtgacccagagaacccattctgcctggaaaatataatgacagaggatattacttaatatcttctttatagaaggcatctgctaggcattttacctataataactctcccataaaattcttataacaaccctctaaggtaggtttttaatcctaaattaaccactaaccacttctctcctgttccattctggttctagcccccatcacctccttcctggattactgcagtagcctcctaactggtctctctgcttctattcttctctcactacagtctatttccaatagagtagccagagtgatccttttaaaagataaatcagattatgtcatccctctgctccaaactccacaatagagggttgccattgtattcagaggtcctacatggactgttccctgatttcctctctgacatcctttccaatgacttttccccatgctcactacactccctttcctagaacatacttggcatgcttcttgcctttaggatcattgtcagctgcttttgtctacatcctctccagcagatgccctcatttataattccttcacctgttccaagtctcagctaaaatattatcttctcagagaggactactctgaccatcttttaaaagatgtaacccagctgggcgccgtggctcatgcctgtaatcccagcactttgggaggctgaggtgggcagatcacttgaggtcaggagtttgagaccagcctggccaacatggtgaaaccccatctctactaaataaacaaaaattagccaggtgtgatggtgtgcacctgtaatcccagctatttgggaggctgaggcaggagaattgcttgaacccgggaggtggaggttcagtgagcttgggagcgtgccatggcactccagcctgggcaacggagcaagacttggtctcaaaaaaaaaaaaaaaaaaaggtgtaatctgaccttttctttcttttacagatctcaccacattctgtaatttttgtttgtttgtttgtttgtttgtttgtttgttgagatggagtcttgctctgtcgcccaggctggagtgcagtggcacgatctcggctcactgcaagctccgcctcccaggttcacgccattctcctgcctctgccttctgaggtagctgggactacaggtgcctgccaccacacccggctaattttttgtattttttttttttagtagagatggggtttcaccgtgagagccaggatggtctctatctcctgaccttgtgatccgccggcctcggcctcccaaagtgctgggattataggcgtgagccaccacgcccggcctacattctgtaattttatataattttctaatgtagtatatttattatttttggtctgtctccctctgttagaatgggaactctgtgagggcaggaatatttatctgtttagtttgttaatgaatctcatgtacctagaacaatgcctggtgtacagtaattgctcgataaagactactgaatgactgaatccccattttagaacagaggaaactgagtttagaaagatgaacgaacaatttttcctatgcagcacagctaataagttacagagccaggcttcaggccaccatctgttttattcctcccacaagataaagacttgggaatagatgaattccctaaaagaaggagactagatggagaaaagcagagggactgatgtctgagattcaagttgtagctcagttatgagacaggaacaaggaagagatccagttgtggggatcagaagggacagaaagaattcttgggtattaaatacatggagagagagaaagagatactaaataaaatggacattagctttgttctttgcaaaagatagatcaagaataataaagactaaggggaaaaaacccaacaacctttagatttgtttgaaataattaatgaagaccttaggaaaaaaacagacttaatgaaggagtgaaagtagatataggtgattaagaagtaaaaaacaatcattcctaatatttcctggaattgtattgaaaacacaatatgaggcaaagggcagtagttgaaagtaaagtcaaaagtcttttttaaaaaattgaagcttatttgaaggcagaagtggcaagagagattgaagtagctagaaagactatgtaaatgtggacacactgagaaagaagggagggtatgtggaactcatagggagaattatggcctggtatcaagaatgataaaatactgaaaaatatatcctgcttctaattccacttctgtcaaatggaaagtggagtccattaactcatcatggcagagtcctccactctgtcttctctgagtcacacagagcagaaggcaggaggcacatagaagcccagtaactgcaagagagtgtggggctgtgatagaatctccagtaggttcctgtcagtccccacccctcacatttgtatctttcttataatagactaattttgtaaaacaaaagattctttttttctttttcttttcttttttcttttctttttttttttttgagatggagtcttgctctgtcacccaggctggagtgcagtggcacggtctcagctcactgcacctccgcctcctgggtctcctgggttcaagccattctcctgcctcagcctccccagtagctgggattacaggcacccaccaccatgcccagctaatttttgtattttttttagtagaaacggggtttcatcacgttggccagactggtctcgaacttctgaccttgtgatccacttgccttggcctcccgaagtgctgtgattacaggcgtgagccaccgcgcctggccaagatttctttattctttgggaaaattgatttttggataatatattcacatggttttaaatcatagacatttaaaaatactcagtaaatccccctctcatccttatcactccatcttgaattctcacttcaccatatgtgatcactattgtttttagtacttacatattttttaagaaggcctttacatatataagccaatgaaaacaaaaattttaaggcaatatttttaaaactggggaatcagttgtaaccattccctttccacaaataaaaactcctagtaaactctgagttcccaagggatggtctgttcccaatctttttctgagggttgaggggattttgcttaactctggctgatttacccagaacccattgtgtgaataaattactagagcatcttaggtctgagtgctcaacacctacgggaacttctcaaggcctaaaattcaaagccagaagcgaagtcaagtaatggaaacagacacatttgttccgatacattcaagaaatagaataaaagcaataaggagataaaagggaagaatatatctggaacagatgaaatcaaacagaatggtgaaaaattaacttagcatgatacctggacatatgtggtataagtaatagggattggcaaattatggcctgtgagccaaatgtggcccaatacctgctttttaaaatattattttattggaactcagccatggtgtttgtctgtggctgcttttgtatttcagtgacagagttgaatagttgtgacagagaccatgtggcctaaaaagattaaagatttactctcttgccttttacagaacaaatttgctgacccctgctcttgagtaaggaagaagagagggagataatttctgatcagcatctactgtgtgccaggatctgaagtagattctttcatttaatttatataacaagcatatggaagagctgttattggtctcattttacagatgaggactccaggcttaaatgcaaatgacttgctcagggtcataatgctgcaaagtgtgagagctggtattccagctgggatgccagagctaacttggttttctccatgagatatagtcaaatgccagggaatttagacaataatcacatatgcaaataaaatcgatttatgaagcccacagaccactactagattagtaaatgaacagtgtgacttcttcctcatgacctgaagagagatgaactggttggtaagtagccacttgtataaggtgggtaattattgatgctgggttaacagctgtataattcctatgggagctgacagaaagcagcacagggtatgccatctcagtgaagcatttcaggagatctgtcctttgggatatagcgcatggtccgcctctcacattttgggcttcctgctgccattaaattctcaaaacttgtcctggaagatacgacttagtcaagttggactcagtgatacagaatcgatggatgcatgacatagctgagcctgtttgtccacaagagatgtaaatgtcttcatatgccaaattagagcatcttgattatagttcaatgacttagctgttgtattttgtcctagagacatctataatctaatttaacaaacttcttcggtgccagctaaggatgtccttgcacataagttatcttggactcatggcagcaaatatttagctgagttcttcctctttgtaactagactgtaaaattgcaatcaagtatgctcccagttttgtggtagcagcacaaatgtggctaccattgcacttgctagagatggagctgggaagtggtggttagtacctgtgtataatgaaggtagagaagtttttcccccgagattaacttggcactcatttttacatttcttttccaagaggtagaatgggtccagaggaacacatcctagcattcatactgatgatagcagccattaagaagtatcatgtccttctgagttttctttattgtggtaaaaatatgatataacaaaatgtgctatcttaaccattttttaagtgcacagtttaagaatatttgcatggttgtaaaacagatctccagaacgttttcatcttgcaaacctgaaactctatacccattaaataacaactcccctttccctctccctgctgtcctcgggtaaccaacattctactttctatctccataattttgactgttctaagtatctcctctaagtggaatcatatagtatttttctttttgtgactggcttgtttgacttagcatgtccttaaggttcatccatgttgtagcatgtgacaggatttctttcctttttagggctgaataatattctattatgtgtttattcaacattttgtttatccattcatctgccagtggacaatctgggttgcttccacctttggctattgtgaataatgctgctatgaacatgggtgtacaattatctcttcaagaccctgctttcagttcttttgggtatatacccaaaaattggattgctggatgttttttttttttgaggatcatatatattttttgaggaatctccatgctatttttcaaagtagttacaccattttacaatcccaccaacagagtacagagttccagtttccccacatccttgccaatacttgttactttctaggtttttttaaacaaaaatagtagccattgtaatgggtgtaaggtgatagatcattgtggttttgatttccacttctctgatgaataatgatgttcagcatctttccatatacttgttggctatttgtatatcatctttggagaaatgtcacatccattacccatattttaatagcgttatttgagttttgttgttcagttgtaggagttcgttatatattctttttttgtttttttaattgagacagggtcttgctctgtcacctagcctggagtgcagtggcatgatcacagctcactgtggccttgacctcccaggctcaatcgatccacctgcctcagtctcctgagtagctgggactacaggcatgcgccaccacacctggctaatttttgcattttttgtagaggcagggttttactctgttgcccaggctggtctcaaactcctgggctcaagcaatccacctgcctcaacctcccaaagtgctgggattgcaggcataagcccccgcacctagcccattctgactattaacaccttattatatgtatgatttgcaaattattttctcccattctgtagcctatttactctgttggtggtgtcctttgatgcatcaagtttttaagtttgatgtagtttcatttatctatctttgcttttgttgcctgtggttttggtgccataaccgagaattcactgccaagcccaacatcatgaagtttttcctcagtgttttcttccaggaggtttatcattttgggtcttatgtttaggtctttgagttctctctctctcttttttttttaaatttcaatgtagttcccacccatattttaagggtctcactcttggctttcttttaggataagacacagctacaaggctaagaccaagtcatcttctggaatttgtcttggaaaaaaaaaatacttttgagagccctttttttgttcttgttggtttgtttttgttttttgagacagggtctcactctgtcatccaggctggaatgtggtggcgtgatgatagctcacgtcaagtctccacctcctggagcttagttgatcttcccacctcagcctacccagtagctgggactacaggtacacaccatcatgcctggataattttcatattaattttagtattttttgtagagacaacatttcaccatgtgcccaggctggtgtcgaactccttggctcaagccatcctccatcttggcctcctaaagtgctgggattatggacaggagccgccgcatggcccattatagcctactcttttaaaaaaagtcctgtctagccattatttactggatttgagattcaaataagtcccatttgaaacacagctgtatccttttttattcacccacagagtaacttgcaatcacgattctgctataaattcaattcttacttgcctttgatgtttcttttatacccaccatgcaccagtgttcctagtgttgatggagtggtagtgtgctctacactacttggatgttgataatgatctcttatgagtatccttatcaggaagcgtcttgaggctatggaattccacttttcttcactggcattccattttgcatgtgcctttcccttatgctaactttttcattcacagttgctagtcctcctcttgtctctgtattctctcttccttttatcttctttcccattgcttttctttacttttcttctggatctagttttcactctctgtcacccatttttttttaactttccttccttgagagtatcttctactttcttcctctagtgttgtcctagagactttcagattccaaatatgatgacactatgagttgtctcttcattaccattcaaactggagcccttgatcttttcagtgcatttctgaatctttgaaatatgtatccaaaaagtcaaggaattgtttagatacaagaataaagaaaactaggatttagttaaataccaaggaaaaagccagattcttaaagaattgggtaggttcagttttgtaattaaaatgagaagattcaagaatcctaaaggatcacagattgaacatgagttgacagtgcacataattattaaacaaaaagtatagaagtttaatactgtagaaactctgaatactttttaatttttatgatgcacaatctaaaattttgttttaggtcctggatgtagtacttgaggtagatatggcaacataattcaaggctctgtgtctgttacataagacaatatttggtaagtgccaagtgaaaattcatgcagtgggagaacagaaaaaagaagataatacaaatgtagcttgatgaagcatcacaggagagggaatacttgatctgggccttgaatgatgagtagaatttatatagcagagatgaggaggcataatgttagtgacaggaacttgtgcatatgccagggtggagggcaagaatattcaaggtatgtttgggtgatagttaagagaaatcgttggtgttttggagtataggctaagccactataaacaaagagaccccaaaataaaataagatagaagtctctttctcttttacctagaggcagacagtcgagggaagatagaggtcgtcctgaggtccaggttgcttctccctcttgctcttctatggctcaccaccaataccatgtctgcattccagctcacaagaaggggaaaatggagggcagccacctttcttcttatggatacgacttagaagttacacatgccacttttgctcgcatcccactggcccactttgtcacatagcattacctgacctcaaaggcgttttggaaattagcctctaagctatgaatattgggaggaaggtgtctcgtaaactaactactagttagaaataactttgttagaggaaggtgaatgtgaagttagaaagaatagggccaagatatgagggactttgaattccaagtgtttgcatagcatagacacaaaatcaatactattgaatgcatgaataaatgagtagttaagggaatgagtaagtgaacgtatcattgagtttgaactttattctctagatcagggctacaaactaaaattaagaggccaggaagatagtataaatgaatcataaagccagctgtaaatggggagtgatgggactgaatcacctggaagatatgtgacatgtcttaagggcagccactactcagctccagctgatagttgcatgggaatgtgggccatttgtgccaagattttggaatttttaaaaagaaggaagaaatctgggttttatgtgacatctcccaatttttagatgttggatctgaacaatttttaaataggtcaaataaaaacacatctttgggatagtttggactttaagtcactaattcgcaatctttgcgaagatgggaaactacttaaaatgtttggcccagagagttggtagtttaagaaggttaatctgactgtggtatgctgggcacacctctagcagtaattttcaactgtgactgcaaattacaatcactgggaagctttaaaaaaataaaaaaacctctttatccaccccagaccaattaaatcagaatccctggggttgggtattttttaagttcttcaagcaattgtaatgtacagttgcggttgggaggtagtcctctaagcctaatctttttttttttttttttttttaaggcagagtcttgctctgttgccaggctggagggcagtggtgcaatctcctctaagcctaatcttaagggttattgaaatagcctagacatgtggtaaaagggtctgaactgtgggtctggaagctgactgaagaaagaaatagataggtgggagatattataaagggcaaattgataaaattttgtggctgttttaaataggagagtagaagaggaaaggagtcaaaaagagttgaaatttcaagctgaaatttgggggctgggagatataaggaatttaacaaatgtctccaaggcatacataaacttaagatacacagtagatgaatggggcccaaatccagtttgggaattctaagtcaacataacattttaaaaggtaaggctgcacaattctttttaaggataataaaaatcttttgtgtatattttatttgttgcaatgccaggacaaaaactgtatattaacattgctaatggatttgttgagacatgtcaggatcattgcgcaaggttggtccagaagaaccgtagggatccaaagcaaattccttgctgtttaacattaggaatgtttcagtcctgcctcagtttggtttctgtagagctttcaatgggtcttgagttgttatcagtgatgatttagcaccaccgtgaggctgtatccagtcactgcatatggctgttggcctctgcaatatatacggaagatgatctgcccttttgtttgcagctttaaacatcaaggtgaaaatagttctttgtaattttcttcgtatggaaaggttatgatgcaataatatcttgtattaagatgataacagtgcctaactgcatttgatggcaaatattactatcgtgatgaaactcaaaagatggataaactcaacattgcgtttttattatttatttatttttttagcgttgcatttttaaattcaactaaaatgattcttggaactttagtgaattattctttatctttaatcccgaagtcataattttgtgttgctggtaggatgtttcagaaaaataacaatttaaatacaaaacaaaactttgttatttcttgtccccttgcaaactgtcgggcagaatgctaaggggtttattcacttagtacatcacttcatttaattctcaagaaaaaaattcttccttgatgcagacactgttacattatattttcattttataaattagaagagacagaagttagtaatttactcaaggatatagaacttaaacattgggctcagttcacaatccctcattttaattatgaaaacttgaataagtcacttaaagcttactgtataagtcttctagtcttcaaaatgagatgttaattatgtttgtcatgcctttgctcagattattgtatgaaactacaaagagcaaaggggtcattgtaaatctaaaggctacataaatattagttttattattattgtgacttttcctatgaatctagggaattagcaccatatatattagaaataactagggtaagaaccttaattctgcccctaagtagcatcgtgaccttggaaatgtaacctcgcaagcctcagttttaaaaaataaatattaataaaggaatagaattgaatgacctataaatacttttctgttctgaaattttatgagagactaactgtgaggaataactaagagaagcactcatttctttgtacaatattccttggcgtatatcacttcaacatggctgactttgtgttccttggaactttgggtgaactcaagtttcccttagaagatcctaatggtaagtgaatgtgaggctgtgacattaacgagcctggaggaatgagccattcatgctgcattcctagcactgtaatatgacaagagccagacatccttgaggaatttggggcctggctagagtttataagatgccaagagaccagggccagtggtgacagtaaacaagtgagttacccagtaagaattagatatggattagcctgaatttatggcaaataaggtcagctaagtgaagcagttaaaaacatttgccttggcagacttgtcattgtgatgccttaaaattacccatcagcactgaggcttgtgctctgttcagacaatatggggggaaatcatttcaagagtgtgggttctgtttcaaggtcactcatgatgtcaggccctgtctgaggttatagaattttctatctaagaatgataggcttgaattttgcatggtgattaagcaactttatccaggaaaggtgctgcctgtaatatctgcttcatacgctttccattctcaggttgatgaggctcagtgcattgctttttaggaagcccagtggctttactatttaccttcatgttttgtctaggaataaaggaagttgtattttctttttttaatgctttaagaaaaactggaaaggtgtcatttatagatgatactcatatttttggatttgtctagagactagtactacttgcttgagaaaggcgtatgtgtgtgtgggtggggagggagtcataattggagatctaatactcttttttcttcctacctgagccccaaaataaaactgacaagttgagctaacagaaatacttttgcttttgatttattttctatagcatagagaagactattggtactcttttaaagcaaagtttcaggccaggcccagtggctcacacctgtaatctcagcactttgggaagctgaggcatgtggatcacttgaggtcaggagttcaagaccagcctggccaacatggtgaaaccctgtctctactaaacatataaaaattagctgcgtgtggtgacaggtgcctgtagtccaagctactcaggaggcagaggcaggagaattgcttgaacctgggaggcggagtttgcagtgagccgagattgcaccactgcactccagcccaggtgacagaacgagactccatataaataaataaataaataggtagatagataaataaataaagtttcaggctggattctgtagtgtagtaatcacattcacctcacaaagtttcattaaagctattttccttatcctatccttattacatctaaagttttatattgtttggtgcatgccattgtatttattcctgttaagaagactgttgaccagagtcttcttaataggatgtagggtccatgaagaattatatctgtgcccatttcactttctagacacacttttatacaagggaaacatggctgggaagaacttccaaaacaaccttgctcatggtaccaaaaggatgaatattcagaaaattagtagatggaactccacagtaaaggaaaagatacattcatagtaagagatttctgggggaatgcatattaatgggtgagggcattctttggtgctggatggttgtgaagcatggtgactatgaatgtgggctctggagccatattgtgtaaaccatgtctcagcttatcacctgtgttacaatacctgtgctattgtaagcaggtgacttgacctctccgtgctccagtttcctcctgcaaaggagaattaaaaatcatatctgccacagagagtcatgattaaatgtcttaaaatgtgtaaagagctcagaatagtacctggcatgtagtaaacactcaataaatgttagctcttgtggttgttattgttgttctcattattagtactgtggggggggaagggtcaggtcttagcagctccttgtatagagatgactggtcttttgacatcaaatgccaccaccttgttttttccttccaccttcagccaccttggttatcatggagcttcagcctcccatacaactctcacccacagtggttaagggtgctcttcgcccttcgtgggacctgtgatggccaccccaggttcctgcaccctcttctctgtaagactctgccttgtcttcctgccttgtcagatgattcttgaattgtattagagataattctcctctaagtggcccaataattttagttaatgtacttctttgacatcttaggaagtttatatagggaaatttatgctatgcatgtgtgttcagacaaatacaaacaacattctaatttataattttgtcacacaacaaccttatgaataatatatacttatttatttataattggtatttatacatacagtcgttcctcagtatccgtgggggattcgttccaagaccccctgtggatatcaaaatcaatgatgctcaagtcccttatgtaaattgtatagtatttgcatataacctacacaccttgtgtatgctttaaattatcactaggttacttgtaatatctaatataatgtaaatgctatgtagatagttgttatactgtattgtttagagaataatgacaagaagaaaaagtctatacatgtttagtacagatgtcaccatccattttaaagaaaatattttcaatccaagctttgttgaatttacggatgtagaacccacagatatggagggccgactgtatttataatacatatttataattatatgcttataaataataattcttacagaactctttacctagaggtagattcattacagtatattaagggatgaaaaaggaagggcctgtaataggttttgaactgtccctcaaacccctgattgctaaatatacgaagattgagaaagtgtattggaaaggcagcaatagattgggatgatttgttgggagaggagcatttgagcttgatcttgaaggatagatatagtgaatggagtagaaggcattgggagggtatgtggaagactccaaagatcagttccctaattggaagaggggcaagttgtctgaatgtctcaggctttgaaggaagctctatatgcaagaacctcagatgttaacagtcagaaggcatgaaaaatcattcagctcaatgccctcattttacaagtagaatctgtctctcccaagccacagtacttcctgttagaacatcctgtctcctggttattaccagatcttgcaagcttgtcacaaagtggcagcaaatactttctttcccaagatcaacactaaatgtttccagtgctctgcagctgttggctctttatctttctatccttgagagactttgaggaaatcccttttctctgaattctgtttatgtttaaagagtttcacagttgattttgaggcacagccagtgtcagaatcattgagatagacaacagaatgacggacagagtgaacaaagttgagtgcattgcattcttgggcctcataatgtagatgacacaggtggatcttccctttacgtactgttcctaggctatctcatctgtgcccatggtctttagtacaccctgtatgttgctttctcttactagatcttgctgtagagttccaggcttatacaactagctgtcttattaaatgcttcaactgattaagttgagaaaccaaatttatgatacataatatcatattcatgatcttcctgcaaaactatttttgtaatgcttcaagaaaaactggaaaaaattctccttctgaattttgtatttcctctttcagggaatggtacctccaaccaaaatagaaagttggcagtcatcccagattctaacatctttctcatcatccatcaaatccaattagtcctgtccattctacctttgagtactctctataacctagcaggttctgcccatgtccactgagctgctttagtttagccttatcaacttcttcagagtgctatagcagccttttaactggcttctctgctctcagcctttcaactggcaatcattttccacactgcagccagagtgagtcttctaagaagccaatcagattctctcacactctgcatcaaaactttaatgaccattccattgtcttcaggataaagtacaaactacagagcatgttgtctgtggcctagctcctggccagactctgcaacctcatttctaagtgtttcgtatttgtcttttgagtgttagttagccaggatcagctacttgagagttctcagaataagctgttctctcttgggcttcattttaggaatgccattctctgctcctcttagtcccctctattctttttctgaatcacttacacttatctgtcagggctcaatttcctgtgatttcctccaggaagtcccccttgatgcccaaagagtgagttacatgtcttttcaatggctcctgagcacttgggatgatctacagcaagaggttctcacagtatggtctcggcacctgtaggggctctcaagaccctttcagggagtccacaaggtcaaagctattttcatatcaacactaaatgttatttacctttttcactttcattctgtgtatagcagagttttccagaagctccataacacgtgatattgtaatagattaaatgcagaagtagaaatagaaatccagccattttctattaagccagacattcataagatttgaatacagctaaaataatgccattcttttcactgtttttgaaaatgttcatatatttatgttaatatatattattatttttagttaatacatatttttaaattgttaaaatgaatattgataaagctcaaagaagcaaaaactttctggggatctcaataattctgaataggagactcaagattaaaagttcaagaaccatgagtctgcattatcatacatctcatgctttatgttgctctgaaccctttaagagaagaatctgggttatgtgtatgtgagtcccaagggcctaatacaatttctgatacatagtaaactctcaataaattttttttgaataaacaacttaatacacacatgtatgtttactcatacacatggagttcgaacaaaaaaaggcaatttagtccttacttcagctggcctagtgctatccaatagtgtactcaatttgctaagccaatagtactttgaagttttacattattcttaaaaactctagttctgtactttttttttgacctctagaaatcttttctaaaagatgtctatgaaaactttaaaaatgaacaattaggtctgcgtacttgattacacagcacctaagttcttctggctcagctacctactggtgagtgaatgttatctgtcaagtacttaattttttttttcttagagacagagtcttgctctgtcacccaggctagagcgcagtagtgaatcagagctcctgcagcctggaactcctgggctcaagcaatcctcccacctcagcttccagagtagctggactacaggtgcacaccaccctgaccagcaagtgttttattttttgtagagatggagtctcaccatattgcccaggctggtctcaaactcctggactcaaatgatcctcctgctttggcctcccaaagtgctgggatgacaggcatgagccaccgtgcccagcctacttaccttttctgagcatcagattcctcatctgtaaaatggagggagctttgaactagattaattctaagagccttttgaaaattgggtctgtgcttctaatctctatgggaacctttctttctcctttacccctttccaaacagatgtgtttagataatactgttttctgtcttcttggctcccatgacagtacattggttgagttgttagcatttactgatttgccgccctgaagctctctggtagaaagttggccgtagcattttcttgctcgttcagtatgataaactcttcacatggaattccaattttttttctaaaaataataactttattattgctgaataataattttgttatatattccctggaggaaatttagagtacttagataaacaacaactcaacaatcacatgtaatcttttgaataatcttagtattctgcaaatactcccatcaagccacactcactcttgttccagatatttgatgtgcaagagttcttactaatcaggaaagtatttagagctaatctaaacaaggaataaaacaacattttcaggtctgtacttcagtgtcaaggagtcagcccttttcactaaaactttatagatatgtccagaaatgtttatttaaagtgattgattagccctagcaaggctggaggagactttgaactgtagaaaaaagaaagaaacaatgagcaagtggaaaaaagaggagaagtgggggaagagagcagaggagtggggaacaaaggaggggaggggctggagaagaggaaagagaaaaaagaggcaaaacaacaatagtcaaggaagaaagaaaagaaaggctgaaaagagagagcacagagtacaggaagaatgatctaaaatagggctctgataggaatgattgaactgtgacaagagctggggttctcagagaagcttggaaaataggagtgaacaacagagaatgtgactgtcctttgtttcctctctatggactttgtgggaacaaatctggttagagagagaatatagcacagtagtccagagcttagaccctggaacaaaactatttaataaccacttaatagctataggaccttaaataaattacataacttctctatgccttagcctcttcatctgtacaatggggaaatttgactattcaataacttcacaagttattagtaggatagatggtagatgtacctaaatgttaaatattgttaattataatactagatatgaaaaacctacaattaaaccattaaactatcataatcctaaattctaagttatgagtatctcaggtgctcatttgagacttaaaggcagataaagatgatctgatctgcttatccagtgtcttggaggattgggggtgcttgaagcaaggtctcacctagagcaagtctgccaagctttggggcagtcatactacctgaatgaggggtccccagcttcatacctgacaatgttgggagcttgtaaagtgtttgatcttgtctgtgcttcagtttcctcactataaaatggagagtgcagtaatattgtatcatagggttgttgtaaggattatgtaagtgcctggtgtgtagtaagtgctcagttaatgttaacctattgtttgttccagtttattcccatttttttatttgtacctatttttattagactttgatgatatgcattccaatcttgttttgcccttagaatgactgataatttctttttataaacccatagggagcaactgaattcaaaatctctagatttgttagatgaatccctttcccatcataagagttaggaatctttctgggttcttcttttcccagttgaaaccactataaatagtatttgaagaaattgtggattcagtgtaatattccttctacatgatgctgagttcagaatagaacttcccacctgggtagctttagataataccattccatgccattttgctctttctttcccactgacagtttttacctttattctggaacaattttatcaggaatatttttatattctaaagccttctcattcaacctttagaaaagaagctaaatatttcattgggcgtttcagtatttgagtttttttggtggcatcacagtcaacactgactgaaaccattttattttctcttcaatctttgttctaaaagcatacactatctttcctcttctgtcaattactcgtactgtgttggattttctaggtaggagtgtgggtatataagttaggtagtagagtccaaagcacagcttttaactctctagcactttgtcttgagcccctgggccttggtggcacattaagtatatagttagttggttgggaaaggtaaattgcatttgagtgttgttatgcaaaaatctaaatctagtcattttatgtagaaactatgtgtataacgaattatgcgcaaaaacggaagattatatatgttggtaaatatgtatgtaaaaatctcaatgcataattttgcttctaaataaagttctaattttacttttctaaaaaaggttctaattttacttaccttatttagagcctaaacaaacctttactgtggataagaggatcatgatgtcctttagctcttattttttggtagccccattgctgatgtaaagataggctccaaagaatgtagcccgttttgaaaaattaagtcagattattctgaaacttgtgacaattagtagagaaacgtgatgccctccagatccactggtcgggtagctgggtggtgaaattcttgctaacctgcgggttcagatgctgcccccgtcatgctgtctcattgaccatgtgaggtgaaagccatgactccctcttctaaatgcccagagcatttgctgccaccccctatattgtgactgtgtgggaacttttttttttttttttttttttttttgagacagagtctgtctctgtcaccaaaccggagtgcagtggagcaatctcggctcactgcaacctctgcctcctgggttcaagtgattctcgtgcctcagcctcctaagtagctgggattataggcacatgccaccacgcccagctgatttttgtattttttcttttttttttagtagagacaaggtttcaccatattggccaggatggtctctatctcctgaccttgtgatctgcccacctcggcctctcaaagtactgggattacaggtgtgagccactgcgcctggcccgtgtggggacttttaaaatccatctcattgccagcacctagtacagtgctgtagacttagtgaataataaaacaattttgagataaaagatgaaattggaacttttgtgaattaggaatgattttttttaaataatcacttatcaagctcttgttttacatcaggctttaaactatacttttccgattgtcctcatgtaatcccacggtgaatgttactgtccccatcttacagatgaagaaactaatgttcagagacattaagtcattaggtataaactaaatgactcaaattcagttttgtctggctgtagcaactgttttcttaacattagccacactggcttatgagaagcactttttcccctcttttaatatacccttccatgtccccccaaattaatcctcatttagttcttctcttctgattcctgcaagtgtcatagtcaagctgttaaatcatctgactgttcatgatttcatacggtgccagtgaggctttctggattcaggtactgagtttgccaccttctagctgtagggtattgggcagacttccttacctcttgggcctcactcttctcatctgtaaaatggggataactatagtacctacctcacagggccattatgagacttaaatgatctacttgtacaaaatacttaaaacaggttctggcacatagtgagtaccatctgagggttatttgtttcagctagaattgtccagatgagagcataatagtttaaaaggttcaacagcagaagctgactttttttttttttaatatagtgaaataggccaggtgcagtggctcgtgcctgtgatacctttgctttgggaggccgaggtggaaggaacacttgaggccaggaatttgagaccagcctgtgcaacacagtgagacccccatctctacaaaaataaaaataaaaaaattatctgggtgtgatggtgtgcacctgtagtcccagctactcaggtggctgaggcaggagaattccttgagctcaggagttggaggctgcagtgatctatgatcatgccgctgcactctagccttatctctaaagagaccctgtctctaaaaaataaatgaataaataaatacataaaatgtaatgaaaatagttcactcttttgatactcttcagcaagtttctgtgtggaggcagctaactcgatctagactgagtcagacatcatgcctaatttctctgtccactaataaatatgaattactctgaggatgaatacacacacattcacatacacttccaaacagcaaataccaaaaggaattagcagttcaggagggtggctcaactgccttctgagaactaagggccatgtcctctgtgattaaactgagtcaagcccatctgtaattgagcactggtagaatgggctcattcaagcatgtaacgcccttaaatttttcatttaaattttctgtgccttagaaatgaactttacagtaatctttgctttctaaaaataaatgtgtttcttgttaagcatttagtctcatcacaaattctgttttagaaaaaaacaacagaaaatagtgaatgagaagggtaggagacttaggactcagcgaattctatctcagtgccaagactttaaaactgggaataaatgctacttctccatgacctgggtctgataatttgtctgcaggaacactgtttctagagggtggtgtggtacagtgggaggaatagactttggagtgagatccatgttcaaatcccaagtcacttaccttctctgatcctcagtttcctcatctgtaaaatgaccataatcaacaccatctcgaagatttgtggtgacaacacagcatttacttcctgctgtatacttcccatttcctcttgtagagacagaattttccactttattttaatctataattatgtaatcccatttaaaaatcacccttcgactttcagttccacaaggcaggggccatatcttgttttccattatgtggctgttccctggccccatatatggcacaaggaaggccctcctttttattctagctccatatgacagccttgccagagggcaaaggtaaccgcccagacagtttatatttaaccaaacaaggcttgttgtagaggagaaagagttaggaaaagaaataatgagtattcttaacttgttgggagagtgtagcactttgcaagatttgactgtaagtgttcactgtgaaaatcatcttcaagtgtattttagccagccaaagcctctagcaaattatttttcacaaaccagtaagtatacatttgcatgtactttcacggtgcttcttagtctttaaagagattgatgttttagaaagtttaaaagtaactttttaccctcacgaaggaactttcaaaatgcaaatgatttgaaagtaggaggtatgctgacaaccactggtaggagggccaaccactgttccattttcttctgtttgatgaccaggatttctcctgggggttgaatcctggcttggtgccaaacaagggtctacagactctcaaagcctgtataaaataggagtatgacaaagaaggaaacagttaatccatgagagtgggcaggaggacaggatcttgtggactaggtcactctccatgtgctcctggacagcttgtcagggaggcaaagaaaagtaatggaagaagcagcagaaagggacaataaggacactggtagaaaataacaggaaagacactgaacagatacagcaggaggagtttgaacaatgaaggctaaaatgcagcctttcaaaggtttgtaattcagcctgtggcagagagtagaacatgcataaaatgtacttttcatgtagtgcagtggtggcattgggttatatcatgaagaaaatctgatttttatagtcctctgactttccagagaagtaaatttgaattcagaatattagaaacacacataggtaggccaatactaagagtgagaacaaacttggttacagacagaattccgatacagatataataatttcacaatatccaggagagtgtcccaactctttatttattgtaatcttttttgactattaaaattacttgaattcaggccttagacatgctatatgttctgctgaaatttttgccacaatgatatttatctttgtattttcagcaatgtctagtagtgtgctttttcacacatagaaggcacttaataaatatttgttaaatgaaaaaataaatgaccaatatttgttgcattaggatttgatctgtgtttcaaaataatttttaaattttttttccattttcgtatgtcatccttattttctttcattcacaccacaaagatgccagcagaacttctgaaaatgggcatcaagtatttgttgtgtgtgtccaaatgtgaatacacctgcacatccacatggtctgtgtatagaggggcactttcttggtctttctaagcacatctcttgatagggggaaagtacctagtacactgtccactgtacacagaaacccggtgatagtacacagatagagggggctgagtgaagtggaaaaatagcatgtgataaaggtatcatgaattgaatggaccccaattttgctttctttcatgatttctgtttatattcttgaggctacacatagaagcaggaagggaggtcgaaagctagatctccctaaagggacggggtgcttagcttttattataagttcggaacactgggatatctcaggtttctattgtgagtgatgaaactttttagtattggcaagaaaagagataggaaatgtgcaacaaataaaaagttgtgagggtgggatataactcagaagaaacccagagagaatccttgagaggactcctgtttcccctatatcagacagccttgttttgctatctggctgggatacacagaggtgccatccggaaatgttcacccaggaccaatgggttttgtctaatctgcatctcacagatttcagctaactatgtaatcatggttctgttaggaaacctgacacattgtttagtgctttttggctaagactaacttttatgatgaagcaaccatgcactgacatacacacacaggttatttgtgtttgtttttgaaggggagaagatagtgcatggttttttaactagttacatttcaaataacgtctttcactatttatcttcttggatttaaccacttgttccctaaataatatactttctgacttaattttctccccaaaccaatttatatgtacagatataacaacacaattctaaatacaatagtaaaaactgtttaatgctgcaagaagtataaagtactattttcatctcccatttataaaccatctaaattctgcttttctgactagcatccacagatgacagacaatacttctgtaagtccatctggtcagcaaagggtctcttaagttttcacgaaaattttaattatgagagtatcgagaattaggactggagttctaacagactctgcccttatttctgctcacagatttactgtacacatctgaagggatctatggtaaacatcaagtcagatatgaacctgtgaaatattctgatccctaggtagtctaccagataaaggagtttagggaataacattttgaacacatgggacactctactgagaagactgagcttgagtaagtgtaacttcgatattaaaagagtcaagtatttgggaggaaatgaaaagcaaagcaactctcaaatttatgcaaatgcaggaaaggcgaaagaacagacaaactgataccctgaagataggagaaggggcaaaatgaatgatcttgcatggattcttggcatttggaaagagttgcaatatgagaaaattagaaaaaaaggctgagtttggtagatcaccagaaaattcacttagtaagggaatacattgtatgaaatttctgaaaccttctctgttggacatattttcacctcacctggaagaaaatcttctgagtgatgaccaacagaaacctcaatgatgttgtcaatcagtttagggttggagtctaggactggaggaatgttaaactaccatatagttcccagctcagccaattgcaattgtgtaggtctcagtttgtgattatgatgtctctaagatgatatttctcattagttttatcaaatctaaccaattgggatagatttttgaaagaatataaatgagaaatcttgcatttgtgaaatctggttgtgatatgtatccctgggtgtgactctccttggagacttggtacaatagagagattttcaataggaaaagcttttggaaacatgtatgaatatgggaaaccatatgatgtaccactatgtgggatgatagactgagctctatctaaacaggttggcaacacaccagagcatggcagtatggtatgatctgactctatgggactctgtgcccacatctctgctttgtccccctctaataaacaatttgtgttcctgagtgttatttgtttttttacttaccactctccacaattccattttctctttttctcatgattttttttgaggtaatctaattgcttgaattaaaggtttatgaatcttaaaatattatctaggaaaaaccctaatggcaaaacctagcttgtgataaacattataaaaaatatttacttttacctctttccacttcagtgtcaggacatcctcagttaagcattaaaaatattaatcaagattatttgaaaggcacatctgaagaatgggttaagtttaatagggaaacggcatctcaacccattcctagttatgtgtggaagcctgcccttgctccttatgacctccaggtggtgctgtttacccagacatggaaagcaggagcccagccccatttctttcacttaggtttgcagttgggctttcatattttcaaaatattttctgtttctacagatgtatacttctaaatggccaataaaattttataaccactatttgaaaaattgcaaggttattgtgatttgtgcttcctagccaagaatatatctttatgtctgtacatacccgaagtcaagtatttatgtttgttcattggtcccactttctacgcttccttcctttgtagcacacaggctcagacacagacatttgggctgtggacagaactcgtccaaggacctgtaaatacttatgtaattttgaaatatatttctagttcagctatggcaactaaactccacaggcttctgggtgaagaacaacatctttacaggaatgccaatccctgtaaaggatttggcaatcccccaaagccaacgagtgttcctagcagacctgacctgattttttggcagggggatgcttgtcagacaccagaaatgttttgatgttttgaggtcacccatacagtgacaccccacaatccaatccaaattcctcagaaaagtgattctagagaaaaactgagagggaagcattgacagtttctttcccattttggtaagagttcaggtccaggaatagtggaaattccattacagcaaagatgaaactaggataggagtgcggtgggatcgatttgatcatggataaaatttggaacttttaatattggctttttacagaataaccaactaacatgcctttcttgcccctttttttccccttttctttcctttcacaaggggtttgtaaacaaactggatgaattcattcaatggttaaatgaagccatggaaactacagagaattggactccccctaaagcagagatggatgaccttaaactgtatctggagacacacttggtaggcaagattgtgttgttcttgctgtcaataatcaaaggattttaatgtactgcttgtttgtttatgagaaatatcaattttatttatcaaaggttactatatgtcaatgaaaccaaattttaatgggtcacagaagatgaaaatttacaggcatttcaagtaatactatgaaacctaaatcatctctgtttcaagctaccttttcaaagcttttcctggaaggataagtaattatttaaaaataccttagaaaattttattagacccttgttctctaaagcagcaactgaaggttttccctttcttaaaaacaaataaatgaaagagatgattttgatgaccattctaagctttctagaattcttgtaaaattaatgaacctctcattatcaagagggtctacattatctgttctacactgggttattttaataaaatatttaaaatgatgatctccatcatttttgctgctatgtgggtttttcagcatataattaatacaactgtcataacactcatccctgtgcatagagaaaaccatggaggggaagtggaaaacactcagatgaatttgcttctgaatgttaaaagcaagaattatagactgggggacattcgatgaacctcgtggggtttttactgaatgcttcaaatggccgatatcaattatgaaggggtggaaactaagtagtggagtgtgataaagcatgaagaaaaagcacgtgtcataggaaatgaaaattcaagctgtaaggatctcatctttattcctttcactgatagcataaaattgacaaaggcaatgaacatgaatccttgggtactcaactgtggggttgattttctgcccctcttacacactcagaatttggattgaataaacattatgtgggagtcctacctgtatgcgagttcacagggttccagaactgttgttctctatgatgttaagtgagagagagaagggagagatggagagggagaaaagaggggaaagagataatgtttcaggttttggtgtttgttttttgcagcatgtttatataacagaaaaacagctttaaaatcctgttgctgcatgcaaatagccttgcagatgataaagaatgacaaaactgtgtggtagaggatgagtgtattgcttccctttttagagacctgagtcgatggtgtgtaaaaatgcaagtgaccctaaccacctctcttgtacatgggtttttatatactgtccttagtactcatttccctgttgagtagagtttcaacttttttttaaagagggcatttcataatagcaagataaagatattcagtgctttatgatgtaaattgtattaattagaatgtcaacttttcactggcattgttctgacagaaattctaatctgtgtttaaacaggagtatatgaactttatttcacattaagtgtgctgtcttactttctcttgacttaatattttatggaaaacacacatttagtttttgaggtcccagagggcacaagggcatgaagagcactttaactctggactatttattgaaagccgggctaggagagtatggacccaaggtccctttttcccctttggaggttgaatgatatggcctctttgtaaccaatgagcactctctttttcaaatacagtattacagggtttcttacttggcatccttatgttagcctctacttccttctagcccaatgcagttcactggagcttttggtgacgatggaatattctatattgccctctcctatgtgggggccactaactgcatgtgtctattgtgcatttgaaatgtggctaatgcaactgaagaaatgagtttttaattttacttgacatatttaaatttaaattgccacatgtggctagtgacttctgtattctgtctagccttacaaattgccagctttttataggtgaccgtaacgaacggcaatatctgtacctgcctcgtaatgacattttcatcccaaaatgtggaagttattctccagtttgctgtgggccaccagtataaagatccacagcaaagagtccttcttaagatatttatttcttaaagaatagtcttgtttctgcctaatgatcaacattttcttagatgagttttctctactatcccatgtctgattatattgattggaatagagatatcatagaacatcttctttatttctactttgcaaatagtgagggactttgatctacagacctgttgactggatgttaaattacagtctcaaatttgacttccaaaataatgaataataatgtctaacagttactgaagacctagtgtgtgtgtattgccactgaatgatattcttaaagcgcaatcaagagctactgttacactggatgctgtgtctgttactttagatacagcctgtggctcaaacatctttcaatcaaattcttagttttcctgtttccatatgagtctatattgtcctcctgatcaatattgtcatttttattgtatttctttactgtcatgctgaattaatgataagttattcttctcaaccttcccataaaagaaaatgtatgaataagcctagagatttgtattctttagttaaccgtgcataagtcattattgttttttaatgagggggcaagtggtatttgcaagattatccagtagtagaggtagctacacaagtttctttaaacatctctctagactctatatttgacattaaatcaacagatatgcaagcctctagggtctgagtcttccctggtttattaatgtgttagactagctggcaacctccaatatttattataaagaaaaatataaaaatcatactcaaagttgtatgttcatactttgatacttaattcagttattttccatgatggtaccaagggttttcaccaacacaaatcaattaaagctttataatacctttataagagatatggaggagctttattttaactgtaagaaacactgtgaaattgcaatgatacatcaatgattttccatgataattaatcatctgcttgcaacctggctgctcctttcaaaaatacaattcctacctgcctagaaaatgacattttcaggaaaatatcattctggaaaggtattttgcaagtgttgaacattccctcttctttgaaaaccactttaagatagaattgtataggtatgttcttggacagacttctatctctctcccttctctcacctctgtcttcctcctacacttaaaaaaacagctttattgaggtatatttaacacataataaattgcacatttttttccctttagtcacactcttcattttattttattattattatactttaagttttagggtacatgtgcacaacgtgcaggttagttacctatgtatacatgtgccatgctggcatgctgcacccattaacttgtcatttagcattaggtatatctcctaatgctatccctccccactccccccaccccacaacagtccccagtgtgtgatgttccccttcctgtgtccatgtgttctcattgttcaattcccacctatgagtgacaacatgcggtgttcgttttttgtccttgcgatagtttactgagaatgatgatttccaatttcatccatgtccctgcaaagaacatgaactcatcattttttatggctgcatagtattccatggtgtatatgtgccacattttcttaatccagtctatcattgttggacatttgggttggttccaagtctttgctattgtgaatagtgccgcaataaacatacgtgtgcatgtgtctttatagcagcatgatttaaagtcctttgggtatatacccagtaatgggatggctgggtcaagtggtatttctagttctagatccctgaggaattgccacactgacttccacaatggttgagctagtttacagtcccaccaacagtgtaaaagtgttcctgtttctccacatcctctccagcacctgttgtttcctgacttttctgtcttcatttcgttatgtacccagtagttattcaggagcaggttgttcagtttccatgtagttgagcggttttgagtgagtttcttaatcctgagttctagtttgattgcactatggtctgagagacagtttgttataatttctgttcttttacatttgctgaggagagctttacttccaactatgtggtcagttttggagtaggtatggtgtggtgctgaaaaaaatgtatattctgttgatttggggtggagagttctgtagatgtctattaggtccgcttggtgcagagctgagttcaattcctgggtatccttgttaactttctgtctcgttgatctgtctaatgttgacagtgggttgttaaagtctcccattattattgtgtgggaatctaagtctctttgtaggtcactcaggacttgctttatgaatctgggtgctcctgtattgggtgcatatatatttaggacagttagctcttcttgttgaactggtccctttaccattatgtaatggccttctttgtctcttttgatctttgttggtttaaagtctgttttatcagagactaggattgcaatccctgcctttttttgttttccatttgcttggtagatcttcctccatccttttattttgagcctatgtgtgtctctgcacatgagatgggtttcctgaatacagcacacggatgggtcttgacactttatccaatttgccagtctgtgtcttttaattggagcatttagtccatttacatttaaagttaatattgttatgtgtgaatttgatcctgtcattatgatgttagctggttattttgctcgttagttgatgcagtttcttcctagcctcgatggtctttacaatttggcatgattttgcagtggctggtaccggttgttcctttccatgtttagtgcttccttcaggagctcttttagggcaggcctggtggtgacaaaatctctcagcatttgcttgtctgtaaagtattttatttttccttcacttatgaagcttagtttggatggatatgaaattctgagttgaaaactcttttctttaagaatgttgaatattggcccccactctcttctggcttgtagagtttctgccgagagatccgctgttagtctgatgggcttccctttgtgggtaacccgacctttctctctggctgcccttaacattttttccttcatttcaactttggtgaatctgacaattatgtgtcttggagttgctcttctcgaggagtatgtttgtggcgttctctgtatttcctgaatgttggcctgccttgctagactggggaagttctccaggataatatcctgcagagtgttttccaacttggttccattctccctgtcactttcaggtacaccaatcagacgtagatttggtcttttcacatagtcccatatttcttgggggctttgttcatttctttttattcttttttctctaaacttcccttctcgcttcatttcattcatttcatcttccatcactgataccctttcttccagttgatcgcatcagctcctgaggcttctgcattcttcacgtagttctcgagccttggctttcagctccatcagctcctttaagcacttctctgtattggttattctagttatacattcgtctaaatttttttcaaagtttttaacttctttgcctttggtttgaatttcctcctgtagctcggagtagtttgatcatctgaagccttcttctctcaacttgtgaaagtcattctcctaccagctttattctgttgctggtgaggaactgcgttcctttggaggaggagaggcgctctgctttttagagtttccagtttttctgctctgttttttccccatctttgtggttttatctacttttggtctttgatgatggtgatgtacagatgggtttttggtgtaggtgtcctttctgtttgttagttttccttctaatagacaggaccctcagctgcaggtctgttggagtttgctagaggtccactccagaccctgtttgcctgggtatcagcagcggtggctgcagaacagcggattttcgtgaaccgcgaatgctgctgtgtgatcgttcctccggaagttttgtctcagaggagtacccggccgtgtgaggtgtcagtctgcccctactggggggtgcctcccagttaggctgctcgggggtcaggggtcagggacccatttgaggaggcagtcttcccgttctcagatctccaccactgctctcttcaaaggtgtcagacagggacatttaagtctgcagaggttactgctgtctttttgtttgtctgtgccctgcccccagaggtggagcctacagaggcaggcaggccttcttgagctgtgatgggctccacccagttcgagcttcctggctgctttgtttacctaagcaagcctgggcaatggcgggtgcccctcccccagcctcgctgctgccttgcagtttgatctcagactgctgtgctagaaatcagagagactccgtggacataggatgggattatatccatgtgcgggatataatctcctgatgcgccgttttttaagcccgtcggaaaaagcgcagtattagggtgggagtgacccgattttccaggtgctgtctgtcaccctttctttgactaggaaagggaactccctgacccgttgtgcttcctgagcgaggcagtgcctcgccctgcttcggctcgggcacggtgcactgcacccactctcctgcgcccactgtcaggcactccctagtgagatgaacccggtacctcagatggaaatgcagaaatcacctgtcttctgcatcgctcatgctgggagctgtagaccagagctgttcctattcggccatcttggctgccctccgacaaaatcagttctttacactactttacttctttaatcttatgcttacctaaccaccatacttatgagacttaagaaacgctttggggccaggcttggtggctcacgcgcccagcactcgggaggccaaggtgggtnnnnnnnnnnnnnnnnnnnntttgatctcagactgctgtgctagaaatcagcgagactcccgtgggcgtaggaccctctgagccaggtgcgggatataatctcccggtgcgccgttttttaagcccgtcagaaaaagcgcattattagggtgggagtgacctgattttccaggtgccatctgtcactcctttctttgactaggaaagggaactccctgacccctcacgattcccgagggaggcaatgcctcgccctgctttggctcgcgcacggtgcgctgcacccactgtcctgcgcccactgtctggcactccctagtgagatgaacccggtgcctcagatggaaatgcagaaatcacccatcttctgcatcactcacgctgggagctgtagaccggagctgttcctatttggccatcttggctgctacccaaattgcacattttaaagtacagtggtccctcttattcgaggcggatgtgttccaagccccacagtgggtgcctaaaacctcagatagcaccacacctcatgtataccatgtctttgatctgataacctggatgattactaagtgactaatgagcaggtagcatatacagcatagagatgctgggcagagggatgattcacgccccaggtgggacacagcaggatggttcaagacttcaccacacaactcagaatggcgtgcaatttaaaacttatgaattttttatgtctggagctttgcatttatattttcagaccatggttaaccacaggtaactgaaactgaagatgcaaaaccatgcataaaggggactactgtatacaattttatgagttttgacaatctgacaaatatatacacccatgaaacaatcactgcaattaagatagtgaacatacttatcacccaaaaggttcttcatgacacgttgtaattcttccctcctacccctccctggcctctactccatccctaagcaatccttgatctgctttatgacactattaggttagtttgcatttcctaggattttatataaatttaataaaacaatatgtatttttttcggtctgtcttcttacattcagtgtacttattttgggatatgttatgttgtttcatgtatcaattattaattctcttgtattgctgagaagtagtctattgtatggatataccacaatttgttctatccattcacctgttgatggacatttaagccattttccccaacaccttttttattgccttaagaaacagagttactaaaagctatatttgagtagaagcataataaatagaagcatagtgaataactgtcataaatagttcttgggtaactagtttttttttttttccctttaagagattttatagtatccttagaattaagagtaaagcagcagagcaggtcagcagtttccccctctagagattttatttcatatccatttgctcctgaaatggtaactctgatttcccaagttgttatgcatacctaattcatcaaatgtaatcattcacaaggagacaaaccagcgcttcttttatctgcagccaatcagtatattcagtaagaataagtgaagtcaaaccaataccagacagctgtgcaagatgtaggaaaaacaatcaaccacaagagcctggcttaaacttaggaagtatagttgcatagatagcaccgtgttattctggacacacgttaaccaaccacatagaaatagccttggagaaacaaggttcttaattcaatttgataaatgaggactgtgggggaaaatggtgactatgaactatatatacgtgtgtgtgtgtgtgtgtgtgtgtgtatgtacaacacaactgtaagtgtgagtggttatttaggtgctaggaatacatgatgaatgagcttggtttctttctttaagggattttcagtctaagagaggtaacgatagattatatgtagtcatctatagacccataaatgactaacaattttaatcagtaaacttcttgtaggataagcaaagtattcttaggagtgcagagaaaaattttattggttctttctgggagtagggaaccttcaaagaggtaatttgatatagacctcaaaggccatatgtaattttgttagggaagggaggatgggagatgggaggaaaatttataagcttggtgagagaggtatggtgagccatgtggtgtagctgagactagattggagtctcacaggttggggctgggtggtaaaggagtttgaatgtctttttaatggattaaactttcctctgggggcaatggggactcattgaaggtccgggtttgttttaaaacaggagaacgacatgaaatcaaccatatatttgatgggggtagggtcagccttcatagattaactggatgaggttcgtggcttaggtgagagaataactctgtgcatgaaagaaaatggatttgggtatagtatttgaaggatatgctggtacaggcaagcttttatcagttttatgaattgtgtttaaattaaaaaattaaagaaagggagtaaaaggttaaagtcaacagtaagtcccctttttactcatgttcccattgattctcctccctcgaggcaaccaatgttccttgtttcattatatcatttctgatttatttcaggtatttagaaacaggctggccatggtggctaatgcctgtaatcctagcagttcgggaggtggaggcagggagatcacttgagtccaggagtttgagaccaacctggccaatatggtgaaacctcgtctctacaaaaacacaaaaattagctgggtgtggtggcgcgtgtctgtagtcccagctgctcaggaggctgaggcatgagaatttcttgaacccggaaggcagaggttgcagaggttgagctgagattgcgtcactgcactccagcctgggcgactgagggagactgtctcaaaaaacacaaagaaatatatctatgtacttaactttgttcctgtagtttctattagtaataattcgaagtcaataaatatagaatgacttcatccttttggatggctgcatagtattctacttacaaatatgccataatttacataaccagttctttgtgatggaaatttaggttgtttacagtctttttctattacaaatgatgctttagtgaatatccttggaaattcatcatgttgggtactataagtatatccttagaacaaatacctttcatatgaaatttctaggtcaagcttaagcatatttaaatttgtaacgtattaccaaactgtccttgatagagattttaccagtttatactcaacaatgcatgagagtgcctatttctgcatattcttgctatcagagtatgttattacatttgttgaactttgtccctctgatagttacagatggcatcttactgtagtttagtttgtatttcttgtcttctaagtggcattgaatatctctccatgtttttagagtcatctgtatttcctttttgagaactatttttaaaattcttagcctgtttttctgttggtcattgttttttttgcttcaggatttataggggctttctatatattaaggaaattagtctcttctctgtgaataggaaatttttaaaaagtattctggggttctgttctaaaagcatacggatatctcaacagtttgaggaatcaaaggttaggcagacatggagggccaggctaataagcatgtaacgggtttctactagggggcaaaagcacgtttggattccagttctggaaagaccagtgtgttctagggagtttgcttacttagactaggaaggaacaagcttaagatcagggtagttataatcaaatgagtgggttaaagaatgttggagtaatgagagaaatggtgaatcagggctaggtgggggtagttaagaatagagaagagggaatagattcaagaaagaggaacagattagagagacatgccagccgttctctttttgaggctcactcttttctagtcagaaatctcatgaccaacatgttttgtctgtcctagtttcccctaaggctatagcacaggacagcccactgctctacagctgggcaagatttgagtgtagtaaaggatgcagaaattgctgagagcttctctatctgtatatggagcaggaccaagaccctaggaccattccaggggtgtgtgaaaccaggtaacgtgatattataagtagtatttacatggaaaagaaggggcaaatgtcgtacaagtacagtgagtatcaggggtacatggtaaaggtggagcaagctgtcttttatacaacttctataattatggaactttgcttaaagaaaaacattaaattatacttactggaaaaaaatcaaattgtgttaaacagcataaaattaaaagtaaaaagtcttaccctcccttgggtaaccaatgtaaatagttctatacatttttgaacctttttatggaaaaatgcatacactttaaggattatttagttcatattatacatgctgttcaacaactggctttttctatctaaatatgtcacagatattcttctatcagtatatgaagatctattgcacattttagcagctccttaatattttattgtgtggatatgccacagtttatttaatcatttccatgatgatgggcattcaaactgccttcttatttatgcttttgcaaataatactcaatgaactttattgtaacaccaattgagagtttcctccttgtcccatttgtgtctgcctagagcagcaattcagagactctctgtaatcaatctgtccacttcagggacagctttttctctaagtcctgaaaaatgagtggcgtttgtgtgtgtatgagttttgaggccatgtttatagtagtagacttttaaaacacaccttcctgaactttgttgttccttttaagattgatgcctgcaattttaggtgactgccacatggtggcacagaagcaccaaattcctacagacagtgcttacagtcttggtatccgtgaagggtttgaaaatgtttccttattgtgtcattatactaaatacttataaaaacagattcaatttaattatgaagtgtctaaaaaaattctcaaagatatatgcatgcatttatcatctgtatttctttagatcttcatgttatatcatatttctgattaaacagctttcgtttgtctcataagaaaaaccaatatacttcttacagagtttttagccatacaggaaaatttccccaaatactttcagctgtttttctcttgcttgccttcctgtctctacctctgctccgtttttcattgcttgaagttaagagatgacagggttttctttttcccacttcctggtgcccatctctcccagcatctccataggcagccaaggccccagcaagttaagcttcacaagaccagcagctgtcatttggctgtgctgctcagctaatgggagcagtggatcaaacttcaaaagcatgagctatgagagtttcactggactgcccccacctccctcagccttgatgagcaggctggtggccttacacgggctttgaagtcccatttgcttgtcccccttgattcccaccagtttaagggtagtcgcagagagtttagtgggaagtggcaacattacttctctttggtggacttggaataccactcaaatcctggccttgagtttcttcctttggtggcacagggatggaagggtctttcagaaatttatagcatacaggcattttgaggttggtatgtgggaatggtagcgtaggaggctcagtttggacatatgaaagtcttggactacattcctttactcatgtaactctaattttgtgcatctagaagacaaatagtgttagcttcccttttcagttaaataggattcctgcactgtttaaagcacctgggaatgtactttttgcctgtctcagtttaaggactcttgggccataatacccagtagttattgttttgaaaattgttagtgcccagatattttactaatttattactttatttttctctttaggaaataatgattgtttttaattagaatgccggggaaacactgcatttattaagcacttcctatttagggcagtattatacaaagcattgaagaaaaagtttacagacaagcctcacactatgaggctccatgcacaggctgaaggacactgtgcatggatgagagactcacatgagctggggtgtggtcacctacaatctctctccatgtgtagattcatgagcttaccctacttctctattgcattatgtggaattttggaatcttgaaataattcacctgatataaataatattaagttaaaattctagatctttacattagccagaaaaatgcctattctatatctatagggttgttgtgaaggtgaaataaacatgttttatgtgaggatgagcatgcttttatcatttgggggaatcttccttggagacccaagaacatttggtgtgagaagcttgggtgttcttagacaagttgagattctccctgcccaccctcccctcagctgttctcttgatgctgtcacctacttgagggatggcttttgtctctttggtgtctcccccaactcctagccttgcacatgcatgataggtattaaaaatatctgctaaggccgggcacagtggctcacagtggttgcagtgagccaagattgcacaactgcacaccagcctgagtggctgggcaagactctgtctcagaaacaaaacaaaacaaaacaaaactaaacaaacaaacaaaatctgctaaatgaatgaatgaacatttataaaagcagtgttagaatcactgtgggcaacagattctaacaaatgttataaatcatcaaacgataactgagcatgtctacaagttatttcctctaccatttacaaatcaaaatggacttgtcacagggctttctaggtattgtttggtatatctgtgacaagaaaaacatctctagagggaaaaataggaatattttcttctgttttcaggatgcaatttatcgcctttgacaaaaaacaccaggaatgtcttctcagataaaatgttaactccgatatttgaatgttttttaatttcagaggtaaatgttactgttttaaaatatgaagacggtatgactagacaggatgttaataacttgacattacaaaatttattaaatttatttttaaagtggtttggttccccctctcaaatgcatgaaacatgtgggagttggaatagatctgccccaggctgccaaacaaatttttaatggaactggagtccttcagggattgtcctaaatccacataatattcttaagtcctggtgtttgcactgggacctgtatattagcagctgtacgtgtgaataatatacttatatcaatctatcactcttgtgaatccacatctgtaggggctgctgcacatcaattattccacctcagggggtagagaaatatttgggccagcactgacctccttttcaatcagggcctctggaagtcaaatggtccctttagacagaacctctgtttgggaatccatttggcctaatgtggccatgctgggaagtgaatgtgattacctgtgtcaggtgtggagatggcatccagagaagcaaatgaaaattctgtcacttggagccaccgtcaacattcaggatctctcccttctatctaattcttgcataacatattagccagtctatcagaaaagaatgtcagcttcagtaagatgcatctactttgcaccaaaaaaaaaaaaaaaagcaactgtttgtttgaaataaattgtaacttgtgtaacttgtttgaagagctaaattcactttcaaattcttggaaatgtttttattgtctgaggtttcaggaagaaagtctcctcaggaagaaggaggatttttttgtcttcatatctcagtgtcttctcttttttttttttttttcaaaaggaaaacaaaggttttataatgcttatctttttgatcaaaaacttggaacatctttctcaagagtacagagttcttttattttttaaagcttctgcttttatacctagaggtgtgttacagattgtcataactgataaatcaatgacaaatgtagccacttcattttgttggggaaatagacaattgtggtagcggctgaccatttatttaattatgtggtaagtaccacatgatgagagggcaaagttaattgatgatttgggctatctcagccagggtacagtttacatggcaattacgctgggatcatctaactgtaattggcaagtaattttgtaagtgaaggaacatgacagctcatttacatggtgttcactgagtaaaatttggggacatttatcaactacttccaagtgaagagtgattgtatcagtgtctcccaaaatgccacaagctgtttaaaagttacatgggaggttttttgtacaaatctccatgcattcatttccctgaacatttgctagttatgtgctgtgtgccaggcactgtcctagacactgaggatacaaaaatgagtaaaataaagagttctactctcaaggaactcatctatgcgaagcagacacatcaataattttaacacaacgtagtatgtgaaggtttgagctctgtacaagtactatgggtgccaagggtggggaaaccagttaggtggaagatggttagggagagcttgctagagaaggtcacacctgagattaaccttaaaggatgcccagggcttttcaaggggaagagcttgccaggcagaagtgccagccagagtagaatcggagcaagacagctggtgtgagctggaaactttaagcaatccaggtacatttcaaggcagatatgtagcctgtgaagttgcattagctggcatctcagagggccctgtaggtcatgctcagggcctggatcttattctctaccctggcaagccattggagagtcttaatgtcagagctgttttgtaggaaggtcattttgtataataaagccacttgcattattgcagtatgccaggctccattctgcatgtatcaaggcatttcatcctcacaataaaccccatgaagtaggtattaacatttcccgtcatctatagatgaagaaactgagtacacagaggttggccaaagctacacagtgagtgatggaggagccaggatttgaacacaggctgtcctgctccagagcccttgcttgtcaacagccccattctacagcatgtcataactctcttgacacagctgactgcaattccttgtttacacagtgtcccctacccccaccccaacacacacacacacacacacacacacacacacacacacacacacacacacagctgtgagctctgtgagggcagggaccatgtctatcttgtttatagccatatccttcaagcttaagacactacctgcaccttcatagacatgcaacaaataagaaataagtctagttttgaggagggttgtgattcgagttgacctggcaagggatgatgatgaaagcctgaatctaaggcagtgtcagtcaataaggagagatgaagaaggggaaataaatggtcagggtttgttgattgattggatgtgtgggtcttgttggaatattctcacagtgcttctgatttccaacccatgcactggagggatgacttggcaaaagaatgtgaagcagtgggaagcttacactgctcttcacagagctcttaaattccttacaagaaatgttgcagactcaggatgagacattagaagagacttcccttgaggtggttaaaaatagaagggacacatctgcctgggatggttgagagacagagctgcccttgggtagatgagtggttagatagcctttgggattcttccccttttgaaaatgctctgatttaaaataaatcaaaattctcccaagctgcctatgcttaactgcctggcttagagaagataaaaccaaagtgttcaagggctggaaaatattgagtccaaatgcctggatgataaataaggaaatagaagccacggtgggttaaatgactcatcccagggcacacacttgaggcaaaaggaatacccaatcattggattatcagtctgggcttgctcttccccatgtctcatacagcagcatttatgttttggggggtcctctgtgggaaggcctgtgctgggtagaagcacacagcaaaggaaacctggtatctgcccttgaggaattcagagaacctcaacaataaagaacccttatcacctgaaaatgtcacaaagtaccatctattacgtagactatttggaaaatagagaaaatgaattttaaaattcgtaatgatttttttagcctcactcattgcctggcactgctttaacgctttatatttattatctccaattctccgtgttttaatgctttacattcattatctctaattcttacagctgcctgcaagttagatagtatgatttccattttatatttcagaaaactaaagcacccagaacttgttccataagatcagaccatggtaactccaagttcaaccctgtacaaattatattaacattttgttgtattttttgcagtctttttctaagtactaagactatttacttacatatatgtaattttatcatagatacaatttggaatcttcattttttgtggcatgttctatgtattttccatatgattgtttagtcttcattttgatggctatctaatgtctgatcaagttttcaggaggttcttaaatgcttactcatagaaatcttccgattcttggtatatatggcattttaaagatatattttgaggactggtacctctgcccatcctctttggatggcattgtggagaggagaagagaaactacacagaggatcatggctttcttctcccccaggagcccctctgagaagggagagtggttctgggcacagctcagagtggagcctgggcagagatggcctgaggcagatagcaggtgacttttcaaggcttggcttttctgactgaacacacattcttcctcctgcccttgtaaaaaggcaagttttcattttcttagggtagtaaaaatcttttgtgtgaagaaaaagtgtcgtcaagtgtcttattcatcagcatatataccatctctttaaaatgacagtgggagtaaaagttcatcagttcaatatgtctttcacatttggagactcctgactaataacctctggtatttatcatcagaacagccaaagaactaaattctggcacatgcttctctcacgcactgagaaaaacttaaaaagacagaagattttctccattttttcttctattcacttagaaggaaaagcataccttttttaattaaaaaaaatatgagcacgcagaaacatctggcctgtattaccacagcagcttcctaaatggcttccttgtctccagtctgccctttaaaaatcaacactatatgcaacagctagaaagatttctagatcacagatttgcaccagccactctcccatgtcactggcatattcttccatgactctttcatggttcttggggtcaagtcctgtgtagccatagctgctgtctctcctgcttgcaccctgccccagccacactgagctgcttgtggctccctgcttcatgctataatgtaggattatcttcaggcccgtgtacaaatcagttctttctccacaagctccctgctaggctctgctgaacctggatcccagcatgggctcccacaaaccctatccagctattatacagaatataaacttccatcttgtttgtattttattttatgttagagacacagtcttgctctattgcccaggctggagtgcagtggtatgatcatagctcactgtaaccttgaactcctgggctcaagcagtcttcccgcctcagcttcccgagtagccagaactatatgtgcatgccaccacacccagctaatttagccttgtttttgcttggtcagcataattcctatataaaattttttaaaaaaacttgaatcccattgggcaaggcatatcactgtttagtttgcttaaggcccgaccactctgtgttatacactaaaccctaatcacacatttattctacgctgggtcttataaagctacttgttttcttatctcctttacacaatagaatataagctgtttgaggataaggattgtgtattgttaactttcatatctataggcttgacaaagactactcaataaatatttattatatgaatttatgtcttataaaaaaacaaaaattagaccagaaaagactctctttttggcttttctgcttgttcatgaacatcacaagactaatggaactcagtgcacctggcaaaactaacagtatttccatcaggtgatcgaaagtctgtgttcgtgatttgatactactaagattgaaccactctggacatttaagcttttgaatgtgcttatgatctttcccactttttcttgtaccaggatatctgtttccatcaaggcgtatatttccttggttttatgtccacatgactatccaactgggctattcagaaatatgagtggaaaggattagacatattattttatctgctttgcaaatctgatcatgaccaaagtacaatcagtgggaattctcaaagtttggtcctgccaataagtagtacatccagatatatgcaagctggtgatgctagaggttatagtaatagaaatgcccattggtgaatctttgataatcctgtgcttgtttcagtcatcatgtttttccatttccttagttatccttttctagtcattcatctacgtgctgctttaaagatgctaaaaaagacctggtgtcatccaggaaccagattactcatatttatggaatttcatataatcagtgccataggaccatggtacgtgcctatggcaatattcttgccataaatttgttcttcagagaatgctctgcattttcagggagtgctatggatattgcagagggactgtacaccatagggcattgctgaataatggaaatgtgttcaagtatcaagtttaaggaaagaacagcaacaaaaaaataaaaccctttcatccaagcttccttcccttgggaaaaggtggggacaaaatggcgagagcttattatagaatcctttagcagccagaaatttcattgacaattttgttaatgtgtctgctcgtctgccttctcagaggctcattgtgaattccttagttgatattattaatggttaatgggtgcacctgaaaatcaagcaatattgtaccatttgggtaatagttatgttaaatggttcttttctacagcatcgagcttatcagattatctttttcctaataatgaatacctcatcttttccaatttcctaatcaaatgcttccatgtcatcttgaagcagagccagttccagctgcatctattctatactcttggcttcaattatatcaaattattcaacctacttacggttccttagattcccatttgctctgagatatagacatcatgcacctctttggaagctcatgattgccaactattcaaaacaggtctattgtaagtaaacagtgaatcaaagagagccctaggctaaatttacagttatgagaaaatttctacaataagtttcttcctaaatattggtgctcttgggtgatcttaagtgttctctttaccctgtccctgctccctaaaacacacatgtatctcattctgcatggcattgcttcagagttgaggatgtccgtggcagtggcaaaaagtaagtgcaggcacgttttgactataaaataacaaacatttaatttttcataggtaatatatagtttggattgatcagaagtatgaggcttcccatacattgccatattttattttattcaaccagatacctgtggctaaaagaggacagtacaagaaatagtgaacagccttggggaaacctgatattgtcactttctgttatattggctgctgaaactttattgtatcttatgcctctagtcagatgaaatgattcatcattctggactcatcttttaataatgacttacaattataataacttataattcttatctttatacttcaaggcttgatctgcatatctctatctccttcatttctaggttcttttgatcattgtttcagtattctgaactttaaaaagatccattttctctgctaagaaaaggagagttcagactcaccactgaccacccaggatgactcaggctacacttcattctctagtaacatgttcagttgccctttggggccagaggccgtgctttatattccctaaatctctattgcccagcacagtgtatagaatgggcacagtacatagtttctaagtggatgaatgaatgaatacatgatttcacaatttatgattgatttacttctttaacgcaaaattatattttacctggaactgtatcgtttcaaacttctatcaaatattcttaataccaagtacagtgcagtgcagaccttctcaataaatgtttagtgagagcaaacatatatattttggagacttatcatggagatgccagaatttggccacacagtatttcaaaatccatgcttgctccaattagtcaagaaatgaattttcaccccccaaattaaccattggttcaatagattggttactgtgattactctccagtaatcacagagatggaaaaatctttggaaagccatctatgtttcttgaaatatttaaatggaaaccttccccttcagagtgttattgttcaatggatatccacaattcctgcaaacatctattgaacaacttgtatgtgacatgaattggagataaatgtaaaactggcaatttttcaaattacttataatttggtagccaaggatagaaataaagcagcatatagtaagataaattttacaatagaagcagatataaggagcggagaggggggagtaattaattccacataaagcattagggaaggcaccctgaaagaaatggctctgagttagatttcaactatgacagcagtttttgtcttttggataactatcatgagtgaaaaatgccggattgtgcttgatgtatttgtttacaaggcagtgtcatattatagggaataaacttttaaaaagcaaagatctgaaagacatttaactcctcagtgcaacacctgaatctccaactgtgttctttgttgtgtgatatctgagaaacagagctgaatcaaaccctactatattaatggatttatatatgtgcacataaggctaatatattttatgctgccaattttttatggtttcataaatagtgctatcactaacatttctaaaaaatgaagaaaagagctcatatgtgctagcagaaattcagtatattttatagaacactgctactcttgatatagcctacgggatgtgacttttcataaaaacctaatgaatttctagatttgtcagctgtttccaaacagatgcactcagctaatctaatggaaacattttgagcccagatcccaaatatcaatagcttttagtattgcaaattagtttgtctattgggtaaattgggctgtgtggttcttgataaaaagtagcaagtaattttatatggatgttttatgtgtaactgccttgccagggtttaatgttcatatttttccttgcagagttttaagttgaatgtagacagtcattgtgctctcaaggaagctgtggaggaggaaggacaccaacttcttgagcttattgcatctcacaaagcaggtaaatcctcctgaaatattgcaagtctttacgtctccagactattaagaatgaagaagcattgctgtaaattactgcatatattcacttccttatgtattattaatatttacattatcagattgaccttcaagatttataaatgtttcatatactgcatacaatgctgtgatacttataagatgaaatactgcctccaaatggtctgttcattttattttgggctgccgtttgcctgagtttcaattgaaattacattcttgaaaacttcacattgacatgctttttgatgtaggtgctctggaaataacattaagacaatgaatgagaactgtatatatagttataatgcatacgcattagggtacttatagatatcattacagatataaggcaagcagtctaaattatttccctgccgcttcacacacaagaacattttgcatgttctttgctggtctttgcattagcagagtttttggccttcaaccaattcttaccccagtattaatatatttataaggaacagattataaataaaaaatagttttgtcatttggttatacttatcctgataatagaagactgtaagacaggatacttacagtttggctctaggtttgagcttagcacagctaaataggaaaaagacagtattaattggatttactaatgttaaagactgccgtcttaattctggcctatttactgtatttctcattgaattgactttacctatttccatagacaatttttatcattataaagtctctacacagatacacacagagccttttatttggaatgtgaaactgtaatgttattaatttttatacattgtgatttttgttcctcatgtatttttttaagtcaatatactgagtctaaatcagtttccaagccagtcatctatgtggttatcacatttttgtgtccttatacctcatgttaagaattgcctgtctctattctgagtgacaaatgctgatatggcaggtgatggtaatggtcatttaaaaatatttatattgtttaaaatagccatctaatttactaaataaaaataatgagtaaagattcattcaggcccacaacttctgctttcccctccttttggagaaggactgaaggacatgctgcggatgattgcaagtcaatggaaggagctgcagaggcaaatcaaacggcagcacagctggattctcagggctctggataccatcaaagccgagatactggctactgatgtgtctgtggaggatgaggaagggactggaagccccaaggtaagtggcttgaagtttgccttatttcctcttatttctgtcttcttttgaactaggcaccactgaagttttctttccaaccctaaggctttttgtttctactgggtaaactttatatctctctctatatatatataaacaaaatgaaatgccttagtttaaaacaataaagccttcaacttccaagttttccaggaagaggtctttttttgaaaagtggcagggtaggtgggggacagtactttaagggtgagagaaagggggacataaaacatttagtaaacaaaacataaagcatctttaacatgaataatcagaatggttttaaattgttttgttgcaactataaatcactataatcagtgcaatcactcagctctgacatccattagccgcttggttacagcaaattaacaaagaagagagaaagtgattcattatctcattcctgttaatgactatcagatgcattgcctaattaggggatggtcattgtagtgggaagaaggtcatatgctttgctacaaatctttttgctccaagtgtgagttctccataatggtacaagcactgaatacaacaagtactttaaaaatgagtactgatgtgttttggttattcattttagatgtccaaaataacccataaaacatatgcaattgaactttaaatgaggcaccttttgatacagactggcactgttctaaaggtatctttggactcataatgtggaaaataatgttattaatttgatattttcgtgtaatcactcctttcttttgcatctgctcctttgtggaagtaaacacagaaaacctgcctcataataaatccagaataaaacttattgtaacatgggggaaacatatttaagagttcatggtttttattcctggcttggacaaagtaagtaaatcatcatcaagtcacatttattcagcatccatgtagattggcattgtgctaaatgtatacacagcaagttaaacaaatactttgccctcttagactcacatttttaaatgcaggcagaggagaaacccatccagccctgcaatgttgagacccatgcagccagtgaaaagctcagacaatttacagcttttgaatctcaaacaacgcctttaacttatttgttggaaacagaggatagaatgatgagctcagtttcacttaaagaaacctccatgaagaaggttgcatttcaggaagtacttgaaggaaggaggagaggtggcttggcacatgagcacatattttaggaagtgatgtgatgaaaggatcaaagctggaactaataatgtggagtggagactgtattcagcacatttctcagggcaaactcggagctattttaaggagtaggctgtagggagaagttcactgggctaatgctttggctgtgtgtggaagtagggagaggaaagatgataagaaacgacacagttaaaaacttgttgtaggaggctgaggcaggaggatcacttgaggtcaggagtttgagaccagcctgggcaacatagcaagaccttatctctgcaaaaagtgaaagatgagccaggcatggtggcatgcacctacagtcctagttactcaggaggctgagacaggaagattgcttcagcccaggagtttgaggctgcagggagctaggatcacaccactgcactccaacctgggcaacagagagagatcctgtctctaaaaaacaagtcaaaaatcttaattttagctgggtatggtgacatgcgcctataatctgagctactcaggaggctgagttgggaaaatcactttaaaaaagcttcattgtattttgtttatttaacaagaatacactgagggcctactttttaaaagctatcctgtgttggctacattttacatgccagatgctattctatagcacttctgtattatgtcatttaattatcatgacaaatttttaagtggttctattttaatccccgatggagaaaaggagggcaaagagaggttaggtaacttccttaaggtcgcacagctgctaagtagcagagctgggagccctttgatcgcagagcccgtgttcatcaccacctagcatactgcctttcactggcactgctcagggccaagtgtgggaccaggcgttagagatgaacagctggcttccgtgcctgtctcatgaagcttgtggtgaagtgtgagcaacagattttaataactgcctttacagattgtgatgtgccgtgaaaggaaagaaaagggagtcacaagaggttgggccaggagaagtgatctagattagggtatcagggagggattgtcattctgtgaacaggccagtgttgttagaaagggagaagtgtgcaagggaagctgggtgccctgttgttggacaaggggaggcttttggagtaagaagagaagtgacattattgcgttgcactctaaaaacctcttactggctgtggtatgggacatgagtgggtggggtgggatgagtggggctagggtgggagtatgccgaagtggactgcagagatggcacaatgacctaaattaatgaaagagctatgttgaaaaggagtacattcaccagggccagtttgaagtggacactttgaaatcaccttattgtttagggaggcattgagatagaatgaagttgataacacagtgagaaggagaaagtattatcagaggagaaacattgtcagcatttctcaaaaagaggacctgcctacccaggctcttcctcagaccatatcagaacctcatgggtggggccccagaatctgcattccaataagctcttggagaacctctataataggcaccaagaagacccttttcctgcagggactacatgatcctcacccaacgtgaataagagaatgtctgttgcattgttacttataatagcaaacaattggcatcaactgaaatgtttaaaataagaatggtttgattaaattatgctaaatttcattctaatgaaatgttatggttacataaccataaaaataatgttttagaagagaattggaaatactggaggatacctatgatatacaatgatatatttttgagtatctttgaattttccaaacctctcaacgagcaagaattattataaataaaaaaataagaatacatttaaaaatataagaattaaaaagtgataagaggtaaaataggtgacgttgggctaagggacttgagatatgaatttaaatatcaagaagaaaaataaatatatctggttcttaatgattaaggtgccttacttcttaagagaaaaccaaacaaaaaccctccacttacattattccaaaagtgaaaataccttgagtcacatcagcttaccaagaataacattcgtgctttcctttttaatagtatttctattctagagcattttcatgtcacattatgtgcacagcatagtgcatctaaaagcagctacaaggagaggcttttgtaggtatccgcagatgcagaagttgaaggaggctctgagagtttgagatcttgacatgattgagccagcaaaaccccaggcctctacctcccaactagttctctctccacaatcttggctgaattttctctggaaaaatgaactcatccatactcaaggatgaatgtgaaatcaatttaagacaaagaaaatatatttattaatttaagcttaagaaactatgaaaaaatcagaatgctcatgctttctatttgtttaatgtttatgaactgcttcttttactcccttgggcaaacacatataataataatataaaggctcagattctgaagccagactgcttgagttcagtgattggcacttactagctgtgtgttcctgggaaaattatttaacttccctgtgcctccgttttctcatttataaaatagaggtaatgataatatctgcctcaaagggttgtgatacagatttaaaagacttgacatacctaaagtgctttagaacagcacctagcacatagtaaatcctaagtaggagtaaatatacaagacttcattttcttgttttatttacagttctgggtacatgtgcgggatgtgcaagtttgttacataggtaaacatgtgccatagtgatttgctgcacctattaacccatcacctaggtattaagcccagcatgcattagctttttttcctgatgctctccccgcacctgtcccctcactgacaggccccagtgtgtgttgtttccctccctggatctatgtgttcacattgttcagctcccacttataagtgagaacatgtggtgtttggttttctgttcctgtgttagtttgctgaggataatggacaagccttcattttctagagacaaataaataattttaataaattataaataatagacaaatattataatggatctgataaatactctgatagagataggaacaaagtgctataaatacactgagaaggaaataactaaccctaccttgggctatcaaagaacaatttacagggaggcattcttgttttaaatgaaaggtagacaggatttttgccaaggtgaaaataatgggcagagagaatagcatatacaaagatagagaggtgtaaaaactgtggtgtggctggaacctgggaccttgttgcagatgatgagtaggccagcctgccacagactgcaccaagacgtaacaatgtgacaaaaaatgatccttaatgatcagtgatttgacaataattcctcctatgtctctattaatataatccaagccagagtgaggtctctatacacaataaacctgaacatattgtttaagccaaaatttttattgtcatattgcaataaatcgagcaagcttaaataggttaccctgaagttctccatgactaaaagctggatttggcttcttagccattatgtcagtcctctttccatgacgtgaccttgcacaggtcatgtacaaattgtgccatgaaatgcatctccaagcacagcagttatgatcatctatttcatcttagacctaaagaggaattaaaattaaaacatgataatacataactccagaattcatcttaggtttacttcagaagctactgggagcttgagaagcataatagaaaatctaaggaatatatctagggggtatttttcttttttaccttgtttgagagactgcagaaaaggacttggttttagaaatcttgtaaagaaggaggataggaggaaattcaaagactctgggaaacttctcccctaggactcggcagcataccttatttgttgtatttcattttttaaaaaagtgttttcccaggactgtgagatcttttatacatggaaatagagaatagaattcaccagttctagaaatagagcttcagcactcacatctaagaattgaaaatatgcttataattatatatttttactttaagatagattggtgaaagtttatcacttcagattaggctttcagtatgttcaattttttaatggtctacagctggagggatttcaaaacatagtgaataacacctaacaaaagctacatttttttgacctttcaaggcaaaaaacaaaaaatctgaaagcaagaaagcatctttaaattttatacattgtctcctttaaaatgttcttatcttctctttctttacttttcacttacgaagcatgcattattacaggtgtcttataatggagaccaggatttccccctatgacttatccaaccttacatcactgaaagcatgcaacaacagttccttcaccctttttaaagaaacagataagtttccagaacaaagaatatttgaagattttattgtaaattcagaaaactttacagctactacgaggatgacctagcctgagtcccaactaacatcttcatttctttagtgaaaggagacagagagttagctgctttgaactctaggattgtgctcattttatctgtcttctttgaggctcttagattgaagtcatcttcctttggaaatggatatcagactatgaaggtcatcaatgttatctgttcaacaataacagaacagcaagcttaaggatattcctgatatatgtttgctcagccctatgaatgaaagtgttagatattggctgagaatttacatctatgtggcctttgacttgggtatattgcttacaatatacccaactgacctttatttagatgtcaagagagggcaagtctagtgttagcatgtgtttttgtttgtttgtttaccagatgcccaagtcttaacccagtatctatgctaatgaattatgggtaactttctttaactgaaggggtataaaggagtcgatctggggagcttcttggcaagatgttttgggtaagagcgcaactggctaatattttcttagaatagaacttgatcctgattcttccacagcattggtgagacaaagtattggatctgcattcttttcttttctggctcagaagcttatgtagttagcatgttccttaatataagatcttccgaaacagtgctaatgcaatcaatgggaattgcatttatgtgtcgtcagtcccacatatactgatgcccatatttgtaaggaactgcttgagacactttgctgtcttcctcatgcaaacaagagcacaggtatatgttatcgaaagaaaccagaaatgatctagtaagattaaattgtgcctaaagtaatggaaagaaaaacagcaggccaaggcctggccattatttattgagtgctgacagagaactctgcactctgcccagtgccaggccagacatgagagaagacatgcttttctgcttagtggtcttatcatttcagtgtaagcacatagtgtaacatcttgtctaatgtattttgggctatctgagatctagaataatagattacctaagattcagatcatcttaattaggatgttagcagattgaaatggaatggggttcttgatgcaagcaaatgagtagtaaatacattatcaattctacctcttctgtgcagaaatatttctaaaagccagtatccgatctggttcctttcctgctgaactatataaacatagtcctgatttgcagtacctagggagaactctttctgctactgtggatttttcaatagcccctttttttcgttatcagaagggcaacttttcttcaaaaatattttttgaaagacagaaacaaaagtgagttacttctttgaagatcagtgtggttactaagtttgttatcgaatccaatagaaaatagtttctctaatctccttgaagcacttaaatttgcatattataagatgtatgggtggatctaagatgaggaattttttaatggtctgccactctcttgagatgactgaaaaaaatggttgggaaaataaaaatatacactaggtcaaaggacagctaatgttcttggtctatatagtgtataagagcatagcagaccgagcacagtggctcatgcctgtaatcccagcattttgggaggctgaggtgggtggaccatgaggtcaggagacaagcctggccaatatggtgaaaccccctctctactaaaaatataaaaaattagccaagtgtcatggtgtgtgcctgtagtcccagctacttaggaggctgaggcaggaggatcgcttgaacctgggagatggagtttgcagtgagctgagattgtgccactgcactccagcctgagtgacagagcaagagtctgtctcaaaaaaaaaaaaaaaaaaagcatagcttattttgtttttcacactatacttccattgctggtggccttgagaatagaaacatttggctcagcaagaatctgggagtaaaattctttggtgtctctaatcaacacagggaaaagtcattgacaggaataggtagcttacttttttcctatttagtccaagaatgcctaatctctgaatctgcaataactaaagttgaaaagatgcttggtattgtttacaaacttacagtctgtggaaagcagccatttttattggcagatctcacattttgtacctcagtctgatcaattttaaatataatatagagtaaacacattagaagcattttgtgctaggtagtggaggtcaaacattttaaaaatctattaatgtaagtatttaagcacaaaaaaagaaggcaaaatacagaattgcttctaaaaaacactttaaaactaataagtaaattctttgaaagtgtgaaacaattacctcagtgtgtgacttacactttttcctggaatgtgttgtttctggcaggggagcaggctgagctgggagagccctgcctgctaaagggattactccgctctggcttttgggtttattgagtcatctaggccttcttattaaatggcagctttcaaatgtacacacacctgcactcagcaccctaaatactccaaatgcttgtttaacttttctcacacccagagtacctctcccatctagtgtagtcaaatggcattgagttgtccacattttgcttgttctttctctttggaattcagttggaatatacccatttatgtggttgtgatgctgccagagacagagtgttttttaaggtactgtactgctctttgctctgtactcagagaacattcccagtcttagctcccactgtgcctaaatgaaggtttatgtttctcaggaaacattaactagattggaggtcccgccgggcagagctcagggaccatctcactgcaggttccaggccattttgcattggactggggcagtggcttctcatttttatactcatttggcctgcagaggccaacacttgtttagctttgcctcctgcagagctcagcaaggttgtggacctccctgagtgagaagagggagagggaaaaaaggaagcctaaatcaagacactaagacaaaagaaaagagagactagaaagaagagagtgaaggaacagaggagaaagattaaagaacgaagcatgtgtccagtgaaatgtggtagaagctaaaaaacattgcctcagctgtctttaggggcattggttccacaggctgcccaagtctgtttcatggaccttagtgtattcatgaggtctctctctctctctctctctctgacacacacacacacacacacacacacacacacacacacacacgttcattcctttctcagtctctggaaatcaaaagcagaaaaactttctttacttttgacatcttagatattattgtgtaaccattgtgtgtgggtgtgtttatataacatattctattaatgcggttagcactcacaacgggcttactatagtttaggttcatgtaaagccttttacctgggtgtgcttgttcattcttcccaacaatgccaggagtcctaactcctattattactttccctttactgacaaaaaaacttaggttccaaacggagtagataatcattgagagagtcttcttagacaccctccataacaagggaaaggacaaacttcttagcccatcatttgattctagctgcttagttaagatttgtgtcaatgttttatttcttaattcttctagtttacccacccttttccaaatgtatttttccttttctttgttctttgctcttgctcatggcttttctcattccctccatctatactgcttttattcatccttagaatagataaatatttaaaatgtaactacaacatgatgatgtagctctggacaggatactgtacctcttcttgctcactgcctagcagtggagacagatgtgcacaaatgtagttctaaattaaggcagactgtgcgatgaatacaagagatacagaaactgggagagggaacgttatttcaatctgatgggccctgggaaggcctaagagaagatggattttgtggaggtctctaatatttggcaaaattggtagtagaaagatgttggaaggagagcattcctaacataggaaatagcatggtcaaaagtatggaaaagggaaaatatgagggacatcgaaagtgaacagtgaatagtttggcttcttgagcatacagtatccatgtgtttataagcaagagatgaggacttagtgaaagatagatactgaaaaagtttgacctatatactggacagctttggatatcaggctgaagagttgtgttttactggtgtgccctgtgtgtttttaatgattgaatttggtcatagaaaacagatggcaaaggcaggatgaaagaggaagaactgaaagtcaagacaatgaattaggaaactactacaataatgacaggcaggccgaggcaaagcagtggctgtgctctaatataaggaaaaaagtaagagtgatagtctggaagaagaaataataggatttggtatctaggggatggagcctgagggaagggttaacgatgacttaaaggaattgagcatgagcagttaggagaatggtattaccattaactgaggttggacacattatgataaggaatagctttgaaagggaagataattaactctgtttagtacagtgaccttgatgcacaattaataagaatatctaggtgtgtaacctgggcatagatatttttgtaacctccccaggtgattctaaagtacaggaaagtttgagaacaaagatttagtaaggaggagaaacttgaaaatcaactctgtgttcttgtgtaacagttgaaaatgcaagcctgaagctcagagtagaggtcaatgttaaggatgtaggtttggtagtccaaatagaaataatagctgtaaccttggaagttgattttaacaagagactattgtgtgagaataaagtagatgtgcaatagaactttaaggaaagcctagggtaattgagagccaggataccatattaaagttggggattaagtgagaatctacaacctgaggagtgaaactttcaggccctgttgcccagaatgctggcagctggggaatggtattatagcaggtcaaaggaacttttcatggagcgagagtgaacttagcatgtttatagactgaagaataggactagtgaaaaagggacacttgaagaagatagtttcagggacaagaaagatggatagttattgctacaatgattcagacaaggaaaggaagtgaatcagtggatctgtgattttcaggaaaggaggatacatcttctgagttaggacagaaagagggaaggaagccaaagaatttagaatgaagacaaaccccatgagattagtcagtggagcaattatttgaatagagggagggttgaagctgaggagggactagagaacagagtaggagtcaaatcctatcctctcaaaagagatttcctaaaattttccagtcctgtgtgatcactgtgccctctaaacttctcatttactgtttgtaccttacatttggtgattaatctcacacagccttgtaaaacaccagtttcattgtggttttgaatttctgtttatatctttcataattaacttttcaagtgattaccatccatcatgaccgcaaactccttggggcagcaactacctcctaagctttgttttactcactttacacgttatttcagctttaaaatgtattttagtaaattttgtttgattataataatatcatgtgtagttataatatcctttttaaagctaaagacagaaccctactttatcatctcatctttcatgatactttatcttagctgtgtaaatcatggcacaatcccatcttaacatctgttcttcctttctacacttctctcccattttctttgccacttgttattttttttgtaaataaaacaatctttaaatcaacttttagaagaaccatttcacctattttttcccaaataactaggcatttgtaccttaaatatgtgattttattatagtgtgaatttattattatattcatacttccttgaggcaggtctagttggttatgttaatagattgttagattttttaaaacctttgtttaaacagccttgctgaaaggatatactctgagttgcttctttgaaaaacattaaaagcatctaatatgacttggtagttgaccagcacactggttgatgaaatttgtagtctttgctccaaagctctctaacaagattaggtgagattgaacttgagaaggtaaaggtctctaaattgacataaattcaaagggcagaactagatcataccactatttgaatcgctatcaaagtctaatttctgacatattatatttggtccattgcaatttgtgtacatacacatccttctagtaaatgatgaatgaggtttagctaacataatgtagtttatacacttctagacatttgtaggaaatatatgattggggagctctcttctttgtaaaatgacctgggtcgcttttctggaacacagtctctctgttttatactagacacaaacacaaacactcaggcatttatttccctgctgtctttcacttgatacctcgtgtatatactcaagctatcattagatagatgacgagcaaatacggaatttcactggatgctttcatgtggctaaaaccattcatttttaagggaattagaccatttctaatgggaatttttggtccagttttgagactagaaaatgattagttaagcttcatcaacatatttgaactttcagtgtttaaaccttctgaagtttattcataacttgaggggctatgcattttgaattatgaggaattttggaaaactcctctgtctcatttcttttcttcttttctgctgctcatccccaaagctttcatttcttttctagctgaaagtaaggtaataatagtatgatataaacttgtgattctgatgctaagcgggctcaatagcatcagtgataatgactgttgtagggtaatgccaacttgcttactgtgttggaattttcctccttaagactttggaggttctcttacctggcctgtcgtacacccagcaagcaccttcacactgaccacttttttgatcacacattgttcctcttcttaacgagctcttctgagaggtgtatacacatgtttaaaatggcaactttctgggcaccactacccagcttttttaatgaagttcttgggacacaatgtttttttctctcaagtcaattagactaaatatgactgaacagaaaacaaaatgtatttttcaaaattatcatcaaatagtgctgctactaattttggttgcattttagagtgaaatcatctcatttcctagtgagaactttttaactattactattaatcagtaattgaaaatttcccctcatttttggtgaaggctaagaattattaactgtataatacaggacaaagagaacagtaatgtgaacaaagatatcgctgaataaaaataaatttgatattctaagtgttcttccttgttattatttttgtattttttccaattgtgtggtggttttcagttgaagtcctgcttcagacctttggcaaatagcatcttttatcattatctacagatactttttgtctcagttgtacacaaaaagcttaatgactatgctccattggctaatacacaaaagggaaatcaggtagaagagtttgaagatgaaatctctggaaagcctgcattttaagcagactttctctcataacagtcttgtgcaatgccttgaaatagaagctcttgttttgtgtaattttccaaggcaatcaatagttctttcttctcataagtggtaaaatttgatattaggaagtacagatatacttctcatcataaaagggagtgtgttggggatgttgcactaatgatacaatcagcaacagcagtatcaaataatgtttattaagctttatttggcaggcattgtggactgcctaaccaatagccattttcctcctttgtcctaacagcatcgcctgttttgtccacatactactttctttcatggtgtgtggtccaggcgaagtggaccctattccccagcccagccagtgaatcacagttagtccatgaggcaaccataagggctccctttgcacagctaattgatgcacttctggccagtgagatatgaagagagtctatggggctttgggaaaggttttctttctcaaaaagagataaacaaggctgggtgcggtggctcacacctgttatcccagcactttgggaggccaaggcgggcagatcatgaggtcaagagatcgagaccatcctggccaacatggtgaaaccccgtctctactaaaaatacaaaaattagctgggcgtggtggtgcacacctgtagtcctagctacttgggaggctgaggcaggagaatcacttaaatccaggcagcagaggttgcagtgagccgagatggtgccgctgcacttcagcctggcaacagagcaagactctgtctcaaaaaaaaaaaaaaaaaaaaaaaagataaacaagaagaaaaggttccctttcaagctctggatgctttcacaagggtaacaagctgaggtgctatagccattttgtcactataaatggagctaggtcaaggataatgcttaatatgccaaggatggcagaggggaaaaatgggttctttatatcattgaacagctgaatgaaccaactcttgaggtgtttgaccttcagcacttcttataagttccttcttttttttttttaaccttcctctagttggagctgaaattttctgttattagggacaaaaacaaattctctcttaatgaaatattgtaatctgttgagtattatgtaatttgaatatttctctacctattgaatctcacaatacttccttttacatgtttcccccaatgctaaaccattacttttttttttttttttttttttgagacagagtcttgctctgtcacccaggctggagtgcagtggcacgatatctgctcactgcaagctccgcctctcaggttcacgccattctcctgcctcagcctcccaaatagctgggactacaggcgcccgccaccacacccagctaattttttgtatttttagagagacggggtttcaccatattagccaggatggtctcgatctcctgacctcatgatccgcccacctcggcctcccaaagtgctgggattacaggcgtgagccaccgcgcccagcctaaaccattactttttaacctcttctcaacttaatgctacatggtgactttgttcacactaacgctattaaaattattctcatcaatgttccctcatgacttcttggttaccaaataagtccctgagcctcagattcctttctataaatcattgattggtggcttttaattaagaattattagccaattattaaaaagacaaaaaataacagatgttagcaagattgcagataaaaaggaatacttatacagtgttggtgggagtgtaaattagcttgatcattgtggaaagcggtgtagggatttctcaaagagataaaaatggaactaccattcaacccagcaatcgcattactgggtatatatccaaaggaatattaatcgttctatcataaagacacatgcatgtgtatgttcactgcagcactattcacaatggcaaagacatggaatcagtctaaacgcccatcaattgtagactggataaagaaaatgtggcacataaacaccatggaatactatgcagccatataaaagaaagagatcatgtcctttgcaggaacatagacggatctggaggccattatccttagcaaactaacacaggaacagaaaactaaatatgttctcacttataagtgggagctaaatgatgagagcacatggacacatagaggggagcaaaagacattggagccttttggagggtggagggtgggaggagggaaagcattaggaaaaataactaatgggtacaaggtttagcatctggatgacaaaataatctgtacaacaaaccccaataacaggtttacctgtataacaaacctgcacatgtacccctgaacttaaataaaactaaaaaaaaattagcctcttttttcaaactaaatcttacttataagcccaacatatatgtatatatttataaacagagtggcatttttcagttgactcagtggaatttttgagttttataaactcagtggaatttttcagttgattcagttggaatttttcagttaactgaaaacctgggggctttgccctttgctcactgtcccctgcgacttttgtagccctccctatctctgacctctgcaaagctcacaggtaccatgggacatagtactaaaactagcctctgaatttaaccttactgtcggtgcctctcctgcctcttctccatttgcactttatgtgcctctcctatccagaatccttcagtggctttccattgcctatctataaagttcctttctagccttgttcctttgatgctcccttttcttcctttgccatagccacatgagggtacctctagtctccaaaacgtcccagtttatcttttgttgctatgctcttcttgttcagctccctatctttgctcatctccacctgtttaatcctccccattatcagggtttatctcggtggtctgtctgccacccagtagccatctataccaaaatgactctcaattttatcaattcccacagcatttgtacctcatttatagcacttatcacattctgtctttgaattttgtattaaagatattcctcaagctgcattcttcttaaggtggggaaccatttcctgttcattgttctgcacactgcaatgctcagcgtaatatatccctcaaagactattcttgaacaaaatgcttgttgagtgacaaacaatttataacacaaatcaaaacccttaaattacgtgtgtcctttaggttgttttgttttgttttgagacagggtcttgctctgtcacacaggctgtagtgcagtggcacagtttcaactcactgcaacctttgcctcccaggtttgagtgattcttgtgccttggcctcccaagtagctgggactacaggtgtgtgccaccacgcccagctaatttttgtgtatttttagtagagacagggtttcgccatgttggcaggctggcctcaaactcctggcctcaagtgatctgcctgcctcagcctcccaaaatgccaggattacaggcatgagccaccacacccagcccttcaggtcattttttttttagttctttaagcgtttgttccttttttgtgagttgattcatactctttgagattacctaggactaaattgatttaattaaatttcattatatgatagaagctagaacaattaaataaaacacagggaaagctactttttaatgcaaaatattttatatctttgcatttcacagcctaaaaaagaaagaaaaacaaagcaatctactatgtctgtacttggaaattttatttttacttttttctaccattaaaaaaatttttcagtagctttagggataccagcggtttttgtttacacggatgaattgtatagtggtgaaacctgagattttagtgtacccttcaccagagtagtatacattgtacccaatatgtagttcttttatccttctccttcgtcctaccctccctgcttctgagtcgccaatgtctattgtgctactctgtatgcctttgcatacccatagcttagcccccacttacaagtgaggacagaggtatttggttttccattcctgagttacttcacttggaataataaccctcacgtccatccaagttggtacaaaagacattattttgttcttttttatgactgagtagtattccgtggtgtatgtatgtcacattttctttatctactcattggttgatgggtacttaggttggttccatatctttgcaactgtgaattgtgctgtgataaacatattcatgcagctgtctttttgatataatgactttgtttcatttgagtagatacccagtagtgggattgctggatcgaatgatagatctacttttagttctctgagaaatctccatgctgttttccacagggattgtactaaattacattcccaccagcagtgtataagtgttcccttttcatcacatccacgccaacatttattgttttttgaccttttaataatggccattctggctggggtaaggtgattttaatttgcatttccctgatgatcagtgattttaagcattttttcgtgtttcttggccatttgtacatcttcttttgagaaataccaattcatattatttacctactttttaatgggattatttgttttttttttcttggttatttgtgtttctcgtaaatcctgacattagtcctttgtcagatgcatagtttgcaagcattttctcccattctgtgggttgtctgtttactctgatgattatttcttttgctctacaggagctctttagtttaattaggttccatttatttatttttattttggttgcgtttgctttcggggtcttagtcatacattctttgcctaagccaacatccaggagagtttttcttagtttttcttctagaatttttatggcttcaggtcttaaatttaagtctttcatccatcttcagttgagttttgtatatagtgagagttaaggatccagtttcattcttctactttggctatccagttttcccagcaccaatagtgtgttctttctccaatttatgtttttgaatgctttgttgaagatcagttggttgtaagtatttgcctttatttctggattctctattctgttccattggtctatgtatatacttttataccagtaccatgctattttgtttactatagccttgtagtataatttgaagtcacataatgtgatgtctccagatttgttctttttgcttaggattgttttggctatctgggctcttctttggttccctttgaattttaggattttttcttctaattctgtgaaaaatgatgttgatatttaataggaattgcattgaatctgtagattgctttgagcaatatggtcattttcacaatattgattcttccaatgtatgagcatggaatgtattttcatttgtttgtgtcatctatgatttctttcagcagtgttttgtagttctccttgtagagatttttcacctccttggttaagtatattcctggatattttgttttattttatttcatttgcagctattataaaagggattgagttcttgatttgattctcagcttggccattgttggtgtatagtggtgctactcatttggatgcattgattttgtaacctgagactttactgaattcatttatcaaatctaagagtcgtttggaggattctttatgatcaaaacgttggcaaactgagatagtttaactcatattttccaatttggatgccctttatttctttctcttaccttatttctctgggtaggacttctagtactatgttgaatagaagtggtgaaagtgggcatttttgtcttgctccagttcccagggggaatgttttcaacttttccccattcggtatgacattggctatggctttgttatatatggcttttgttattctgcgacatgttccttctatgcctagtttgttgagggtttttatcataaagggatgctggatttcattgaatgttttttctgcatctactgagatgatcatgtggtttttgtttttaattctgtttatatgatgaatcacatttatcgacttgtgtatgttgaatcatcctgtgtcctcaggatgaaacccacttgatcatgatgagttatctttttgatgtgctgttgggttcagtttgctagaattttgttgaggatttttgcatctatgtacatcagagatattggtctgtagttttctttttttgttaagtccttttctggctttggtattagggtaatactggcttcatagaatgagttagagaggattccttctttctcaatcttttagaatagtttcataggattgtgaccagttctttgaatatctggtagaatttggctgtgaatccatttgacccagggctttttttcactggcagttttttttttaattattgattcattctcactgcttgttattggtctgttcaggatttctatttattcttgattcaagctaggagggtcataagttccctggaatttatccatttcctctagattttttagttgtgtgcatagagttattcatagtagtctggaatgatcatttgtatttctgcagtattggtcataatgtctccattttcgtttctaattgagcttattcttcttttgacttttgagcttatggcttcttttcttggttaatctagctaatggtctgtcaattttatttttcttttcaaagaactaacttttcatttcattggtgttttgtgttttttcttgttttaattttatttagctctcatctggtcttttttatttcttttcttctgctaggtttgagtttggtttgttcttatttctctactttcttgaggtgtggcaataaactgtcaatttgtgatcttttagactttttgatgtaggcatttagtgctatgagctttcctcttaccattgcttttgctgtatcccagaggtttttataatttgtgttactgttatcattcatttcaaataatttaaatttccatcttggttttattgttaacccaaaaatcattcaagagaagattatttaacttccatgtgtttgtataattttaaggggttttttggattgatttctagtttttttctgctgtagtctgataagttacagaagatagtattttgattttttaaaaattgaggcttgttttgtggcctatcatatggtctatcttggagaatgttccatgtgctgacgagaataatgtatattatacagttcttaggtagaatgttctgtaaatatctgttaggtctatttgttctggtgcagtttaagtctagtgtctttctgttgactttctcccttaatgatttgtctagtgctatcagtagagttgaagtcacccactattattatgttgctgcatacttggacattttaagcagggttatttatgagtttgttagctcactgatatcctaggcataccagttatgaattaatgataagtgtgacagatgtactaatactctaatttttaaacacttaattttcatttaagtattataattgttattgagctcccagaggggacagtcaaatatgtaggtagtctcaataaggcatatatccttttaaatttattttcctgtttcctataacttttgtaagattatcattccttaatagaatgtacctgaaaatttcattaattttaataaaaattccaaaagttggtgaaagaaggaatgtaccactgtactactatctagttagttcctactatttcgttttagctacttactgcttcataattttaatgtatgtcaccaatatttttaaataattctgatgacaaggaaagggaatgttgatttgatgagctttcaaataaactataataatatatcacatgatatagtagtgataatataatgattgaaatgctttgaaagaaaactttaatgtttttttcaagaccaatattatctgttattttcactggggaggatttgactagactagatataataatagagacaaatagacataattacagacctagataattgagagcttcaaataagcccatataaccataagccataagaaaaatataaggtgctgaccctagggaccaggaagttaaagaatcccttctctgcatctgtttcatcatctgcaaatgaatgataatcctctctccctccctcaaagggttattgaattgattagatgaaatatatgaaattatcggagttggttgctaagaagacaaataatgttctatacaacatttctaaactcatatagttgctgtcagggtgggagtctgacttcttgttctcatgcaaaggcaggtggggagctgtggccacgagctgggctacagtgaggagctttgagtgggacatagaacaggaggatcatagcacccaaggtgaaggtgggcatgagaactaatggttcagtctaaagtaaagactgagtttacaacaggaagcagagagaatgaatctgaaaagaaaaacaggaagtagaacctggagagaaccactttgaggcaccaataatcagagccagatgcctcacgataggaccatgggtgctaccagtggtggtggtagtggtagggtgtgtgaaaaatcagtccccgcacaggccatgccttccacacactatcctatgattcctgggctttctcttcagtgctaaaatactggtcctatagatgccacaggttcagtttgtgacttcctacttttaagctccagcattaaaccctaaggtgatgagatcttgaggcttaaaagatacaggatctgaaatcttgaaatatgttttcaatatttgttgttgttgttagtgggaaatcattattatgatacttcgtcaagagcctttgatgctaagacctaattaacatgtatttagagatctagaataaattgcttccctgattgtgtgcttatgatttactcttgttagttctagtatccataggttaatatttgaaacatgacaattggctggtgacttaacaatgacttacctgcttatcccttttcacttcccacatccccctacttcttacccattaattctgtaggactcactttaaatcaggaaaggaaaatgagtcacctaaaatgaatatagtcagagaaagtctctggaccttatggcattgcccataaaagcctcactaaattctcttctgcaaaatatttgacacttgctgcttaaaaaccagtgatgcctctgtggggtcaagcctggagacagagaaccgtggcataatttgcagttagagaagactcagaagagagtgagagaaggaaatttttctaggtagctttacctgtttcagcatatatggccaggtctttaaacttccagttcataaagccgtattccttgtcctaataattttcatatctttgtctcctaacaagcactgagcagtaagtgggctccactgtctgtctgcatctgactgccccgactgtgttagtcatcatctgctcatggaagcatggaaaccctgggggaataagtgtttggcagagtcagcaaatgggttggtttgtgcaaagttttgggagaagagagtagagtggcaaagtgaattaacagtgataacatgagtaaaagtggtgctgaaaatgcagcgggatggcctcctatctaactattatgatttggaataaaaaaagagatcttggtaagtaaaaacttatttttagtattagaagatattcacatagtgcataatgaaaagcaagtctttggatttttgagtcaaggacctacacaattgctgagagtattagaagatacttgttgtattaggtggtcgtaaatgacaacaaagcacaggactaataggacagaggaaaatgtgctgttcaagaaaaatagtcttcttttcttaaaacatatgacatttctgcatcctgcatttgccatgatataatgacccattaacagaaaagaaatgaaaaataaggagtcagcatggttgatggttgttacctaagcccataataacattttaaattgcttaaagttgcagtctcctaaagagaaaatatagttgttgagtggcccttttggctacctggcaagatgtataattcaaaagattcaagatttaattcttctggaatcttatttcagatttcctatgtaaaagagtcagagcattttatatattacagaggagtatgagacaattaaggccagaaaaatataggcagagaaatataagaaaacatacttctttccctgtttcacaatactttggtagagtgctaagtaagacaaacaaccctataattaggaagaaaattatgagaagttatttttattctcaaaaatcacattaatggctttgtctgcagctcagttattaccaattgctattaacttgttggcacaaacaagcttaaaatttattttatattctgtagtcctaataatttttttgaaaaagtgtgacattcaaatcgtgtaattaaaacaagtagaataataaacatatatttatgaagggtttgtgtgtgtatttgttttaagttgaacagataattcctagtgattttgtgagtcatacagtgaataattaaaataaatttaaattcaaatattaacatttcaatttccagtttggtgaacataagcaaattattataagtttgttttcaattcctgcaaagcatattaaaattaacttttcctcaatttaagtaatgtgtataagtaaacttccttcccactgtgaaaaggtttcatttattgctatttgtaaactgcctaggatagattcagagtggattgggctggaaactccttgaacagtttcttttgaaataacactacatacgttaagctcaattacacatccaaacagccacagctcacttttggtaatttattcattgatttaacatagtacccagaagagccatgcctgctgtcatttttgtaatatattatgttttaaatatactcatgctcacccctgcacaccattaaggtgtgcataaacctgtgtttttctctcttgacagctataaatgtttgttattattacacaaaacatatgttcatgttgtttttgtctaaattattctatctggggctataaagttttaatgttattagttgcccttagaattttaatgtttcactgctgtaaccttcttaggatttctgtgcaattaaatagaaactatttcactgcagcctggaagaacaatatattttatacaaataaaaaaaaaacccttcttactccattttctttcagtgtagtaaaaatatttgcctgacagtttttctttttggtctgtggaaacctcacctgtggtcatacctgtgcaccagctgtgtgtagaacatttctctttctgctcctggcgtttgttggaaagatatgagttaagcaccctttaaaccaaaggggcaatatttcaccagcctttcagaggtcattccaggtgctatttaggtgactgtatttcagcctggctttagtttaacatatacagaggccaaaagggactaaataagaagcccattatagtggcaaaatatgtgtctaacttgggttcttaccagcatggttcaaaggtggttttatttacaaatacgtggaagcactaacatttggtggagccacagagatgttttcccttatgtcttctctcattttcatacccactggttggttatacttggtccaggcctcatcgtcaagtcagataggactgcagacttacttagaaacctagtttctcacatatagaatcattgcatcgcaaataatttttattttacagaagagcttctaagtgtattctgacttgtttactataatcttaatgttggcattgtctaccccaaccccagtggtctttcatatgtacagtgctagggccgagttatgtcactggcttttaattggctctcagcttcaattttcctttttttaaaatatactaatcactctaccttcattgtcatcttcctaaaatacatgttggatcactcaaactccagctcagaagccttgccaatgaataaactcaaaatccttaaaaagatgttgacaattttccttgatccagcacgaaatcgcttctccaggctcattggcccttagttctattgcatttcctatacctcagtccactggacctgctcacagcttctccaacactactcagccgcaggtccaagtcagcacgtgtgatgtttcctcagggtgggtgctcttctctactttctgttcatccaacctctatttcttcaaaattcagttcaaatactgcttcacccattaagctcttcctaattctccctcagtcaaaattaatcgcatttgatgcatcccctcagcacattgcttcggtgtggtttctcacatatgtcatcctatgatgttcactagattataagctccttgaaggcaggaactatacctttcatcttcattttcttaccagtgcctcacacaacatgtaataggtgctgctttattggcaaatggatgaacaatatttctttctactttgttaatcttgaaattgggaatcactgaattgttagactgtcaacttaatttccctacatttgtggctttatgaacatggttatagatataaacatacctgacacacttatagaagaagagattatatatttcctcagagcaacacattatgctagtggaaaaatctttgttaataagttattttgcttacatctgaatgtaccatcaaatgctcagttcattcatcttgtatctgtccttagaggaatcaaagattattttgcctttattctttgaataatctcttactaaagtaaataatcagcgtgaaaatcagaaaaacgaaataaatgaactttgaattggggtatctcatatatcaggattgcttcacttcaatttgtagcccagtttgacttgtaagaaaattagtggaaattaatcaatatatggtattattttgtttttccaagattgtgggtttgagttgccacaaattagaattatttgctaccaactcagcccactcttcattaagatataaaatttcacagcatcatgaggagtttgttctttttccttaaacagtacccctaaaaaatatatattatggaatgagaatttctcagtcttctcaggagccttccaagacattgtttagcaaaacaatgggttagtgtctcttctcttttttctagcacaaccctcagttcatggcagtttccaggaaaggaaaacaggaaattaagttcttaaaggattcctggaagtctctcttgttaaaatcacctgtttggacttttctttgtgtctcccacacttctaagtttaacaccacatgcaaagcccagttagaaagagatctagaaagccacatttaacttcctttttaagctttcatttttttttcttttttagagtggtctcaaatggtggggattaaggtctttaacaggcagcagtcactgtccacaaatagtagacctctctaattcacaccattttaattacatctaaaatttctgccaattatatggcgaaggattatatggcagggcaaaggacgcggggtggatgtggagcctgagcagctttctcttttagaaacagaagaacctgtaatggaaaaatgcaacagttgttgaagaatggagataacagaagtggtaagtcaaagtacttgattacacaataatcttccacagagtgctcattactgctaaataattgactgtgttgccaggtttctcagtgaggaaagggtcaaggaggtcagttatctggtggtaatgaccgtagcagtcattagagggtattaaagctattaagaatagaagtttaactttttattgaagtttttatttaaatgatattaacttcaattcaacttttaattgaggtgcaaccatccaaattctacagtcgggcaccaagaagtaatgaacataaaattacatgttcttttgataggttgatgggtctttattagaatttcaagggcctccacagagctgttattagacacaagctgctctgaagtcttctattagaattagggctgggtgaaagatttctaggaaataattttaacctggaccactgaaaggtttagggaaaaaaagaaaggaaggaagttctgtcttttgtttttgcctttatttttattttttttaaggtgaaaaggcctgtttatatggctagatttgcatgcatttgccaggcctttaaacataatatatatctcctttcctccctttttctcttccttccttttttcctttctctgcaactcaatggaaatagaaaaaaagtccaaaacaccagatttttttttctctaaattttaaggaatgttatctttcctaaaaattaaacacatctgtgtgttgctgtttctattaaggtagcagtatctgtgaaaagtcagaataaaatgaacactttgttaaaatatttaagttaagccaaataaaaatgaaagttaatgccagaactttaccattcgtgatttataaataagctgttttctaaataaaaataaccacccacctgcagtcagatctcttagagaaatgggagggatgtgccgtttgaggagggaatcttctattactactcctccaggaacaaaagaaagataatttcgaggttcataattttacctctgtgagccaacaaggaaggagctggggtagtgaacaatttcataaacaaaatcgtccatacctaaaaccctttgtttctttgtaatcataaactttatgaagattcgctgttaagttggttggctgccatttacagcaaagatatttgctagaagaattgataatggccttttttcctttggaaaagaacttaagctattttacatttttggtagatagccagcattttgtcatttaaacgtgtcacattactatgaaaacatcatgcatcataacacagcataacaatgtgttttgctgaagtgcgagtttctcaaaaaaaaaaaaaaaaaaggaaagaaaaagaaagaaggcagtcatgtttttttttttttttccacaatgtgaaagccatttgagtatattttcccccaagagcctgtagaactgggcgcttgaactagccacacatctgtggatgctcagctgtaagtgggtctctcttataaatgtgaggggccaaccctaagctttgttgctagtaagagaatgtacaagtaagattatgagaagttcaagtgaagctaattgcatataagcatttttttttttttttggtcaggaagccagaagaactagaacctggatttttaaatataactcaatacttcagtgtgacttgaaattatgtcttttataagaatgagaatactctggccgggcacagtggctcatgcctgtaatctgaacactttgagaggctgaggcaggaggatctcttgaggccaggaccggcctgggcaacaagcaagaccctgtctctacagaaaattaaatttttttaaaaaagaatgataatactctgccataattgattgacttactaaagcgttagtttggaatgacctcattatgagaggaaaagaaaactgcctcccaatagctgggtttaaatgaccatttctgtgtgggatctggaaatgtattctggtgtgtgaatttttcttctccagtgtacaggccaaagtaccagctctcaactgcctcttcttgttcccattaaataagttgtcacaatttaacacgtagacgttttaattgaagatctcatttcatcttaaacttgggctttgagaagatcttatttcataggcccacttcatttacttcaaaccatctttaaattggaattagaaataaagtcccagttagaatataagcagcttatttgattgttcaacattagagaatgcaagattttttttcaactataataacagtatgttggaaattaccacatgttgctattgtaaggaaaaaaaggcaatataatgcattacttgtagaatttgatgaaaaactttttaatgcaatggaattgggtatcagcattgattttattttccaagacattttgcaataatttttacagtagttcaggggaaaaaaggagatacttttggaccagagagaaaaaattcctatcaaggctgtcacctgctaggacttagaagcaagcaatgatcccaacagaagtgaaattataacctgatatgcgagcctctaatgttctttgaaaattgaggtaaagggtaggtaagcccttctacatggcatgtgtaaagtctatgtaacaatgtaaccctttcctgatacaaaggggttagttcttttaatgttttaaataatttatttttctttatgatattaatagtaatagatgctcattgaagaaaacctggaaagtacagaaaataatacaaaataaataaaatcacaactatcttaccaccaaatgacaaggttggctaacattctgatgtagtcagcagatattcttctggcttcttttgtagccattacagcattctgatgtagcattctgaagatccttctggtctttctttctactgctaatagttttgttgaatttttaaaaattcacagattacatggagagatttaaattagatcaagatattttatacttcatatttttattaagaaatatactttccatgtctcattttccacaaataacattttgttttgtttgagagatttgttctcatatttattttactaaaatttcatatggcatatgaaatacctcatctgttgtttaccatgttatttttaaaaaattattctttgagcgccccgtatataagattaagattagcaccctgtgtgtaagattaagattagcaccacttctgtgcttatgcaaacaaactcatgatgttataatgacaggttttatatttatcgattttccactttccagaatgccttcttggaaactttatgatttcctgattggatttcatgattgaatagtttataattttttaaggctgagattggttatattttaaataggttttacaaatatggcaagaaagttagtaaacactggatattacagttgtgtagttgtacaaaaccaggagaaatacatttattgatctcttgagagcagtaattaccgcatacagagattggattctatttatattcttccagtgcttcagatttctttgctgtgattgaacccagcactatagcattttaccagtaagatgtagctcatgatgctagttgagttactctgcagaaagtagccttagaataagctgttgaagttgccacgtaaatgagatgtttaaaatgattttaaaatttacaacaacattttgattgtcaatttaggtaaaggtcttaagaaagcaaatataatacactctggatgtggttaggctgtgagttgttaatgttctttcataagcatggtgacatgtagtagatcattataataccaaagaaggctttttggaccttgatgacattgtattagcattctacagagttttaggaaaaggcattttagaagatggacgtgagacaactttctcttcccaatgttaggattttcagcagtatattcattcttttccctcaaggcttataaacattttttggtgttttgtttgtctgtttgtttgttttttgtttttaatgagggaggttaggaagtgatgttgtaactgggatgtctgttttgctatgaaccatttactatacttttcctttcttgtccaggtaaacaataacaaatatttagtgagcatcttatgtgaaaaacatatgtcgaattatttttaattgcctttatataaaagtttaggagctcttgctgtatagggggatcttaactgctggaatgatcagtcaattcatttagcctttgtctaatcatttattctacgaatgtttattaagtatttaatgcctaccatacatcctaatatgttgtcttccctagactttcaagttttgtgtcatgggagaacttgggcttctcctataaaatattttgtaggattgcaagaaagaagagagaccattttctaattaaatgtcaggcaaaattaatctttaaagagaatgttctagtatcagcaaactttatgctcagaggaaatgataaatttgcagagatgtgcatctatatccaagaatccaaacaggagagcttgatggggaactgaaaaggggatcaaaaatctgggctttggaccatagaaacactgaccttttggaaaggacttgaaagctataaatgacgagcaggggcaagagactgggacaggaaaaaccaatcagagagcataaagctaagattcagactctagctttatatgttttaaaaaattccaaagaaaggcttggaaatgactttctaagaacatcatttttatttgatttaatcatttgcatatttgggggtaacttgtttgtaccaaaatgtggttagattagttgattcttaactatcactcatttgtatcacatatattttgtatgagactggaataatttatcggatcagcagccacaaagaatcagcaagtaaaatcattctaaatgtaatgctatctaggatagaaaaatcaagaaagtatggacacatgttaactgggtcttttctctgtttacttttttctaatttaatttcattttaattgtaatgaaacagtataaaggattcatatccacctcatcaattcatataaactgtctttgattcacatttcagtctttgacagatttttaagcacaaaatgataaaatcatacagcataaggcttttacatcagaaaatatggaaatagaacagtagttgttctctttaggacagagccctctatccaggcaaaacaagagatttcatccccttctacgaagtttactcattttggtctgttgctttaatttatagtgacagcatctgcaaaaagcacagggttactctggtagattgcattgttgttcccatgattcactccccttttctgtaagaggattatacacccctgtctattaccatgtgacttgcaggcctcctgtggaggaggatgcacccctgccccatcaacttttagcttggctggtatgagctttggacaatggtaagtgagcagatgctttaggagccattgcatgtctccgctagctctctggctcttttccttctgacacaagaatagcatatccaaataggagctgcatccaggaatgaagaatgaagacagatagagaaaacccgcaacccactcacagccatcctaagcaggcatgtaatgtaagtgagaagtaaacatttgctttcctatgcctctaacattggagggttgttactgcagcaaagcctaccaaatacaataaccaaaggcttgaccatgtgtttccccaacctcagcaaaccaggctgcacttcttcatgtctcccatctctaagtcttcctccaatatcgttcgtgtcacaaataaggaagcttacaaatcttccatggctccttattttaaatgtgaaacttgtctatttccaaggcaagcctatagtctaatttctgtgtcaaacttattttctgtttttactccacacagcctccatcactagttgagccagtttcctcattgtctcacaatctctacacatctgcttagagcagtagaatacagtggttaaaactagcttctggattcagcctgggactgaacccaggtcccagtgccaactagctgggtaaccttgaacaagttactcaacctatctaagcttcaatttccttaaaattggataattcaagaaggataataagagtacccaactcacagggctataatattaactgatgttaggcatataaaatgcttagtgtggtacctgtctcatagtaaatgctcaagaagtgataactggttgttgcttttatctggaatgcttttttgccttctgacttatctcaatcctaaccaaacttcaactttgagttcaaagtttatttctctatgaagtcttcccttacaatttttttgatagtgtcttttactttctcattgttgtttcctgtgaattaggctatccctggttctaatcttcttgaaggcaaacagtgagttaaacctactctgtatcctataggctgaggacatcatggctatccagtctaattaatcgataatatttaccctgttgaggttattcattttgagagccagttatttttttggaggggtggtgatagggagtaggggtgcagtcagtgcagaaatggccatagttttaatagaatattacttttaagcagctctgaaaattgttgacatctgtcacgtcatccaagtcttttcctaaatagacctaaaatttgaaagaatcctgtagttataacaagaggtttggtgttaagataaaaacatattaagtgaggcttgtactgggattagttttcttttctttttttttaatttttaatttttttatttcaataagtttttggggaacgggtggtgattagttacatgagtaagttctttagcggcgctttctgagattttggtgtacccatcatggggttagttttcagtgtaaactcaagagtgaccctcagtattgctgagtttaatcaggggaattttgaaagagaagatcattcctagctaaataaagtgtatgttctgccaaggtcaagttgtattatttgagacccactgctgagtactttattaattattttcagattggaaaataaaattacagcttttccaggaaactctgggaatcaatttattttagtaggggaataggagcaaggaaaagcagcttgccaattctatgcaactgtgaagaacagggaattacgaaaagcttgctgtatgagtcatagttagagtaaaaatccttgcttcagggattaacatctacataagttatggacaaaataagtaactggggctccatatggatattttattgtccattctaatttgtatcaatcactaaaaagaaaggatcacatgatacaagcatatcactgatccatctgtaattatgaaatcgaaagtaattttagaaagtactaccctcaacagagaactcatttatttatttagctgtggctaggaagctgtcctagagctgggagctactgttgtagctagattagattaatgaattaccacaaaatctgactgaaataacactggtaaaaatagacagtggatatgttcaaggtaattgataattatagtgggagaaaagaatgttgaacatttttatgagaaaattatgtgttcaatggacatattttaataaacacataaagaatgttgaaaatgagtgattaattgtaacttattttttaaaagtatgaatctatgtgtgaaggttgtaggaatatataggttaaaccaaataatggtagaagagaagattacttcaaagaataggatattataaagccatgtttattagcttttgtcagagcagtgcagcaccattcaatttattcgttgctttatgttagatagttctcaagagactgaaatccactattaagcttactgatttacatgcaaatagtggtctcttctcccagttgtatatagactagtatttgtaaggactttgtattttgcccagaaatgttttgcacttatttttaaaattagttaaaataaacgtgctccctattatacattttaaaccaaaaatctatacctttaaaaataacagattttgaaatgcagcaaatggtacatgtgcagaaacatctatacatatacaacataattgctggcaatcaaattgcttgcccatcagaacaagcaaatgatgtctgttttactccagattcatgggtgctgtcttcattaggaatgttaacttatcaaaacataatttgttgtaccggaaaattactttttaaatttccttaggtgtatgatagattttgaaaaacattattttgatgtgtgagtttaaatcaaggcagctaaattagatgagattgagaagtaaatattcgagttcttctatatagataggtgctgagagtggcattcgtggttcaaagttgggaaagttcctgctagccctacaggtactcatagctgagtgtgagagagtgacatatagctctgtgctgtgagtgcagtgtggtaagtcataatggtagagaaggatgtctacactgggaatcacatagctttctgaaagggtgtgctggaatcaaattttaaagaatgaataaaaattagtcaggtgaaaatgccttcagaaagtgttcagcatgacactagcaggaaaacaataagtaattccactgggctgtaggagtaggagtaagtggcataagatgaggccaggaggcaagagaggagcagactgtgaacggacttgtgtgacaccactgatagttaagaggcacttgtgaaggtacttaagcagggggtggcatgatcagctgtgcaatttagaggggtctctaacagcagtgcagaggatggttgggggacacaaaatggagtcagggaaggcagtgagaaggtggagcctcaaagcagtaacgctgacaatatagagaagacaggatggatccaagagatgttagggaggtaaaaagtccttggcctagcctatcatctctatttataatttccgtatctgtaaaatgggaatactattcctactgtgtactccataggttgtgttgaaaggattaaatgtaaagcaccacttaacatagggcctagtacgtagaatacatttcataaatattagcttatgatatgtcataatacatcagcagaatggggtaactgatgggaagaaagcaagaatgtagtcagcgcaggctgttgaagaagtaatgagtgaatagcattatattctgagataggtaattttagaggaaggattgattctgaaggccagaagccagattgtagcaggttcaggaataaaatttagagtgaagaattatagaaaagatagatgactctaacaagatatttaactgtgaagggaaggaggaaaataatatcatagccaaagggagatgtttgataagtttttttgttattttatttttgtttttgttttggggtatttgtaacatataagactatgtgcaatcaagtcaagagtccagaagtagtgacaaggggttgattggtataatgaaccatgagatctaagttgaaaaaacaggaatgcagaagagagctgatataaaggcagggattagagttacttaggacctgtctggaaagaataagtgcattaacaatgagattagggtggagagtgggagttgggagaatcagtttgtagttacagtgtgggacatgggagtttacattctagatatggcaaaaatatgataatgggagttggttgcagaatggtgtaggtcatcggaactgaggaagccaagaaactgggatgtgggaagaatcaatatcacttacactggaattgtcggaagcagaatgggagtgggtggaggagggagaaacaaagatcccagggcaagtgccataatcttcaaccaatgaatccagtagtgagtcacacagagacactcagtatgagtttcaaaggacatatttttaaattagggtaaagaaacagtggcttggaaaaggctataagaacacaaagactgactgtcttgtgcatattatgatgagtggagagaggaagaccgagcagcctctacatctaaggaaagggctagtggggatgtcaagggggaatatgagctgggagcactacttgggtgagagtaagtgaaaagacataagaaggtctctctctttgagtactgatgaagaccggcaaggatgagaggcatagtagagttaactggtcccaaacttccattctgataagggcagaggcactggagaatgtcagcagcctgtggcctaacggacaatatattcaactctattttgtatgccagtgttttgtttctttttctcttctgcttccagtgtttttcctatttcaccgtgtattagcatttcagccagatatttgagggagagaaatagtgagaagaaatgagcatacaatcaggagatgattgcatattgtcatgaaaccttaaaaaattgtttttgttaaataactgctgcaaaagttgatattatctaatggcctgatccaaacaaaatggtattataagtaggaagaccgcttttctttctttttttctttctctttccctctctttttctcctcctttccatataagacacatatattgagttttaactaccaaagcactgttcttggttgttggtagggtagagggtaaagggtggtatagaatgaacagaacctggttcctactcctaagattgttatagataagaaaacagacttgttaatattcataatatatataactataatatacaacataatataactataatgccagaaaaacatagactaaaatgagggaatgaatgatatcttatggaagtataggggaaaaacaaagaatatgaaatgctttatgaattagtgtgttttagtgggaattttggttctgagatagcaataacacttcctaaatttcaaaatctaggtgacttcatatatatataggatttactttggttttctttcaacagcatggataattgacatacaaacaatatatgatatttaaatgctattgctattgagtggttcacactaatgttatgacccattaacacttaggaataagccctgaagatgattaaaggagttatagatgattcagaagtatctgcgttgtttttgcatgaatgtacgtgaacttatggtttgtggctaatcattgatatgtgcttaaagaatagagatatttgttctcagagaatagaaggtttcaagtatatgtcagatttttagaggaaggatgctatagccatcttcatctatctcaagacaagagctaatgattaattgtctatttagcactattggggtgacagtaagtgaaatgtgtctatatagcacaacaatcccaataaaaagaatcattcatatgtgtatttattcattcagttgtcaagggttcattgagtatcttctatgtgctggaaatcacaccaagcttttgtggaaacaatagtgagcaaaaccagacaggatttgtcccctcatgaggcttgaggaagatagagtgtaatcacattttcacaaataaacaaaaaattgcacctgtgaaaaataccacaagggagaagtccaaagtgttagaagaactagtagttaatttgatccactcagggaggttaggcaagtgttcaccaaggaagcaaaatggaagatctaaacaatgattagacattaaacagggaaaggggctgcggactgaaaatgtcttcaggctgaaagagtattagtgattatgaaactggagaaagaccatggcactggaagagagtgcaagtaggactgggtgtggggtgagatttgggatggaaggagcagccagattgcttggggccttgtagttcttcactctgaaggcaaaatacacagcaagtaaactccatttttgttaatatattttaccttaatatagatacatctcaaggcaaatgccttcccagaaataaaatggaaaagacattattatggtagagtattttaacagaatacaaaaaataatattcttcattttttttattttcaataaaggcaagatagcacacctcttcttcactcataaaataaataagaggaaaaataagatctgtagctcctatcttgtttatcctaatcaggattagctttatcctaatcaacaatcttatattcaaccttaatgatatttcattagcttctcagaaccacctttcctgtctaggtctaattatatctaatgtaatgtatctcaactcactatattaaatcatttttaaaaagcattttaaaaacattttaaaatcactccagagctttgatttaggccctagagaggaatgagttctgttatttctttttggggtccatgatctgccaattttcttctcaacgtgtcttttattctcatattttaaggaaatgaaagtaaacaattttcttttgtaacaattgataaatgtctatgtaaataaaatgcaaatgtaaacacctgttgtaatcaattcttaaaataagccagttattcaacatgcctcacattgtaaatagagaccaacttgctcttgcctgtgctcacattagcccttacagataaccctcgattgactgagaatcttaggtacctccagtagtatattctgatatccttttatactccaaagagatcaaggttctaaatcttatgaatgctaagcttcaaagaatgtgattcagaaatgacacagaaatactactgagaatctgtgtaatagtagcataggactctgttacagaaatatgcaaacaaaaatgtacaaacaaagaaatatacaaacaaaagtctgaagatgtaaaatacataagtgaggaatcattagctgctgccatttccctttgatgaccttttggtgatgtgttttcataaactactgcaattggatgtaccacctagagaatcctcagatttctttcaaggcacatcatggataccatatttaatgagactgcaggagaaatagattactgctcttctactctctggaaggtcgttgtgaatttttttttcactgaaaatgttttgggactgataaaaacatgcccattctccatctatgatggtaatgagtaatcaggtgtgcatttgattaaatctggtatgcttagtgttcagagggtagaactgaaagcaaaagaagaatgcaaattatataaatggaagaagtggaatatacaataatatacaatacaagaaaggaaatcagaaaactaggaccttttagccaaagaaaaagaaaattttgactgggtgtggtggctcacacctgtaatcccagcactttgagaggccgagatgggaggattgccagagctcaggagttcaagaccagcctgggcaaaatagtgaaaccctgctaaaaaaaaaaaaaaaaaagaaaagaaaagaaaagaaattttcttgctgttttttaagtaaagctgaaggacttatgttaactaagtctattggacttaagatttgggcttgtttctaagagcaatgaacagaaacaatggcttccagaggacaatccttgaagactggtgatggagactggttgaatttcatgtggtccctaaattttaccctgagagaaataacaagagctacaattggaacttaaggaaaggccagtttatttgaggaaactaaaaatggtgtaatttttaggtatttccttgataaaattgtgaagaatgggtacaaaaattccatctaaggaaaatgggggaggggaacacgtttttaggggattgcattttaatgtggaaagagaaaaaaatgaatattcttatgctagaagttgtttttgaaaatgttctcagtgactagagatttggaaatggcaactcggcaaatacatgaaggtatcttaaaggaaaaagactgttaacattatttttccaaaagtataacatcatttacttggaggaatagaaatgattaatatagtcttcttgttcagggaagctattccacaagataaaaggctagtaatctaataactagcatatcagtattattttatttgctttttcctgtttgcaaaataacttcagtgctatcttgttattgttgttatacttggctagttatacatctatgataagagaacataattaatgtgaaaaattataccaaaatggttgtgtttattttgtgtcactttagcaatgccccttcaggagtgctcttcctattttccacttgcattcaataataggcttgcagccagtggcattgtatttacacagtttttgtcaaaacaattttatcgctaatagattttgatctacgttggctgaaaacttctgtttctgtttaaaactttaatgtaatttcatgcgtctctatttcaggcaatataaaaacttttgaacttacatatacttggcagctgtatagttttttctttcactaagttgatttattttttacatagagggaaaatgtccttaaaattaggcatctcatttttaaatgggctcagaggagagcaacaaatttgagcatagtctgtttcgttcattcaccgcagaaaggagcatttaaaaaatactccacatgctgtgaccttcaggtgattagaattggttacaaatataaatgaattccccataaacattaaatgatccctcaagaaaccttatttgagaatatgtagagatatattttcatttcgatgcacaaggatttacatgtgtgattccctattaacattactcaggtaaatcccattaaaaaatggatatgcctttgtgtgtataaatttatacatgaagcacagttaaagtatatcagtattaatactgtaccatgggaataccatatgacaaggaaattggcaatacaattagagtttcacatagtattagaatgttttcattacaataaaaaaagttttcatgacagcataaaagaataaatcgagacttactaggacaactagagcaaatctgtacatttcaatataactcttatgaaacaaatgtaataagtaagattaatgctctgaatctcttaaaagggactctattaatcattgtgttgtcctaatggatgactgaaatcttctagccctgaaagtagaaagcaggaatcaatggtaaaacccatctaccaggatggatattatcttgagaaaggtattctgtttgccaccttctcttctttttgttttgcctctccttcttcattttcttcatacattcttttcttttctttttttttttagacggagtctcactctgtcacccaggctggagtgcagtggcatgatctcggctcactgcaacctctgcctcccgggttcaagtaattctcccgcctcagcctcctgagtagctgggattataggcacccaccaccatgcccagctaatttttgtatctttagtagagacggggtttcaccatgttggtcaggctggtcttgaactcctgaccttgtgatctgcccgcctcggcctcccaaagtgttgggattacaggcatgagccaccacacctggcccatacattctttatcacctgcttttctccttttcccttttccttttctccctcctgatttatgagcatgttttctttgttgttgtttttaaatatttgagctatttaacaagagttacaggttttccttatgccaactgtatgtcatcaggaagacataaagacagagacgtgtcctttatgaaaatggacatgtgaactgtactgaccttgatacttagtcttgattctctgctcagactaagccatctgagatagaaattaaaaatgcatagttcttcatcttctgttaggattcaatctgtaggcttaaataaactcataatgctgactgcagttatttgccttttccccctatttcttgtagatatattcacctgacacactgaaatattaatgagtcttgtgatgctcatgtgtgtacatttagagagcacataattttgacttatgaaagttactcagttgcagacccttgaggatgagacgtttgctggagtagaccatttctaacagatcatttgatgttaaatggtctgattttgtttggtgatcttctatttgccacagaatgatacaaaggcactgtaagtgcaatgtccacacagagcttagtccaaatggagttggagttattcttcaggaatttgaaggggtgttaggaataagaaattgctactccaaatgctgtcagataatatccagagaagtgacattttctgtgaaggtcattgctctctctctctaccaagtgtatctaggctagcatcagagaggaaagctgtcagtaatttctaacctagctaggttgtatctggcaatgctggagcaaagaattaacatggtgctggtttcttgagacatccatttgatctctgtaaatagtgcccaggggagtttgtttctaggatgttcctgagagttctgctgacctaggaagtaaaaaaggttttaagtactcaaaatcttttttcctagtttgctataaagttgcacaaagtctgtataacaaggccgtggatggctttatttctctattgcattttggggaccaacattttttttaatcccttagcctctgtttctctctgcctctgtttccttttctctattctctctcctcaccaaccatcacaaactgaaatgtctgcatttctctaaatatataatttatttttgtccttctcaattaatgtccctgattgcattcacaaagagctcaatagttctccatatgattacccaataaaattcccttcagtctttgtcaggatagacctctgcttttctaaaaagccagcatgatatttctggtctttgacagactaacgggtatatataccataatcaatggatcattcaaacactgaagttacaagccagtcctctctcatttatggatttatttctgtgaccagcctaaatcttctatcatctttgctataaaacatgcattagtacacagctaaaggtggtgctattatctaactaaagaaaaagaatgtttattttttatagggacctgatcttaaaaggttagattctatttaaattttgactctgtatataggaaaattaggttattaaataaaaacccaataattttttgtatatatagtattaggcaaagctatttcgtcctagaaggaatacacttaaaagagcaacgtagcaccgaggacattttcaacctcgaatattttatgtgaatcccattaagctatcagtaatgtttgttgcatttattttcccatcattgctgattgtcaatatatttgtgggtaaacagacaatctatttcataactgggctcctcttgtcatttatgtttctattttttaaatttatttattaattttttacagacggagtctcacttgttgccctagctggacttgaactcctgggctcacgtgatcctccttcctcagcctgctgagtagctgggactacaggcttgtgccaccacacccacctacattgtatatttcttgatggcactgcctagaatgagtgacaggggaacttactcctgtattgatgagctcacatgcctcaaaccagggctgtgttgaattcaagtaagtctggcaagaggagcaggtgggtgataaaggaggcagacactgtttatacacaattcttgggaacctggcaggaggatcagagcctggcagggaaaaggagtctttgagaaaaatatcacacaaggctgaatagcactttttaatggaaaattcttgttttgactctaattttatgcttagatgcttttaatttgatccacatttaatttgccattcctcggagaaagcattgattatatgaaaaactatctgctctattgctaatgaaacaagattggtttcaagggctaccatgatggcattatattttaatggtgcccacctggaaacatggaagcatgcaccactggaatcatcttatcatctgcaggccaactcttctggttgtgattgcttgatagatttgttaaagtcatagttttgaagaaaagtgagtcaatattgagtattgaaaaagtgggtaaaaagctaagtttggacattggagctataagacattataaaggaccatttaaaaaactaaaggtcagttgtgtatctgagaacacctataataatatataatacataataagatataatagatctataatagtacataacagatatatagattctcacaaacccaatcattttgacactgtgatgaaaaaataatggtattcaacactaatatgacaagtttcagagagacataaatagagattctgagtttaggctaagcaactgtgtagtaacaattattttcgttagaaatctgaagctgcacgcaagatctaccataagcgttatatcagaaaattcaaatcttttatgttttaaaaattaggctgccattattcctgaaattctaatggctgaactagcaacagtaaagatgtccagatttcaatgaaatatatttcataaattagcttatcattgcactgatttagcatgcctagcaggtgagagacaaaaacatgtgttatcttccctagggaaccttcaatgaatgtcattcgggcttcatatgtctttcttttctccccttcttgaactgatataaaattctaatgtgtgccctctagttccatcttcattgaaatctagcaaaactgctgaaggtaaggtagtggcaatggtgcatgaaaaaagggaaaaggagtacagtgattcatggcatacttgaggaaagttgcaattgttaacagctctacttttgtatatagacaagttaaaatatgtcatatatcactggtaaaaataaagttactaatcttgctagtttcttaaagttcataggaaaggcactacaactattttgatatcttgaaagtatttccatatgcatttgagggcataccatgtcactgtatcccaaaacaatagtcaagaaagtaaatttatggtagaaccattagtaatcttgacaagtgcatgctgtttaaataccaggaatagtaggtattatgaaaaaccgtgcttcatatattattataaaaatgaaatgtgacaatttccaagtatatattagctcaggccaacatcccttatctctgagtctttgttcttctgtgcaaatttgaacctctgatgcaattgtaatttcagaaatggtattcattggtcttcagatctgcagatgccagtgctttcagagctggaagattgttctccttaggcattgtttccatttggtagatgagaaaactgaggtacatgaccatttctgtttcctttaactggtaagaaaaataagagctgagaatccctctcactttcactttttgcagtcttctttttgccaatggatacatcctacccttttcccttatcttctaataggaagactgagcggaatttaagtggcatcttcagcttttaagtgcagctgtctagcaaaagctttggccaaagttttcttctgataatgaataagacaggataaaggggcatcaatgatttctaagtctttaaaaaaaatccacaatgttgaaatcagactgctaaaatctaggcaacagatattggcaccacatgagtgctaagttactattctttggagcaattgaaacacaggacttcatgcctgtgggacattaggccaacataattctagtctgcccaactctatgaaatatgccttgttattcagagcacaaacataatcagtagccctcctgaaattaatcaaacaattcaaagtatcatatgatcagcatgactgtacgggcttttctccatcacaagagtattccctaaaaaggtataccattaagcaatataaaaaatgcaaattgtgcaaaaggaagtgtaccaaaatagggctttatcaagagtctttagatcagtataattcccttaattgtcttttcatttaaagtaatgcaaaaggaggctgttagttcgcctcagtatcataagcatgagaattgtatgtgttcccatttctgtgacttcagcaatttccagctatgcattaagtcccacacttagctggaggagaatttagaaggaattgtttcaaaaacagacgttttagaaaaatgtttatttgagctggatttgcttaaaaattacaataaaaatatctcattcttgagtaatattctgtttctattggttgtctctcaggttgtggctttcttgtgaattatgatttgcctatatagaaattagtattttagcactatgttgttaataatagcggtgatcattttcagaattgcctttttggtgagcacataggagggtattcctcttggtaagcaccttaagcaagaaggattgggtcttcctttcttgtttattacacttctcactctgtcattatcagctctgatgtttagtgaaaatggtttccaattgcctagatgtgctttgacagaactgacagtagaaactgtatcttagcttacttgaatcagtgctgtagaaaagcacccaggcatgctgaagacagcttttatgaggtacattttgtcagtgtaaacattatgaaatccaacacatttggaaaagcatactctgtgtttgttaggatgaatgaatcactaatagattaaagagcacagccaaataaacttagactagtcataagcatatgtggcctaatattcaaatgtaggaaatccaattaagctctagctctccttagtttttcattcatgaggcggtacctctactgaaaaagcaaataactaaaaagtttcttttaccaaaaaaaagacattgcatttttaaaatataagtttgaagttagtcttccacagatagccaatttaattatgctaaaaatgacatttttaattaaacaccaaggtaagcataaatggatttcaaaataattaatcaaacatcaaaaaattgaaacctttttctgcttgagcagcagaaatgaaagaaccagtcttcgggtctcatagagattcaatctaatttaattctctgtcttctctaaataaacattcctaaaacctttttttcatctgggggaataaggatgagaggggtaatcaatatttctagcattttaattaaaaccgttagtggaataaatccatttaattatcagttaatgaaatacaaggtcatttacctgacaggaactttgagggtggattactagctggaataaagcagaagaacccaatgtcacagccatttaacttctgtcaaatttaaggttaaaatccttttagactgtttaacctattctctaccattttcctattatgtatgccgattggcaggagaaatgcatgttaaaacttattttacatttaattatgctacaaagttttcattaaatttctagaaatttctttatatttctaaggcataaagtgaaaagttacaataaactccaatgtaattttgttgttactttgtgtttattatttataaagttaaactgacatctttttccttactgcaaatcttatgaattgtttctttttttgtaaatatgaattaataaaatataagttttagtctgtaaatttaggatgcaaacatggaacaaatgtgcaataataaatcactttacataatttatggttaattttatatatagccccttttttgaagtaacctccatttcatcagaataatataaaaaagtaagagctggttgatcactaagctagatttgcaattggtttggtaaatggttttaagtcagtttaacaaatgacgagaaggcacaagattgtgttgtagaggaaagttccttttctttgatggtgacactggatttctctaggcagcacacactgctcatattttatatagatcacttttagaaacagaggctgaaaagggctcttgttcttcctttccccaataaagatgttgaattaattatctagggtttggatttttattttaattttgtatatttgagtttgtctcacagctataaatttcagagataaaaaagataacttgttttgggttctagttcttcctttctaaaatgaaactccctaaacactaaagtagtggttcatgcaaatgaggatatccagttttaacctgtgctgcttccccctaattcaccttagctgtgtaccatgcaagaagcccaacataacgcatagcggtttgtctttcagacataccagtgcggcattctgacttctagatgctaaatacagccgggcgcagtgtctcacacctgtaatcccagcattttgggaggctggggcgggcggattgcttgaggccaggagttcaataccagcctgaccaacacggtgaaactccatttctactaaaagtacaaaaattagtcgggtgtggtggcatgcctgtaatcccagctacttgggaggctgaggcaggagaactgcttgaacttgggaggtggagattgcagtgagccaagatcatgccactgtactccagcgtgggcaacagagtgagactctgtttaaaaataaaaaaataaaaataaatgctaaataccattaatttaccaaaattcatgtcacctaaaaaagaaaagtaaaccaatgaccagttcaaatgtgttttaactggaccagggttccccaagaggtggaataataatgaaagcggcattgttcaccctgttttgcgtttacctagactatgcatagatttttaatactttgagaaagtaacaaaacctgtttaaaagacttgtttaggctgggtagttctgataactctatttactctattttatatttttataaatgtagatttttataaatgtccttgtgactcaccaaagaggattgtaaagtttgcttcttttaagccgtaaggtaagacatatgaaggaaaaaagtatccatgatacccaattattccatctttgattgaaatacagagagacaactagagattgtgttgcaagaaccagagggctttgggacttgtgtaggttatttggtgctcctcatactgactggtcataggaatctgtgcaggcctctttgccttttaacatatattttaatggctcccaccttgggtacccactgacacaattataaactatgcaacgtctgccttgctcactcctccacattcccactactttctagtttttaagcaaggtgttcatgattattgtagtgtcacggcagccaagaatcatgggtttaataggttcatcactcttctaaattgtttgaccggctctttgtcactatggtggtaatggagtatctaattgttgcggatagtctaggctatgctatgtagggttgtattcattgtttgttttactataataatatacctgagactgagtaatttataaagaacagaagtttattttctcacagtctggaagctgggaagtgaagtccaaggtcaaggcactggcaggtttgttgtctgatgagggtccagtcttcacttccaagatggtgcctggtggctacattctccagagagggtgaactctgtgtcctcacatggcagaaggaatggataagcaagagcacactccctttgaccttgaatctttatataagaatgctaagccctcatgacttaattacctccctaaggccacacttcttaatactgttgcattggggagtaagtttcagcataaattttgaaggggacaccatcattcaaaccatagtgtggattacttgtacctctatgtattgtagaacatccacttactgttgagattattaacaataaatcattgcaatttccttttggtccccttacatcttaggcccattttttattgagtactctttttcctgccaccctttggctgtggattctagaccatctgttcttccttatatagtatgcatattcccttaggaatcttatcatttgggatgattttagctaccactataggcagtggtgtccggatctacatcttcggtttagtgtccacccactttgcatgctatggttccatgctcaattgactctagaagactgctagttttatatactgttgtcacctaaaagtttccataataattaagtttaccactttcttttctcccatcttttccgtcattttatccttccaacatgccaggctccttagcaatagaagctgaaaataattttcactgttcttctccccttttgttcccaaatgggagccaccagccaccaagaactgctgcatcttcctcgactaggcctcttggcctgattatgtttttctatttccccacctggcctaggagcccaggcctttatctatttatgtctagattactccacctgcctcttacccaattttccttcactttcttagaaatccagaatatcagggagctggattatttttaagcattcttttgccttctgatctttataaaatcacaaaatttcttacaaggaaattccatccattataatcatatcagattaaatcaaatatattttgcattttctttaaagatactgccagccatcacaccagattaatttttcatttccagccaggaagactttactctccattcaagctacagctctactgctatcccctaggcttgctcacctttctcctgagttgctattttcttcccattcctctttctgaatgcacatctctaaaatgtccatcattagagtggtgcagtggctcatgcgtataatcccaacactttgggaggccaaggtgggaggaatacttgaacccaggagtttgaaaccagcctaggcaacacagggagaccccatctctacaaaaaatttaaaaattagctggccatggtggcacattcctgtagtcccagctactcaggaggctgaggtgggagggtcacttgaggccaagaggtcaaggctgcagtgaactgtgattgtgccactacactccagcctgggtgacagagcgagaccctgtctcaaataaaataaaataaaaataaataaatccaccacttatttacagccagggacaactttgcatgtcataacatttaaagtgtggaagagtcactcaattagttggcatatatgtttggcctcgagttaggtattctgtcatcaaaaatttagctaccatgtttggccattttttctcctttcccttttatttattaataagtgttgtgatatagtttggatttatgtgtttgtcagatttgaactccacccaaatatcatgttgaattgtaatccccaatgctggaggcagggcctggtgggaggtgtttagattatgagggctcactcatggcttggtgctatctttctgatagtgagttctcatgagatctggtcatttaaaagtgtttgacacctcccctcccctcactctctcacttgctcctgcattctccatgtgacacacctgctccgtcttcatcttccaccatgattgtaagtttcctgaggcctccttagaagctgagcaccatggttcctgtaaagcctgcagaaccatgagccaattaatcctcttttctttattaattacccagtcttaagtatttatagcaatgcaagaattgcctagtacagtttgtcatcaattttcttatctataaaaagggaataataataattatcttgaagaatacaatgaaatcgagaagtattaagtaataagtttgtattcgttcatttgctttctctggtctttgtgttagtaaaactagggcaaataaaatattgcctcatttttatttatagtcatgatttgagttcaacagaaaaacatagtaattgatttccatcatttcacattcatgtaagttgaatgagtggcactttctgagtttctgcgtattaaaaacctatacagactcatagtagcaaatcagatggcccatgtcttgggccatttgggttcttctgccatgcgcacaagtctaatttgaaatcattgtaccttaaactcttaactaattgctcaaacttaaagtcattatttcagatctttattaaaaatcagactttgccctataaaatgcccataatttttagcagctatatatctgctgtgtaattttctctttcaaaaaatgtcatactcaatttaatattggtgtgttgtttgcaactggctgggggagctatgtgaagccattacaaactctagtttcacaagaattggactctgaagcctgcaccactgaaactctgggtctgtttttctgacacagtcccacagcatatttctcataccctgagggctaccctagcggatgttctgttgtggaatgaaatggcattgactaaaatgaaaattttcttctctgtgagaaaatgtattgaaaagaaaccaatcacaaatgcaacaaaccaattaaatcaaaacaaaacacacaattctgtgaattaattaggtagggtgaaatataccagactgatagtctttttaaaagataccttgtacacaattagaaatattatgggctgagccagctggctcaggcctgcaatcccagcactttcagaggccgaggcaggggattgcttgaactcaggagttcaagaccagcctggcaacgtggcaagaccttgtctctactgaaaaaaaaaaaaaaaattagctgggcatggtggcacatgcttgtggtcccagctactcaggaggctgaggcggcaggatagcttgagcctggaatatcgaggctatagtgatctgtgtttgcaccactgcactccagtctgggtgacagggcgagaccctgtctcaggaataaaaaaaaaagtattatgaaggagctatttttacacaatatataaaggatacaaaaaaatcatgctttaaggacttctataaagtcacaaaataatgtttgcagaatttgcaaccacaatcttgtttattacacaatttttgggtggtaaaatattttcatgaggaaatcacaactgagaagttgttttcagaaaaattcgtcaaataggaataagatattaatgagtaaaattgattaatgaagtaaaaatattgactatcaggagacgagtgaatatgcagcagattaggaaacaattgactgtaccaaagaatgactgtatcaccacagaaatgaattttatttcagttaaggtatgaaggccctacttacctagtcattaacattcttttattttccttataccttgatgtctccagtaaactgtgtgaaactggatgtgatttctccactagagcgtagatgcaagatgttaactgtaactgatactaagtgttaaaccatatggtatatttgaacaatttattattgaatctcttagtaaatctttttaaatgttgaggtcaagttttcaagtaactctgatgtgtcaggcagggtcctaaatatattgggaagtccttaactttaagaagctcataatttagttgggaagctaagactagcagatagatctctgccaatgcaaggtggtcagtgatacatagtggatgaatagagacatagaattggggaaatgaaagagttgttcgtgttggcccttagaggactttttggtttcatcgaagtaagagagcagattagagaaagcgtttcatgcagaagaaatatttgcaaaaactcagggtcaggaagcctttctatttgggagctggtgataaatagacaaattgcctggggaagatggttatgtagaaagtaatgagagataaaattttaaaaggagattagggtcagactggggaaagcgttttttaccaatctaacttttttgtctaggtaggttgcatggaccatattgtcccagatttatggtgatcatgttatagaatataatcagaaatctaaagaaagtcaatgtatgttagatctgtctctcttaagataaatctatctgtttttctcaagataaatatctctcgtctagatatttcagtgaaagtcagagttggttgacatgaaacataataaaaatctagccatctagtgataaagtaagtattaaaagtagaataccaacagaactaatttggatttttttaaataaatgtgtttggaaaaatctcatgcttaaaatgcactcatgaagcaatatttatagcgtgtatgactataaagatatattaaacataaacataaatctttctgttttatgtgacttttattatctgcccatcaaatttagttaattatcaaaggtgactctatttaatgaaagctgtgtcccaacaaaacctattttcttctcccacagtgatctacaaagaagttatgagattaggtacagagtattttgctcactttcatgaccactgcctgtagtatgagaaatagaagacagtggtttctctccttcttagcagttctccagatttactctgaataagcatcacctgggagtgccagccaaaactgactcacctgggaaactaagatttattcagtcctcactgggcctgggaatctgcattttagtgaacccaccagctgattctgaagctggtaatctgaagactactttctgagacctagaatgaaggggaatacatacgtttagtgtagagcaatctttcgctcataggcaattgttttaaatattattgacagttaagtaaatgcctgtgtttatacccagttaagtaaatggctcagtagttgatgctattgttccactcctacatctctgaaggacttctctaaggaaggccctatgaacttaaaacctacaaggaagttcgtgagggtttgtcacatgtttataaagcagggttctatgcttcttaaagccctggctgtaaatatgcttctctctgtttatcctgcttatacctttcctgagtgaaagcccaactgaatttaattagcagagcataaatagtactgacatatggcaatccaatatatggaattttgtcataatacagtttatagaataggggcagaatttgataaagactccacaaattcacgtaaacagaactgagaggtgtccttgcacctatttacagggtactgccctcagcgcagatccagaagaatggccagatcctgcatgatctcctgggagccctggctctgatttgacatagggaaaaaggccaagaaaatcactgtaacttggggtatggctttgcaaacccaagaaacattcatttccccatttgttagttgaaaaggagtacagagaagatgctgactcatgctgaccctgtagtggctgtgatgaaataacccgtggcaggaacaagaagagagaagcgcaaccctcggtagagtcaatggaagcaattccaatgttagtaacagcttaaagcagcaaatgagcctacaaatctgtgagtgctgctccctagctctttttctctcattacaccaacatttaccacaatggacctaatttttgagattttcagtttagatttaaacgaaagctcatgagatccaggacactttttgtcatggtctttcagatttctctgtgtctaaatattgccttatatccagcacgggcttactagagactttgttgtttttaattttgatctatctgcagtattatgattgtttttcttaatgcttaatcaggaaggatatgattactttttctgtgagtgtacatgtttttaaaagctcaccatttttttttttaccataattttatcatgtcttgggataaaagaatacaatgatctgctacatggataccatttctacagtacttctattccatataatgatgatgctgttttcattaaagtaataaaaaaaatctatacagcatatgagcaggatttgaaagttggcacatctaattatcatagtaaggaaagaacatgaatgccaattttatatttaacaaaagtcatccttaattgttggtggtcgcacacatggtagattgacaataaagaactagtctagcacatttggatcttaaacataaaacaaggcaacgtagattgttttaaaaatgaagtttgtgctagtctgagacctcaggtattaaatgtcttcagaaactggtgctttctttgatccctgagaaagataagaagaggttaggaggtagatggtcacatagataatgctactctatatagtgattgatttattacatataaggaagacgacagtctatggggatttttcaagccaaaagtctcctgccttgcaaatgatcattgagagattacaatgtaactcctgtttaaaatgtgaaagctgttggctctataatttctaaagagcatccttttttattttaatgatgttttcactcatattgtacatatctccctgtttaatattctaaatttgatgtgtacttcagaagtgatcactgttttgtgatttacaaccttggagaaaaataacatagtagtcataactttgcagttttttgtgatgcatgaagatcagattttttaatgttggttaatgctttgctaattaaagtatgcatgttaattaaagcagaggctaatgttaattacctatattaatggaatctcatgtagcacctgcctgaagcaatgggttcaattttcaaaatatctcaattaaggctgaaacttttgatttgcatctagtagggtttcaattaactgcattgaaaacttaaataacactcttaggggtgcaaaatatcagtgattatatgaagcacagtggagtttggtaggttcatttttaaagtcttctttaaaaaaaaaaaaaagcctaactatatttctttcttgtttactggccaaaattctgtttactcaccaagacccagtgaaaacaccacttcttccattaagtattttccaattctcaaccaactaccagagcttcagtttgttgttcttatttattttatattattctgttttgtattatagttagttgttagaatttgtgtcctttgctaactagaagcaccttgtctttatcacttacgaagacaagcacatttgacaagacactagcatgttttgtaagttgaagacactctttaaatgtctgtaaaaccagtaagtacatttattgactaaagtggatatgagtgaacttttagcacacgatgattccgctgttgctacattcatggctgctccaagtaaaacatgaagctgctgtttgagatcttattgcttttcaaataaaagattggcgttttcattaatttctgttaaatctaagctggaatggggaagaagttacctgttcaagtaaaaatagtgttatgaaaccaaagaacatgtgtttgtgctgtcagggatgatgttaacatcctcttttggtcctagatttgtattctgactgtactgcaagcagatctgccttgtgaccataagcacaaatactttaaacaagctgtccatctaagagagccatcaagggttggtgttatttcggaagataagacatggagtcatcacgtggtgacagctcaaatcttaaaataattaattaaaaatatagattactggagacaagtacattgtaattagtatggatatcagttttcctgaacttatttttatgtttgccaaagtcccaataacaaccattcccactgggcctttggaagggattatgagctaatggtactaaccttttcgacatctagcataatgatggtttcagaaaaatagtttccataattgaagggagcaataatctcctcaataagtatatacaaatagattacacactgatttacagtccctggaaatctgcattgataactgctgtgccttggcagactttgactctgataacttaccatcagtctcagagggctaagatttgtcttcattcagctgtagagaataacaaacaaacataagatttccatgtataaggtgtaaccgacaaggtgacacaaaagacacataactgcttactgtactgatgtgctattggcatgctggttaaaaaaaatatatatataaagaaaggtaaaagggaatcgtattgattggacaagaagatgttagctgttgtcttaatggcagaacctatgatagctggaaataagacgtgaatgtgtccattaatgaagagtgatgcaggtttagatttggtagtgagagctcacatatttcatgtcacaccggtttaacattggctagttagtagatggaataaatgcaacaaccagttggaggaatgtgacagatgtgcatatcagactttccaggatgaggcaatgggccaggtctttataacttgaagagcaaagtcaccaaagcagcctttccccattgtgccaccattaaggtagcagatggcagagcattagcaaaaagacattgagaacagctggacaacatctggtaggaagtgacaacctaatgggtatgctgggttgttcctaattgtgggcaatcactcaaaaagcctggaaagaaacttcaatgtgttggttggtgggaggaagaagttcgtcagagcaataaattctagttcaggaatttgagggaattctgaaaagaagtgactttagagcctggccaaatggattatggaacattcatttgtttccccccaggttctaaataagaacaaactttttaaaggagtttgtgaggcctatctggacctggaatctactttaggtagatattcgattcatgaatactatttaaaacgtgagattctgagagtatatggaaaggttagatgttcacagagaatatggaaatgctaattaaactggggtgagggaagtggagtatttaacaactcaattcaccattcctgtttcttaatttactatcttatgccttttctgggacctagataaaatttaaaaagctttttggctatttctagctctatatattttcttccccgccaccccccccccccaattccagccatttgtccttgtgtgtctatatctcattgctccctctcctgctttctcacaaggatcacctaacttttcatgacctctctatctttcaagactcagcactgggagagtaacatttcattttgggaaatgtagagaaatagtgacaaataggtagaaaggaggtcagaaggaacagggatagtgtctccagaaaggaatagtaggaagtcaaaatgcagagaagccaagggctcaacatgtgctgcaactccagccctaaatttctaaattactgcaggacctcctataaatcctacatatcagtaaatcgtgataattgtataataataaatcctgctgctgattgggaactagcaatcagaattggaaaggaaaaattctcacaatgaggcttcattgcttaccacaccctggatatttaaagggaaggagtgacaaagcggttgcatggtaagctataacagggcacggtaatcagagtgtgcagacaaggaatgcacgattgtgcacactgccaaaggtgcagaatcagtgtcattcctggaggcagtgggagcagagagttttgattaagtccaagactcataagacaagtacattgggccttgcagaaagtgacccaagtacataccttactcagtagacttgatgccataccccggctcttttagttgtccatgtctgtgctggcagcctcagtcagggactagctagagactggaaatcatggtttcaggactactggttagaggcaatacctaggatggtgagtagaaaagcactggagttggagccagaaacccctggttcttcttctcattatctatgtgactttggacaaagtaatttatttgacctctggcttctgcatctgctaaatggggataatgacacctgatctacctgtgcatagcacaaggttgttgggattatcaaatgagataatatacatgaaatcacaagttatgaaagtatgaatgttattatcaaagtatcaatatcctattaccaagtgattcctgatcaagcagaatgtgactctcaatgatgatttaagcatttatctaggtacctagtgaacagtgaactgaagtaggtgaacccaggattaccacagccaatgaatctgttaatttgcatactcttgcaaataaaaggacaaaatcaatacttctttcatagtataatagattatttggaatgaaactataaaatataaataattatgtaaaatataaaattttatagttctctttaagtatcctgtaaaatggcagagaggttcattttgggcatgggattctgactaacagtagaatgtttgtcattttaaaaaaatacacttctctcttaggactgattctcaagctgtgaagtagcagattgccaatataaaacatgacttcatttctcactgttgtcttttattctgacacatttcattctatctcagaacctcactcaaactgaggtcctagcagttgttaaataccaatctgaagaaaccagatgaatcatcagaatgtttcatgttctagatttgtctgattgtctcctcgtggtgtgtctcttaactttttcctctattcactattccctacaaactagaaatgtggtccagaggcttgtttggattcagattaaacatttttggcatgtgtacttcaaatggcatcccattatgccaggctatccactgtttgtgatgctaatgtggtgatggccagacacagtacctctttctatagatgagattttctttataattagcaggtaatctgtaggataatgcttgggcattctgtgaatgttctgttttccgtcagatatttgcttaagagttttagaatacattgatgattcttgctagaatcaattctttctttaggggtggtaaaatgatggtatcctaattctattatttctcccacatttttacttggcattttttcctgtagactttctcttaccaacatcagatgagctatagttcctcttttaaaaagtaagtgaaatgcttttctcgttatttaccaattttggtggtaagaagttagtgtaattgtcaccctcaatggcggcatgtttttttctcttttcagtataattataggctaattgatttttatttgttcaatatacaacaatcaattacaataattcttcttttttagtgcttatatttcccacatttgccaaaagggagcctcttcatatgacacttgtgtccttttgacagatccctattagtcaaggaatgcttctttgttttctagtacaagaagatatcccaggctcaccttatactttccctgccttcccttttaaaaggattttaaaaatagtatcttcagctcttcctagatggaaataagccatatcagaccccctgcttgcctcactcattctttcagtacatacttattgagtgtctgctgtgggtcaggaatctgtgggtgatgtcaaaagaaatctggttcatatcatactcttggggagcctaaaatctaataggacagaggagtcctgtgtactataaggtgaagagagatatgttttatattagagggacagatcaccatgggaagtaacacttaaactgaaacttaaagcatatataggtgctagccacatgaagaagataggaggagaattccaggcagaagaaacaacgtgtccaaggtgggaaggagctaggttcattcaaggaattaaaatggaaagaacctgagaatctgtgtgtgggcaaaggcaagagcagctagggaggaggctggcgtgatggacagcaaaggccaaagaaggcaagtcctggaagactcagatacccaaggagaggtatgtctgcaacacactggttgaggctgaggtcagatctttcctttaaatagattttgagcatagcatctaatacctaccattgtgttgtcttcctacataagggggggaaatagtataataaatggagcaatttttgttgaaatgtgtctgctttggacaatatcaatgttatggaacctttttataattagtcttttggcttggaagagttttcactctagcccaaaaataaagaaggagcagaaaaaaaataataactgagataagcaaaagtgagataaagcaggaggatatcattttgcttaacctgtctcttacttagaatatcaatatgcctagtggataggaaccatgacattgaagaggaaaaaaaatgtatatttgtattttttaagtctcctctgaatataatagcaaagaggtagtgagaattttcaggaacagctaagcaataagtcaagctttacaaggtctaagcagcagtgatgatcaatctatacagtgataaagaggatacaaattcatgggaatcattgttgtagagttgtgtgtatgtgtgtgcatgcttgtgtgtgtgcttgtgtgtggctttgtcacagatctaccagaaaatactgtagcttcctttaacatgtgatgaacttgtagagaaaactgaagaatattggttatgttttttgagttttaatttaggttctagagttttacttttgaaaatattactgcagtgtcagcctacaaaagaattttaagtcacaattttgtttaagaacattcctttttgggttctatgggtatatttgtgataattgttattcacattcatcatacacgcatgctcttttcaccttcctcttccattctgcctttattccgttcacgctgtgttcctttattgggtcttctctccagctgacatgcatacaccagcttctgaagctctgtgatcttctctgactgtgcaaattagggccccataggaagtctcagcttcacatggtctactcctgtctgagatccagacccctaggaactggaccaggatgagtctcaggcatagataagagaggtaaacactcaagacttggaggtactttttcatgctctactcacccctgctgtgcaaatagatttccacccatagcttttcttaaaagtgtcttgtagattaatgcatttcaatctttaagtgaagaatattgaaattcatgtacttggagatgttctgtgttaagatatgtgtagagaaaacttgaactgtgattttcctctactctcacaccacaataatcatcaatacagaagacttctgtgaccatatttgggggtggggagagttctccccatacaccaagcagtggacaccaactgagaggcctctaattcagttccaacattatctacccagagacagtgtcatatcccacagattgatggctcagtccccaagacttcccccaacccccaacacaccagtcgaaagttcggccctccagaaattctaatcaaagtgccaaacttttggcttcaagttggggttcccatgaccccttctttgggttggattaatatgctggagcagctcacagagctccgggaaacacttatttacatttactgatttattataaaggatattgtaaaggatacagatgaagagatgcatagggcgagaaatagggtaaggggcacagggctcccatgcccttcctgggcgtgtcaccctccagtaacctccatgtgttcagctatctggaaattcactgaactctgtcctcttggggttttatggaatcttcatgatgtcagcattcattcccccacagtatagggtgggaccctctcatgggagagtcttaagactcacaatcagaaaggcaggcgaacattagagtcctgctttagggcaggtgaaagcagagcagaaagtcagaggctgcccctgaggcctaacacacccagcattataaccaaggaatggctatgggagttagaagccaggagctctggatgaaaaccagtatatatcataacactgcaagatgttaatgcctgtgtatatttggtatgaattagtatatcagatatctttccaattcagcagctaacaagaatggggataggtggagatggacacatgtagtggggagcctttgtgtggaggctgttacatatgactttgagaattactagaatattcttatctaacatttaaggcccttaacttactcatagtacgcatcttctgcttccattagaattttaagtaaacacaattatttgcctttacattattattatgacttcagtaaattggttaataaccaatatattaaaaagcaaagggttttgctaagaaaaatatttttgatattttctacaaatatagttttaaataaaatatctattataagttttaaaatggctaatctgatttttctgtcttttcttcatctttatatgtttgtcatttatcagtggctcacatctcagtataatatctcgataaaatgtattttctcctttttaaatatttttatattctcatctgtttttatggcatgttactgcatgtctccagaggcacacagcatttttattttcaagtaaatttatattagttacagtctccagctgttttagatataggatcatttcctgttggtactgtttccaggacaattctttttttcccctctcacaaaaatgaaaaatgtaatttaacaaagacatcctataattgccttcatatctagcaatctaaatactttattttatttaaaacatctgtctacataatatctagtgattatccaggggtatatcattcttgagaaaggcagctgctgtcatttttatttaatttataaggaaccatcaaaaatgcatccttaatatagagtcttatgccactatgtcatatataagattttttaatgaggatatcttacatttttggtgcttgcaattaatttaggctttttttcaaattggaaaagaccatcattttaaaaatcactatggaattattttgtaagaatagtaatcttttgctacagatatcaaattataatgaaaatggtggtatgctcctctactcatgtaactagccttacacaggaatcatattttaattgctaagcttttttaatgtcatttgtctatagtgcattttcttttcatttataataaaaagtgaagtctttttattgtgatgtctttctgctatataagcagtcagttgatattttcttgttatttttcagaaaatgcatggagaaatatagcagcttctataaaagctctttgttttgagggtaatactgaaatttgcttgtagaggaacccatttataaattctgtttatcgtgcatgaccctcggagcctaaaatggagtgtttaacttttaatagattgtatcaatttaggctcagctgaatgccaaaaacaacagacacccaggtttacaatagtgtgtctaaatgagaaagtttaccttttccaagggagtaatcaaaatattcctttttggaacactaagagtatgaaagggaaatgattatggttccctactgacacactgttatgattgacaggaaaaaccaacatgcatgccacctgagacatcttgttcaggaactttctggagggtagtaaattggtgttggcacaaacacaaaaaaataaaatgacttgattcagcacttttcaattctaaatccccaaatactaaagaaagaagtaaatattcatcaaatgatcaaaatttatattgatttttattctacattagcagctcaaagtcgagattcttgacagggtgggtgtcggtttgaatgattctctttgaaatgaggatataggcactgagctgagtgctactgtgcattcctgaaccataggtcctgattattagaaccctaggaggctaaatttttaaaagaacagtataaaggcacacttgtttggttctgttttgataaataaattgttattattagtatgtaaagtaattcttgttgttcctgcttcattcttttctctctatcaccatttaaggacaactattttatagaatttcagaggaactagtgtgcatgtcttgcagtcatagagttaatagcagtgtttgccagcataattgtacttaggaaggaagtgccagttctacagggcaagagaaactaagattgtatcttcctattatacatctttgatgtttactttctaccagaaagtaaataaggatttgctgtagaggaatttagaagatgggagtaaggatgctgccatagaatataaacagaggatgcctatgtcattgtgcagagatttgctaaggaaacagtaatggagtgacatcaaaaattctaatcatcgtcttcagtccacacagtatatttgcactcccttcccaccctagctcatgacataaaatgcggaatttttaatgatttttaactacaggcattacaaaaaggagagggtggtagtagataaaagctcttcacaaatgcaatagtttgatatgtttgtttgatatatttgttcttcatgtttgttaggtggaggtgttttgttgctgttacttttaataaacatctcatctgtcattaaaatggaggaaaggatgtttttctttatgcacaaaaagaagaaataatggaaatggtgttaatgttaatttctcaactttgtgtttaaatgtttaccatttaacaaatatcattaaggaaacagctttaaaattgaatttcctaaacattatagtgaatgtttctaataatttgcaaacaacaggtcaatagaaataaaaatgaatttttaaagtaatgtattattttttacttaaatcatttatcttttgcagttgtcctgactttattagacatgagatttgtaaataaaccttgagaacctaaggctaggtttttttggaactgccaatatgatcagttttatgattagttttgtgattatgattagtcttctgataatagttttatgatcagttttatgattagttttatatcctaacctacaaagattagtatatgcagtggtctttgctgagtaataatattgaaataactttgatattattaaatttttgatatatacttaatttttgacaagggaagatatttacattttttaatacttttagaactctcttatacaataattaaaataacattccaacaaacttagtaagtctttctttggcaatatctttgaagtataatattggtcttacccttgaatgaatatttgagctactattatgtagtatagtttttctgtgattctaggttatacattccctgagggttgatactgtgtctgatccagatttgtttgtatcatgcacaatgtcttacccctaagagacactcaagatgtatttgttgaatgaataaatgaagggcctgaatcaactttactccaaataaatacattgctcctttagtcctatgactccctgctctgattctgtagaaggaagctttggcatccatgcaggactagaagaacaacatgagattctcattcattgtaataccaaatgttatttgtatttagctagaatgtagctaatcatggtatgtgaataaatgcctgtagagagtttgtttctggacaaaggaagtgcacttagaataaggtgagttattttaggaaattatgaaccaccaacaatgacaacaaaagcaaaaacacacaaaataaacatgatcttagaaaaaagcagtggaaaggtaataattctaaatcctggaatgagtatgggcactctgccaaacaaaagagtagatatttccaagtgtattcatccattctcacgctgctaatagacatacccaagactgaataatttatgaaggaaagaggtttaattgactcacagttctgcatggctggggaggcctcaggaaacttacaatcatggcagaaaggaaagtaaacacatccttcttcacatggcggcagcaagaagaagtgccgagcaaaaggggaaaacataggtgggcatggtggctcacccctgtaatcccagcggtttgggaggctgagatgggcagatcacttgaggtcaggagtttgagaccagcctggccaacatggtgaaatcctgtctctattaaaaatacaaaacttagctgggtatggtggcggatgcctgtaatcccagctactggggaggctgaggcaggagaatcgcttgatcccaggaggctgaggttgcaatgagccaagatcttgccactgtacagcggcctgagtgacagagtgagactctgtctcaaaaaaaaaagaaaaaaagccccttataaaactgtcagatctcatgaaaactatcacaaagccccttataaaactgtcagatctcatgaaaactatcacaagaatagcaggagggtaaatgcccccaggattaaattacatcccactgggtccctcccatgacacatggggattatgggaactacaattcaagatgagatttaggtggggacacagccaaaccatatcaccaagtgtagattctaatcaaccctggaagtccttgggagggtccatgagggtcttgagacctgaaggtctttccagaagaaggaagcattctggactagttgctaaaggggatactattaggaggaaagaagggaaacatagtaagtatttttgtaaggaagcaaaggaaaagacaggtgcttagatatactgcattgaaggtaaaaaagattgtgtagtaaaagaaggaaaatgtccccagtaacaaaattattaccaaaaaagtagggtttcctcccattatattgaaggatccctgtgatcttgagctagtgtggactcttccaaatacaaactctgccattgttggtgtctcctccaaaagcccaaatggctcatgaattaaagaagcttttttttcttcttttttttttccctgggaagaatagtaaacaagttctatatttcaattattttattttctgtcaaagaaaaaagtctccttcttaagggagaataaagccaacaatttttaaaatgaagctgaggcttcagccttcaaactaactgttttatttctttgtacatttgaaatcattttagatgttcaaactcagtaaaatttattcaatttgtattgagtgtcttatcacatatgctgtgctgggtgctagggataaagcagtaaacacataaacaaaacctcctgccctcatggagctttcaattcactgagggaagatggacaatataaaaaaaagtgacatgttcagctacatgtgataagtatgtaggaaagaggatagggatttctaggggtgggggtgagttgtagttttaagtagcaggtcagggaagacttggatgcaagaggttatctcagcaaagacttgagagaagtgagggactgagctgtcgtgcaaacacaagcaaatgccccgagagcacacccaccagccctgctgaagcaggctagactaggttgaggaccaaggactgaccactgcatgaggaatgtggaccaaaatctgattggggtgtgttcaagagagaaagaggaggtttgttgtaaacagcaagtataaacaattcaagtaaaaatggttttgctataatggagaacagagaaatggaaaaatgactagaagatagattggcggcaatggattatttttctttttctctctattttttttttttaccgatggaaaaacaacggcattttttgggctaatgtgcaataggaataatacagtagagaagaaaaaacttgatgcaggaaagaaaggcaattttggggggtgatcatctttgtgtaggtcagggaagtctggtaccaaaatgcaagggattagccttagaaatatggacagcttctgtagaaacagaaggaatagcagaggacgtgcacccagatgcagataggcagtagtagaggtggtgagaactacgaagtctagtatgagtgaacagggagatctacaatggtatgagttaagaaaaagtaaaatggattttaatattttcaggatgcttaacccaacaaagaattctgggacgtgaagtgataaatcagtcaaattagcaaaaagcaaactaaaaattgctttttatgacaaagataaagcattaggtctatatgtgattataaaagtgcttatgtgtttaatccttcgagttgattagattgactgaaatttcctcccccaaatgtgttatacactatattattattagttacacacacaagatcagagggaagtatatgactgagtaatgatccaggcattgaatttgggtcaccacataccgagccaaatttccataaaatattttagcaaactgcattttgtgtccttattaaattattaagtattaatttgtagtctgaatttgaaaaggagtatctctagtgatttaggtgctaaatgcatacaaaataaaggggggaaacatgctgttattgataaatagcaaagcaattgtattaaatctcagatgagaaggcagcatttctaacatgattaggctgccataacaaaataccacagactgggtggctaaacagcagaaattatttctcacagttctggaggctggaagtccaagattgaggtgtctgcaggtttgatttcaggtgaagcctctctccttggctcacagatggccaccttcttgctgtgttctcatatggctgttcctctgtgcatgcacacttctggtatctcttcctcttcttacaaggacaccaattctattggattgggacccccacccttgtgacctcgtttaacctttattgccttcttaaagattctatctccaaatatagtcacattgggggttagggcttcaacataggaatttgggggtgaggggacataattcagtccataatattatgttaaaagtttaccagaggtactagttactagaatctcttaggcattcccactatttggtatggtgggcatccagcctgataggaactgctgattcaacttcttgatgcaactttctccaagtacaccagccagtaggagctataccagcatatttggactaatccattaggcgactatcttgtcatgacagaaaaagagagatagaggaagattaaggccatcacagaaatgacaatagcttccgctggcacttcattgtggccaagatagcatacaaattttctaacctggcatcctccatcgtctatccactttagcctctatatccaaatgccccaaagctccagccaccattctctgaacatgccacatcctttcacaactctgcgcccctgaacaaatgagttactctgtctatgaagatatctatctgtttcttcacctgacaaggtcagacccattatctcagttttggctccaatgccacttctgtcaagcctctgctccatacccccaacccccaccttcaaacaataaattatttttatttctcatccttccctacaataatttcacttggacacttgtagttatctgttggcatggctctctcttctaccacactgcggtgcctcaggagaagtaactaagttttcttcttccttgttcccacagttcttggtacagttcttgagatatgagaaagtctcagtaaacatatgagtaataaatggatgaatgcagctgggtgtggtggctcatgcctgtaatcccagcactttgggaggctgaggcaggtggatcatctgagcccaggagttcaagaccagcctggccaacatggtgaaaccccatctctactaaaaatacaaaaattagctgggtgtggcagcaggcacctgtaatcccagctacttgggaggctgaggtaggagattcgcttgaacctgggaggtggaggttgcagtgagccacgattgtgtcactgcactccagcttgggcagtagagtgagactccatctcaaaataataataataaatggatgaatgcaagaatgtacaactcatccactgagcaattatttactgagcccctgtcatgttccagatattgccagggtactgggaatgcaaaatggcaaaggagacagaaacaatcctttatggagtttggggtctagaaaaagggacagaaaaaaatgtaaaccagcaaatgcaagaattttaaattttgatatgtgttatgaaggaaattaatctggatatgaaatagaggaaaaatagagtggatctacttttgataagttaggcaaggcctctctgagaagtagcatatcagctgagagctggaaagatgagaagacattagcaagacaatgttccagtgaaagggaacaatacgtgcaaaggtcctgaggcaagaaagggctgtttaaagaactagaatgtttaaagtgttgaaataaggcaaggatgacaggggcatggtgatcaagagggagactggtaggaaacgtggcctaaggtcagcaggaaccaaatatcctaggccatgggtagaattttgttttttaggtctgaatgcagtctaaaaccagctcatgttttataaagactactttggccactataagagaagagattagaggtctaagaatgagcgaagggagatacgtgttagaagatatttgctgtactgcaggtgaaagattatgaaagcttggagtaggctggaagcagtgcagattggagaaggagactgcagagacattttagaagaggagtcaacaacttagggaataacctgctaaaggaaatgaagaagaggaagagtcaagaatgactctcaggtttctgacatgagcaatagacagtaccatttgtttaaaacgaaaggttttattttatttaaaggcctaagtacagaaaggtttgggggatgtggtaaggatgagaatgaagggttctgttttaaatagtaaggtctaaagaaacccaagtagcgatgtcaggtgattggaggtgattggttggatatataagtatgcagcttagagaagaggattggaaggcgttactacttagttggcatttaaagccatggaagagagtatagatagagaaaagtggcccagaattgagcccacaaacaacaacacaccagtgatgtcaactgtcattcaaaaagatcattgaacaataaataaaatgaattttgggagggagaatgactgataatccattatactgggtgagccagtggtaatgaaggcctagactacagtaagtgaaaactgatcttttttctcttctcattgtcagctctctcccatggcattcacacttcatctcctaatggcaaccgttgcctgtaggtttgtatttcagtactaatatttccacttgcttgctgaatatctcattctgagcatcccaccagtaccttaaattaatagactcatataaatccagccgatttctcccatccacttgaattgctcttcctatattcctactcctattgatggcatcatgggtcttttagtgacctagaagggaagaggggattccatcaccgagtcttcttccccaaccccctatttaatgagtaagttgccaaagtattttgatggtgcatcttaaatattatttaatcatgctaagtttccatgtgtaaaatatagtcactttttaaagtatccattgttatagatgctaataattttttttaaccagagattgttactgtttttaaagaactaaattttcttcaactctttctcttaaaaatttatctttggactaaaatatagtctgataaaaagttaagatagtctgcagaaagatttagactggcaaagccattcaaccttagtaggaggaactactttggttctatttttatcatctcatttgggaatgaatcactgaaaacagaaatagaaatagagatggataagaaagacctgggccatctaattcatctccttgttagtgcagggaagtttcctttgacaaatgcttgtgagatattatgcagtaaaagtcatagattataacatttcaatcattttgtaaggtgactatttttcgagttactctcagctttgttctctgaacttcttttcacatatccctgtcatatgtgaagtatatctctttgtacacagaaatggctgagaattacagagatgaatgcagattatttttctgtaatggtgttgagtctagatgaagttgacttctctcgttaggattgtttttgtgaccagtggcacacatttgtgaggtcattacccagaatgaatcatgatcaagcttgtgacttaggatggctaaaaactaacaggaacccttagatatcaaacacgtcccttggtacctaatggcacaaatgcattattctaattgggtcagtggaatacttagtgtgggtataatactcgttaaactttgtggctttgcagtggaagtaaaggggtggcatttgagaggagtattgttctttgactattgctcaatatctctgtaatctcaattttctcataaaaatttgtatgttcttttaaaagattttttctgttgtgtttctgattgttgactctttacatttagttttatccttttaaaaataaaatattattacatcagtagttattattctttcaggttccatgatgtttgcaaacctcttagttggcagtcttctatatgtgctgttaacattctgcatacctcctcttccacatcatcaataaagatactaacatcactagatctagcattttctttgtgccttcccaccagccataccccctactcccagctgaatgtactccatatgacattatcctttgtttatagtgtttgacatagttcttaatccaattgagtgtcttcttattcaagtcaattagtttgggcaagaacagttcacatgaaccaacaaatagattgcagttttgatctgattcctgaaacttcaattatataactatagttattttagcagtgtttctttaagttctttctcagcaaaccagagcattcataattaagtacttatgaaaagcaacaacataggaattctggaatggtttgagacctcatttttctttttttcttttctttttttaaattgagaaagcgtctcactttgttgcccaggctgaagtgcagtcatgcaatcttggctcactgcaacttccttctcccaggtacaagtgattctcctgcctcagcctcccaagtagctgggactacaggcatgcgcccaggtaatttttgtatttttagtagagacggggtttcgccatgttggccaggctggtctcaaactcctgacctaaagtgatccacccacctcagcctcccaaagtgctgggattgcaggcatgcatcaccgcacccggcctgcaagacctcatttttcataggctacccatttcctttatagagtcctaatttggaatttaagcagctgccactttataatattcactttttctccgtagtcgaggctataaaactagagatcaggcaaaaggccttggtcagctgtggatactaagagtagaaggtcacatctggcccaacttttcttcttacgtgttatggaattctggcgactactcaacagctgacccagaaatgttcttcctagaatatataataaaattgtaaagtagagatttcaaggtttatcagaaatgttaatgggcatgcttggatttagtgaagcacacaaaagaagagtcctttggtctacaatgtacatgaactcagcattgctcctttccctttactatggccaagcatgtccctgagaagatatcattctcggtctcatctgatgttctagggaacctgaaagccacaggaatcacaacagctgcaataaataaagcatctattcaatacagtttcatgccaaatattattcagcattcttttggccttggtttgatagaaaacagcatggtgaacttactacctctcctttactacagtgagccctaagtatgaaagatgtaacaattcaaacctgcatgtaaataaaatcactgtttgcattactttaaaattattaagacagtaacacagacaaccaaaaaatgtagtaaagtctattgtgattgttgaagaggtattagaattaacactaggcttttttattctccatagggaaaatagtagaaaaatatttagaatatgtgtccatgcaaatgtgtgggttggagggggatttttaaaaaataagtgctacatatgtgacaacataaggaagaacattattaaggaatttcacagaatttttatgtaaagtcttatcatacagtattatgatctcagggatattttgtgatatttacagagtcttctgagggttcatttattcaggtcatattttaaggaggaacttataagattcagatctaaaatataattctgtaatatgcccaactgatcccattaaatccaactcgaaaaggagcagtataatgatgtgaagaattcccattctttgagttgttacacctcacttgaaatgcattccttctggattaaaacagcaatttctctttgtttctctttccaggctgaggttcaactatgctacctggaagcacaaagagatgctgttgagcagatgtccctcaagctgtacagcgagcagtataccagcagcagcaagcgaaaggaagagtttgctgatatgtcaaaagttcattcagtgggaagcaatgggtagggaactattctttttgttgttttattctcactaatctattttttcaatgattttccactggtaggtgttaggaaggtatttcctctttagcaaaccgacaaggagaagctcagtagactaggcattaatgttcttttccatttgtgccagaattgaagactgtggatttcatcagcctctgccatctaacccagaactttctgactcattattaatttttaaaatacagcgttgtgattttataagtgtttttgtgactacgatgtgcctttagtattgatctgtcttctttataaattttttccttgtatttgctcttttttaggtttcacaattttattttaaagcctatttaaggacttttaaacaccagaaccattttggaaacttagaagaacataattttcctgaatagtgtagaaatttaataattgtttagagaccatgggctagccacttagcttcacatgaagtcaattggaatagactagctcttgcattatctatggtatgtgaaaggacccaacaccttcagtgacccatcaacaatttcattcagcctgagacatacagctgtatttatattatactaactattcatactattgaacagtcaagtcacatatttagataattccaaatgacttttaaaattatgtgaacgttgtctaaatatatgtgtatttatatcattggagcagataattttacaaagctaaatatatgtgtgtatatatgtatatttttaaaaagtgtatatattttttcttttttccagcccaattgtaatatttaataggtgattttagagagtaaaagggtagtgatgaaattgaattatttcagagtattaataatttgataatagttatgctcataaaaatggaaacagtaacctattttacttttagacttgtaccagacagcacaaaggagaaactattccccaaagttacattacatgttaataacattatataaacctatgggatgtaactctagccaaaatatttcttaaagtgacaagaggaaagaggccttttcatgcactggtttgcatttatttttttaaagtgcttatagttctgactggaactacaatcctcatataaagttttgggataaattaagtacactgatgaaaaattctttcttattgtaaaaacccattgtctaagaatataggaaataactcctgtattcttagtcattcagagtcataattgagagtcataattctgtttaggaaatgaaaagggagttttcaagttttcacatttacctatttctataacttgttgctccatcagtatattttaatacatgagacatattatatatgtagtcaattcatcttacttgattcagtagtcatttattcaccagaggaaaaacatagcagcaaataagaaagaaaaggttaaatcttgaagcatgaacaataaactgctttgaggccttaatgtgctttaatttctctaaatgcctaaatagcctctggtgtacatgcaagcacaaactttaggtcacattttcatgttttgtaaaagccctggggtttgagcagtaccacgtgcttctgaccccagattccagggacccaatctgagcactcactctgggctccacaaatcataaatctgccctgggaattgcttagttaacaacaagcattgttctgtgaagtgggagtaggtgaacttgcctgatatcctttgtttatgctccttggggtgctgaaggctgtgcattgtgcagaaatttaagagtgcactgaaagaaagccagctatttaatactaaggacaaaaaccatatactcctttctattttctgtttacatacagaaaagcattgtttgagaaatgcatgtgagtgaggttatctggggtgtcctgcccttaaaactgtctgttcccacagtcaaatccttaattctaaagccttaagaaagtagctttgtaaaattatctgctccaatgatacataaacttcattaatcattctttttgttacatagaatgaacattgtttccaataagtaattgtgggaatggtgtgggctttcaaggatcttcattccacatgcatatatccaatacactaaagagaaaattaagttggtgatacaattcgtatcattttatttccttctcatgcctacaagcatgctaaaaagattatatgtactaatgtagctgaaaaatgaatcagactactccagggaagactgagctgctacactgaatggtgatcttaagtttctgagaattttatgtaaccaaaataacttttagaaatgaatatataacctctttagcctgacaaaaaggtatgttatcaaggtgatacatcacagcttatatagtatacaactatgaattgtgtggttagcagttatgaatatatgtgataggaagattttccctgaacgtatgtgaggctgtatgagttctagtaacagagtttgttcacctgtggggaacagttggcactggctccagcatcccaaagtggaaccatagctcctggagggacctgcagtgtgtgagtctccggtgattatcaacagtagcaaaagtcagtgcttttcaatttaggtgaaagcacttatcagttgcctttttttcatccaataaatattcattgagggcctactatgtgcatggcatgatgctctgagcatagtttatcaagaacaattactttctgtatattttgtaaagtataaccatctctttttcagataccttttcctattgagaggttatctgactttatttttctaatgaatttcaaagattcagtttaatttgctaagtagtatcattcttgatgtcagaactcagtgtagattaaaaaccatgtcttttcttcagtctgtgtaaaggagagaactgagaggcaaagatagaaagtttaaagtggagctaagacctcgactcagcactctgggtcaagaatgcagaaggtaatctataaagtcactctttgccctctctgtaaggatttatctggactcttaataagcttttcccccaaatctggtgttgtgcatattccatactgtatgaaatttgaactaaggtatcttcctactatggagaaatggaagtcttaagtagagttcattaaaaccacacagaagtttgggcaaaacattgcagagcaggtttaaatcaaaacaaaattaactcattcattaatttgacaaattttttttttttttttttttgagatagggtctcattcccattgcccagactggagtgcagtgacatgatcttggctcactgcagccacagcttcttggctcaggtgattctcccacctcagcctcctgagtcactgggactactggggtggggcaccatgcccagctgattttttgtacttttagtggagacaaggtttcaccatgttgcccaggctgaatttgacaaacattttaaagtaccttctatatgtcaggctctatgaagtgcagagattaaaatggtggaaatgaaatggttcctacatttcagaagctcacagtttgttaggaggaaccagatctctgtaaacagcgtggagtaaaggattttaagtgtcaagttagaaatatgtgtagggaagaggggagggctcattgaaggcagagctcaattctgactgtgtcaagtagaattagagcaggtcaggaaagacagcagagagagagggctctggagatggtttttgaaagagggctaggtcggcagaagtgcttctcaatttaacctgaaaaacacatattgagcacctacaaagacataccacagtctctgccttcattgaatttacagtctagcaagagagtgtggcatgaagccgatactgatctgtgcagtgagagagaaggggaaatagagaatgctagggaacttagagcaaacaggatgagctctcgcaggcagggctgcatctttcatgttcactgcactctctccagcatctggcgcagtgcctggcaagtgctaggtacccagtaaatgaatggatgcatgaatgaataaataaaactgatctggggctaaaagggaggaaaggtctggaatcatcagactgcttgctgtttcataggactgaagaggaggattgaagttagaggaggtgtggaaaataaggctttggaagaaggtgaagtccagagccagaagttaatcattgaattcatggttcttaaccgagatagtgcatcaggatgacctgtggagcttttaagtagaaaaaagccagcctgcccgaccctactgaaaattttgattcagtaggcagaagaagatgatagtgattaggttctaatgctcaccaccagttgagaaccattgcttcagtggttttcaaagtatggtctctggaccaccagcagcagtatctcctaggaatttgttagaaatgtcatttctaggtctcacttcagacctattgaactagaaagtctaggggtggagaccagcaatctttgtttaacaagcatcccaggtgattctttttttttcttttttcttccttttttttttgtttttgagacaaagccttgctctgtcgcccaggctggagtgcagtggcgtgatcttggctcaccgcaacctccgcctcttgggttcaagcgattcttgtccctcagtctctcaagtgtctgggattacaggtgcacaccaccatgcctggctaatttttgtatttttagtagagacggggtttcgtcatgttgcccaggttagtctcgaactcctaacctcaagtgattcacccacctcagctctccaaagtgctgagattacaggagtgagccaccgcacccagcccctcccaggtgaatctaatgctgaagtttgagaagcaccgctttgggcattagagacttttaggttgacagttaatggagcatgtggagactagatggagactgaagccagaaagtatcagtaaacctcagtggtccacaggatgaagagagtgagggagaaggaaccattctgatgccccagttattggctcaaagagaaagaaaacaggaatacttggattcaaatgactttggtgtcatccaacatgtaatatttatttagcacctattaagtgcaggctgtgttaggcactggggacgtagaggcagtgggacacaaaaggtgataggtatatggaaatcaggaaaaccttccagaagaagtgtcatggaggatggcccagggtcagaaatgacaagggtgtttctcacagaggaggcagtgtgtgcaaacagccagaatcactaagggatgcccagcatgactagattggtagtttgcaacaattatctgctaactgtgtggagaacagattggttaggcctaggctagacagtgctcagataagaggctcttccagtcattcaaataagaaatagtccctgagctaagacaacagcaatagaaactgaaagaaggaagctgcattgacaaaccttggttactgggtagatggggttgttgagggaggggctatttgagaatggacctccgtatttcagacttgggcactctaggagacagatgtggcattcaccgaggaggggaatgcagaggaagaataacagggaggaaaagcagagtatttgagacatagttctttccatggtctctgaagcatccaagtagaaaaacccaggaagcagaactggagctcagaaatgttttggcttcctcagccaacattaaggacagtgtggtaactatggggtagcagaggctgagagagccaagaatttaccttgtggtaaactatgccctccctgccaggtgaacataacattgtctttaaggaatgcttattttaaaactataggtaagcagaacattttcatttcagttagagtttttcctgctgtaatatgcaagaattacaaaataaagactacaccattgagaattccaggtagtatcttgattgacagaattgaggagtacggttgactattattttctctcttaaagctgtaggtaaaaagctcctgatcctagatataagattgcattgagtctgctcagattgcttccaactacacaaataatgtttatttttaggggtaagtcatgcattcactgtagtctaatttcctaagaggagagagagaaactagattaaaaattaagaatagaattcaagttagctctctgctactttttagctatggaaccttgattgggacatttaacctcaccaagatatgatatctcagtctataaaatgagaatcattatcctagtgtacttcatgttttttttttttgagaaaggaaatgcaatagtaggaaaatatctaaaatacctagaatgcaataaataatatgaaaaatcattaacgaaatatttattttccaactactgtgttgcagacagtagtatgagatgctagcaatgaaaaagatacgtaagacttaatctctatggtattcagtgtagtgagagagagagacatttagatacatccttatagaacaatgggcggggctgggcacagtggctcacacctgtaatcccagcactttgggaggccaaagcaagaggatcatttgagcccaggagttcaagaccagccttggtaacatagtaagacccccccctaccaaacctaccaaaaaattttttaagtagctgggcatggtggtttgcatctatggtcccagccacctaggaggttgaggcaggaggattgcttgagcccaggaggttgaggctgcagtgagctttgataatgccactgcactccaacctgggagacagactgaaaccatgtctcaaaaaataaattacttaattaagaaaggggaaaatttaagatacagagtgttatgggaatactgagaagggctacctaatccagcctagctgaaaggggtcaagaaggcttagtggaggagggaacatctgagctgtcttaaaggatgcatagattttagccattagaagaggtctggccgggtgcggtgggattacatgcctgtaatcccagcactttgggaggccgaggcgggcggatcacgaggtcaggagatcgagaccatcctggccaacatggtgaaaccccatctctactaaacatacaaaaaattagccaggcatggtggtgggcgcctgtactcccagctactagggaggctgaggcaggagaatgacatgaaccctggaggcggagcttgcagtgagccaatatccatgccattgcactccagcctgggcgacagagcgagactccatctcaaaaaaaaaaaaaaaaaaaagaggtctgtgcagttcaaatggcttttattcaagtcaggcaataacaaatgctggcgaggatgtaaagcaaagggaaccctcatacacttggtgggaatctaaattcgtacaaccactatggagaacagtttggaggttcctcaaaaagctaaaaatagggctaccatacaatccagcaatcccactgctgggcatatactccaaagacaggaaatcagtatatgaaagaaatatctttactctcatgtttgttgcagcattgttcacaatagccaagctttggaagcaacttaagtgtccatcagcagatgaatgtataaagaaaatatagcacttatacatgatagagtactattcagccataaaaaaaaatgaacttctgtcatttgcaacgacgtgatggagctggaggtcattatgttaagtgaaattcgccaggcacaagaagtgaaacattgcatggtctcactttatttttgggatctaaaaatcagaacagttgaaatcatggagacagagaaggacagttactagagactgggaaggggtagtagagcatcagagttggggaggtgtagatggttaatgggttaaaataaaacacagagaatgaataagacctagcgcttgatagcacaacaggggggctatagtcaataataactttattgtacattttaaaataaagaaaagagtataattggattgtttgtaacacagaggctaaatattgagaggatagatgcccaattttccatgatgtgattattacttattgcactcctgtaccataatatctcatgtactccataaatatatatacgtactatgtacccacaaaaattaaaaataaaaattttaaaataaattaaaaaagtagaagagggatatgtagagggagggagaggatttcagccataagacaggaactaggtagggggagtatctgaatgtgttgaagtttactacaaatagtttgatgctgttgaagcagaagatcatggaggtgatttctgactctgcttcctggaattagaaggattccaagagagtttttagggacttccactcctgtggtgaagttccagaagataccccagtctcatcagctgtatgcctgacttcctctggctgtggatgaaattgggcaatgtctacagatagagatatagttgaggtttatgccttgtatctgagaacacaggaatagttcatccctcatcacgcaaggctttagtataaattttcttcccaaatagaaacagtatatacaggttaatcccaagcacaacaggctgaataaaatgaactttaaattaaaataggattataggctaaaagtttggcaggaaagaggagttcattttcttttaggaaaagaagtgcctctatatgtgtgtgaaagtatatacaaatataacatccccaaagagaagtgatattgacaagtgaaaacaaatgaatcacgatttaaaatatcacttgattaaagaccaaatttgtttatctaaattaattaagcaatacgatatgtcaaatgactttaaccaaatgagaagggatataatcaccctggatttcctgccatggggtgatctttctggttttctgttgagcagcatgccaaaatattcatgctctgtcatactaactatctctctctctctctctctctctctctctctctctctttctctctttctcttttttttttttctctctctcttacaaacacacacactgtgaccattttgaatttctacacggtgggtatttttagaacactgctacataaagtgttttctttttggtgcacaccagccataaaatgatgtgctattcttatgtgtgccaatgttgataacagtctcacatatagattaaatcactagacaacccaaagaaatcttatttccatcctgcatttctacttccttcccttgactcttgccttacctcagtctaatagaagatcagtgttcaattcaggccctttttgtgctctggaactgttaaatagtaaggtaacaatgtaggctacagtcaaaaggattaaaatgtgcctggctgcttcctggataaatgatattctgaccactatgtaagtatttaaataggtctttctggactaaaacaaacaaaaaaatcttaccagtagaaatgtattcacttgggtcatgatattattacacccctttaatgtgaaataacgttaaatcgattgtagacctagacttcgctaatttgatgacatccatgccaagagccaacaaaaggcaaaccagagagggagaagcatgcttttgggagaagtatgacttcaaagttaacagtgtagtcaactgatgaagacatatatatataatatagtatatatataaaatatagtgtgtatatatatacacacacaccacacacacacgtctttcatgataacaatgatcaatttttgtactgttttggggagttgatgggacctattgataaaaggagaaagttgccgacacggacaatgagaaggcacctaaaacaaatctgatttatttcattttagtatactgaggttagctcttttctttaaaatgtattcctttattcatttccctatctccttcaacaaaggatctgagtcaacttacaaaaatattgacagtaaaatagaataaatattagactgaaataatttaggaaaaagtaaagtaagaaaataaacaaatgtgtatgttatgtatgtcctcaagaagggctatgatttggctatgagctatccatacccaaagaataaaatgaaattttatctatcagagaattcatagtgtcctatgattaaaaataaatctatatcagatgacgcacaacttcttatgctgttgagacctgagaggaatttctcctgtagttctttaaggcagagacaggtgtctgtgatactacacccgtgcaagagaagtcaaatccccaaagcagttttttggtgtaggctgcagaagtgatgtcaaagcacaattcagtaagaacagttctgtaagtaactaaaatcttgtagtccaagcatagcactctctgggtagggtcagcctgaataaaggataacttttcatgttaattgtgctaccaggcttttgttaggattgggcaacagacaattatttacaggttgttgatatattgcctattacatcttggaaaactagtgaggcctagaatagggtaatccttttatgaaatggtgaactgcccaactcacaccagtgtgccattaggtttggatccattcccctcttaacacacaaatgataacataggacggtttatcttttaaaaaaatcatctctttgtcttttgaagtacatttttccatttgttcttccaactactgatttaaaaattcttcagaatgttttctgtttccctggctagaacttagtccagcatattatctaaaaatttggatgagcctttgacttcctgatagtgtaacagaatcctctaaatacacccagaaatctacactgatgtttctaatgttatagattatctcgttggttagaatttttaatggattatcttggtgctttatgctttttatttcaataataggtgttggtggacagatggtccacgagaaagtggggccagttattaacaagtttgtaggcttgattttatttttcttagacctgttcacatgtacgtaggtatatataaaaactgaggaaattactgctagaaagaactccatattccttttatttattaatggcaaaggcaggctgcttttctcatgaggaagttgctcatgaattttcattcaaaatagtaaattagtgtccacactttcatatgtttagagtggaaagggattgtacatgcaactgtgcatatcagattccatgtctggaaagctacattttattctttgatgatattatggttggagatataacaggcaccactattatatctcccttctgtgcttatatgacacatggagtagaggatgatgggaaattctgatctattattagtattttacttcagtaaaatacttaaactatatttttgcaagattttgttaccactcctttacgtgtcttttttgaaagccagaggcaaactttcctaggcaaataatgtgaacagcgaacacttagtgaatatttggggaaggaatcaatatgctaaagaagctaggaaaattggatcatttaatagaactcccaatatagacaggtggtatttcaggaaccagtctggtgtttttagatgtcctagtgtgaattaatattaagcatacaaaagatgtattcttaagtgccccaaaatacacacacacacacacacacacacacacacacacacacacacacacgattactcagccttaagtagaaaacctgtgaggacttttagtgttatatatttttttcaaccaataattgctctattttgatgatttcttaatttggttgtctgttttcatcaaaattccttagtgagcccagttgaaacctcatatattcacacacacacacctcccattgatttcacttgggtgaaactttatcgtttaagcaaagtttaagttgaaatgttgagttaatgatgctcactttaaataccaaaggctgaatgcatttatgtattcaaacacttagctagtcaaatataactcccatcagggtttagaggaaggattatttcttaaactatgctggcctcacaagtaatatattaccatcaaatctgcagaaaaatgatactaaataaggttgttagtatttttttatttataaaagccctggaatcttttttaaccttaaataaggcaaagtaaaatggtgggtaagatgttatgaaatacttagagcaattacccatagtgcttcaacccaaacttaaaaataaacactaaagaaaaatttcgcacatctatttctctatagccttgtctgtttagatgcttaaactataaaacaaatacatttatagttctatatttgtctaagaaaaactgacttcaagttagaagactttttctccccataacatgattaagctacctacatcagaatgtccaactcctttattgtgaacccatttaagatcaagtgtatggcaagttaaataagaaatatcaaaaagaatacattttggttaaatgtttgctttataacactttcatagagtatatatgagtttgctttataacactttcatagaaaatgtaacatattcatagagtattacaatggtatcctaacaggccttttaacatctaggagctcacaaatgagagtgaatgcattgacataaacccaagcataattacaaagaaaattttatgaggaaagtccctccaaaagggactcatagttcttatatttgtattcctataagattataagctactcaccacaattttaatcacctctctcccttcaaaagagagagatgagagcagttgtcatgagaaattcaagagaagatcctggttctgaattcagctgatagaatcagcatattctccaagggaatatagaactgttaactagttctcccctacccttgataaattcatttgttcatgatcttctctgttttcctgcagagtagctggagcttttcctggagcacattgtcttttataaaatcactcaaaaaacacacctttgcagctaatataaatgtaagaaagtgaactctttccttacttaagaagtttcctataatactggggacattaaattgtggtcatttcagaatctttcaaaagcacctacaaagaaattcaataatttatttctgatttgccactgtttttttttgagacagagtcttgctgtgtcgcccaggctggagtacaatgccatgacctcagctcactgcaacctttgcctcctgggttcaagcaattcacctgcctcagcctcccaagtagctgggtctacaagcatgtgccaccatgcctggctgatttttgtatttttaatagagacggggtttcaccatgttggccaggctagtctcaaactcctgacctcaggtgatctatctgcctgggcctcccaaagtgctgggattacaggtgtgagccactgtgcctggctttgatttgccactgttatatgtttgatttcactaaatgtggaaaaatctcaggtcttttccaacttgtggattaacacatggccaagaatctgaaatcaggcacaaatacttttaagaaaaaagtttttgtcttctgttttgagactttgtgagaatttgttgtttagcacattggtgctcattgggtaccaatgaaacaaaatgtggtaccaaggcatttactgtatctaacaaatcaagtatcaagtctaaatattctcagctaggatgaaaacaaactagactggataaagggtgagtatctgtattaggttcatttgctacttgcaggtctccagtgtagactgtttgagaaaaagtcttaagtgacttttgttcgaaggcccatgataaggagaataatagaaggaaacagttcaatagatataaatgcatgctaaaaagccagtgaaaaaattcccatgcttcagaacattttattattttatatattttttaatttatttgaaaactattcattaataattttcatgttcataaacctttatctttcactataaaaagaggaggaggtgaaaggaaggggaaggcaattaacattgatttaacatctactacatataatcattttaagtaagtgaatttaccattttaatatagtaaaaacaaaatctcacgtaaagaatgagtaaagcagcctgttcatgttgcactggttgtattggtattggtctttggcgatgagatactgttgtgtctgctgacacatgctgcttttctgaattcattcttgccccactgaaggtttttgttttctttatctagattcatttatcatcattcaccagggactatgctggacactgaggatgcaaagataataaatttatctcttgcccttgaatttcttagtcataatcaaaatttctttttcagtggtgcacatgtatgaaaaagaaacaagcttctttcttttgtcttgccaattgatcatttttatgaggcaccctacactcacactttcctagaaaagcaagaaaaatacttgctttaagatcagagttcaggctcttagacacattatagcctctctaataaattaacattctctttaggaaatactctcttgggatcaatactctgtttttcagattttctatttgtctccattcttttctccaagatgacatctgagcatatagggatttacatgatcttgtaattctggggtgcagtggagtcccctggcttaacacagtgcttaggtacagtctggctgggcttattgaaatgggtcttgtcaaggatattatgaggcttcctcccacagagggctgtagctggtctagcttatgttgttacctcttggcttggtcagggaccggtggtatttcttgctgactaagcctcaactcagccctcactgaccctgccaactctctgtggtctggattgagaggcccacctggctctccttttgttggggagaggccgtcattgtgcctttgttgtcatggcaatgcctctgtcaagttcaccagctgacctctcaagaaccctggagtctcttcttgggagaatgagagaacaacagagcaaagagaattctaaccgaagatctctctctgtctacaacatccccactccaggttattgtggggacaatatatgaggcaatttcctcgcagagttctgacctggaaatgaagttgacatccttatgctttgggcttttttctcaacctgtctcacatgcctcctttctaggtcttaggccaggagagaggagaacacacatctgagcacctgctcctcctgccttattttttattctccaaatcctctgacgtggaaagggtgagctttctcttcctttcccctttgctttaataatcccttgaatcagatactcttctaattttgtgggtggcattccactttttctgtctgtatgattaaaatataggagggtgcaaggagagagaaatagcgactgtaattcaggaagtatttctaaatggttatacctctcaaggaaatgtttattagttattccttattagtcacagagtcaataaagaaaaccagatggtttattttttatttgtctcttttatagtggtcgggttttgttttgttttagtctttcgaaatgggatactagttcagatttcacatatatgctggaggtctttgctactcagaaagtgtggtccatggggccaggcgcggtggctcatgcctgtaatcccagcactttgggaggccgaggtgggcggatcatgaggtcaggagatcgacaccatcctggctaacaaggtgaaaccccttctccaccaaaaatacaaaaaattagccgagcgtggtggtgggcgcctgtagtcccagctactcgggaggctgaggcaggagaatggtgtgaacccgggaggtggagcttgcagtaggcagagattgtgccactgcacttcagcctggataacagagtgagactccgtctcaaaaaaaaaaaaaaaaaagtgtggtccatggaccagcagtgttgccaacacttgttagaaatgaagaatctcaagccccaccctagaacagttactgaatcaatatcttcataacaagatgatcagtttcaccgtatgtgcattgtagtttcagaaacactgctctaggccaccatagccttactaaaggttttaactacatcaactataaccgtcattggcatccagtaaacatttattaataaactccacatgttagccaatgttgatgcttgcccttgggtgcttatagttctaatcaaggatctttatagttatgataaagtaattaaaataaaataggcaatcctagatctattcccccccaccccatcaccaggcacaccttaagttttttgacagatctattaagattaaattataagttattaaaagtggattttcattttcacggaaagcagtcgtttaatgtacagagacaagaacaggtagtaataaaatactcaactgaaaaattcagattcatacctgaggctgctgcctcattagtactgatagggttttgctcagttacaatttcacaagactgtaggatttcttttagtggggtgattttgaggggtaaaggacaaagtcatagtttttcattctgtactttcattttcagatcacagtgttttagaagaatctgggctttacttattcaccaggctttcaatagagaatcacattaatccttttaagctccttattctaatgatttattttgttgaaaaccatagtgatcctcctttgaattttaatgattgctggctattcaaagattcattgttttgacttcctgtccttacctttgtttcctacatgtctgtggggaacacctgtctaatactggatctgccactggttctcactggcttaccagagtcactcaagcctatctctgagtgttaagctgaaatgctgactactcatccataacaataaatgtaggatatatgtttgcagagataggcagatagacagcagagggacagataaatgattgagtgatgtcccagtgaaaacagtattttggatctgatagtatatatcaatatatttggagctgatagtgatccttatacagaaattagttaaattgttattcttaatcataaatctattaggaagtaatatctgtagaatatctagtagaggggaaaggggttcaaattttgagagtgctgttcttacccaaaattcaggaccatgtaaccttctacaagtcactgactctctatttctcagtctattaaatggcagtgctcttttttaaggatgcagtggtgatctttttgttcaagtgctgcaaatcctcagaaagggttagcaaatggaaatagccataacgtgtctcaggtatgagcattggaattgcatattacgttttcacaatctaagaggtggctgtgtcgcaggtttgagtttctattttgcccactgtgtaacaacatagaaattttctcttctctttttgtagataacactagaaacatcatgggttttcaagaatatattattctaatataagattttaacaactacactgtatttatgcatactacattttgtgccttatcttcaggcttctggactttgattcagaatatcaggagctctgggattggctgattgacatggagtcccttgtgatggacagccacgacctgatgatgtcagaggagcagcagcagcatctttacaaggttagagctacccttcctgcctttaccttgctgtggaagatctgattagcctgacaagtctctctctctctctcaggatatcttttcgttcattgtatgtatcatggtgtctattagaattcccttccctgtccccaaactcatttccatcccttgtgtgctgacaggctgcaccgacatcataattgcaagaaagttccctttatcacattctatttgctgtaattctatagaaggacaaagatttatcttcaagatgaatagcaataaatgaaactgcattcataaatagactgaaacaaaatgaaggataaatggactagtaatgtttaacaaaacgtggtacgattggagcactcaggtggattctatctacccctcagatcttcccagggaaaaaagaaatttgcctttggtttggcttgctgctgccaaagtacaggcctcatccaatttaatgtttattagtgatacatagagcagacgttgtcatattaagtcaatacatttccatgtgatttaagaaaactggcttgaaactcatgtattgattgtaggcaatccatctaataactatctatattgttttccatgtttgctaattcacccttaacctactgtattttaccaattctacttaaatagtcttagcagttcttataaagcaatcatgtgattttgcctaaaaaaaaaaaaaatggttgcaggattcacagtgcctgcaaaagctgtcagggggagggaagagggactttccactgaaatatcagactgcagtaaatcttcctcatttaggcaatttttattggagtaattctgacagttgtcatccttgaattgctttgagcatatggcatatttcaaagagcagattgtgaatcataaaaaataaaattaataactaaccacagaatcagcaacagtataatgacaagaaacaactaccttctagtttttaaaaatttcttatagaataagaagtacattcaaggtcaaataaaagttgccttctttcttcttcaatggtatcattttaaattaccgttctttaataaatgattttaacttttacctcctctaaagagagatatttgtacttttcaagggtctggttgactttaattagtgtcccctaggaatcatctcagttaagagaagatataagctccccagggacccagcaaatggggacattttattctctaaagaatgcagtccaaccttaattgagtttgttgactgttagctgtttcctgtatgggtagctgtccacattaacaacacagctatctaatatatcttctggcataacatattgttacagtaacagtctcaacctaatttaacaaaaactagatgacttcacatttcacatcaggatcaggaattacatatgaaaacgtgcatataaatctctattaatttagtgatagaaaaatattttatccctaagacttaagtattaagaattgagccaaatgggaaaaatataaaaggttacctaaccataagccattatctcggactttattgcactcatgatgccaaataatatttcttttcttcttgatgcattttttattttgcacataagccactattttttcagaaacagtgctattctttgtcaaaatcacattcatataatttacatcacaattaataggaaatcattgaacaaaaatgcagtcttcttttttcttgcagtttccttataagtgctttgcctgaaaattcccattctggcatattgaaggccattattccacccactcagaacttctgggttatagtatttttccaaacattttctgtactgtgatttttcatttgtgactcacgtcctgtcaccattcttctgcttttaggtgcttaacatagctctgctcattagaccagcactaactttacatttggcttataagcaaaattaaagattgagttagaaaccagtagaaaatgctgctagtctgtagggtctttctttatgtgcactcccaaattattccagaggcttggaagcctccagaataaccctgaggatattgactgaggagtcatgtagaacttcaggtggctcctaaattagaaaaattgatgagaagaattaatttcatgtcttctcaagaatcctcagggatttccaggttaagtcaacattttcaatatcctattcctctgttctaatctgcttttccaggaatcaactgaactgatgccttgagaaaggggtatttatggtctgttgatcatagagacccctgaaggagtaaagcttttcaattggtgcccaggccttgccaggttttaaatacaatttgagactaccttatttatctctaatctttgtatttgttgaccccaaaagataccagtgctttattaaccttttttattaagggcaccattgacatttagggcgaaacaatttttttttagtttgtgggcctgtcttttacactacagaacatttactcttcatgttccccactcattgtgacaactcaacgagacctcccaacccattttacagcatttcccagtccatctcaacatatctataccatctttgtttcttaaaatacttatataacaacaaggaaaatgccttaaacttgtactgtaaacgttattgaacaaacactttatatagctgatattgaaccaacagttgtgagtttaaaaatcaaggatgaaaatgaagctcatcatccctagtattaacgaaaaggatgaggtgaaacttttaagggagatcttcagctgagtgatggcaaaaatcctaggaaactgtagagcaggaccgaatctttattccttctattagagcatttaaaacctttgttcttctctccctgggtgtctctctgtatttcatcactcaacccctttcctggagtatttatgcccaaaccctgactcatgcacttatgaagtcctaggttgatccccaaggtatgtgtttagaaatgtcaggttagataaaatctaataagatgctagtcagtgagagtgaagcttatttagctttttcaacattaggcattaccttcctgactttacctatatatttttatatcctgatttgcactagaaaatcagctagccttacctcctaaacatgaaactacagattgtatgaaatacagaaaccctagactatccactcagcagatatcctgagtacagcatctattgtgatatttaggctaatccaaagccagcaaaatacacaaggaatttataaagacaaataattggatttaatgggcaaagactacattagtacaacttaacatcattcagaaaccttaattaatactgcaatgggctataaagtggactttctatttgaactatttcttgttatttttatattgttagaaatttaagatcattttttgagttaattttaaactgcagtctcaagagcaacctaattcctattaaaaactaaccattcccttaaatgtactttcttctttgttttgagacagtgagttatactgccaatgacttcccttcccccttatctgtcttgctctacctctgaataggagccttctatatctattttctaatgaacattggcaatatcgtcagcctagaaaacacaaatgtagtcttttctcattttttcttcctcaacctgagaattacctcgaaggagaatttgcacccactctctcactttctttctcgtcattcctcctctcttcctaagtaggacaatttaatttgtcaaaagtaaccactatgattttgaaagttcagctcctatttggactagagttacgacgccagaattcataatcacagggagctgtcactctgctggtctgcatgtgcattaactattaatggagaaatatttaaaacccacttgtgaaggaaaagctccattttttcatttctacagatcaaaggtggcattattcttgggcttggggaagctcatgacacctcctcccccattctctaagtgttatagactgagtgacctagaagcatttcaacgtttagagagttatagctcagactgctgctgttgctgctgcactgtcctccccagcaggtacagctgacattgtagtatggtgagggtgtgccctatcagaggctccttacctatgcacaaaggactgccagttcgctgctacctacagagcacagatgacagatctcctagtgatccgaagttggtctggaattccagactccaagggttaatttcaagggccaaattcagaagttgcagcctggtgattattgttataattaaacaagagttttcagatagtatgaagctcactgaaacaccccacttatatatttgttccttgaacgatagcttacctgctcctcatcaataaaatattagattatagtcatgggctgcataacaagatttttggcctttgaaggactacatatgcaatggttatcccataagattataatactatatttttactataccttttctatatttatgtacacaaatacttaccattgtgttacggttgcctacagtattcagtatagtaacatgctgtacaggtttgtagcctaggagcaataggctctaccgtatagccaagatgtgtaatagtctctaccatctactctatcatctaggtttatctaagtacactctaggatgttcacacagtgacaaaatcatgaaacactgcttgaatggagaccagaaagtgaggtggggagaaagggagagattatagcagggatatacatttctcagaacataccccgttgttaagcaacatgatttgtacatgatttataaagggttaaaaataactcttccagcttaaaaatactactaaataagtatccaattcaactgagatctttgtactttcagagaatttatactaaagattttgtacttaattttgtaggttagttactcatatggcttcattcatataagtccaaacatgtcctctgtgtaaaaggaaaaggaccattcatttatataatacaatggctactaaacagatcaattacatttttaccctgctatgaatttggggttatttataagaatcaacatgaaaataatataaatattttaaaaacataaatacaaatcagactggagaaaatatacatagactagaagttgcatctgtaagaagagttaatatgcctgtatataaactgcaaagccctacacagttactaaaacatgatcccaatgttatattttgagtttcctggtagtgaaagcaaagagggaaatgtgtccagttgcaaaatgtatactttctataagaaaaagagataatacttcctttgaagaaattttgttttgatacttagatgtgaaaacattttcttttaggatttttttaaaatacaagggcttagaatggtatggtaaataaatttctaaccataataattattaaatataaatacgtgtggaatagaattagaaattctgaggaataggaaatatagagtacaagaagaagtatggaacatagttgacttgctattttataactattgatatcaaaatgatgtcatagatatgaactaatctcagaaaacagattaatcacactattcctgtatttcataaattcacacatttcagctttctggaatagctctcttttattttgttctggaccaaattgatctaactaatttccgatgtgatttgatattcttatgactaaacttgagcccctaaaagtgtaatgttaggttggttcatggtccaggtcacagtagctaaacttgaaatagaagacaattcattaactttttaaaaaaaaattcacatggtggtgtacagaatagaaggacgagtcaaaaaattaaattctgttaattaggccttatattggaatttcagtgttgaatgttacatctctaccctgatgttcaaaatgaaacaaattacagttattgaagcagtcaaggtaaaaatgttctagatatatcaggcacaagaatttaatggtaattttttacctcttttcctggtagattaattgtatagcttaatagtatgttagattaaaactccattaagataagaagaatatgcttaaattcattataatatttcaaataacattatctagtcatttaaaaagtgatcagaatggaaagatctagactgtctccactgcttatctagaaatgaatttgttgtttcatttttattaaagtttgaaaagtccttagattaactgtcatattaatttgagctttgatgaatcagtgtttgctatgaatacttgaatatattttttttccttttttttttctttttttgagagagggcaaaacttatcctgaaaatgtttaggggaagaaaaagtagatgaatgtggtttctcaacaatgtttgaaacactgttcatgctggagcctgtaattcctatttgaatcacttctttaaaaagaaaaaaaaaaagatgttaagagaataggatgccaagaaatagttggctgtgtgtgtggaggggcaaggaagggaagccccgccagcagtttttgtctctagcgggtgagctactgtccggaaggtgcgttggctctctgggctggcctctgaggcattgtgctgctccctctctccctggcctggctggctctggcctagagtggatcaaacgagccgtggggaaagttcccctcatttgcatcacttctagacagccctgtcgtactctttgctgacaggaaatcactgtctttgtcaccttttctcagggccctccttttggcagagatgggccatgtgaccacgcttaatcacaacagggctggctcaggactcaatgacatgttttcctcagcacttcaataaatggggtacaggagtcagtaggaaatgagtacattaattttagagtgaaaagataattaacacttgaaggactaatgctacaacctatggaattattattcaaattgaagttaatttatcaaaaacttgtgaaaactatctgccctaatgcaactgtttaaaaaaataaaacttgaatagtaagagttgggcatgttggaggcagagtgggaagaaggcggggagaggggggcttggatggagagtggagagtgaggggagagaaagggagagagggaaatcatagcaggcattagctatgtttgaaaaagcaacttaaatgggctaaaacttcaacatttgggactgaaggctggagcacgtaaaacgcttacttagatgatatgaataggacactggcaaacaaaagcagcagtgtgctcctagaaaactgtgcttaaaggagtttccttggcaacagaaatgcagttccaaaagtagacagaactttcctcagaaaacatactattaataacaaccttccggaacaacttggaacaatttgacgacttggcaataataatgccaagtgttctgcaaattaatctaacacataacagttatgtttctcttgcctgtaattctgctggaccctacctagaactcatgcttttagcagcacaaatgtgaaaaatatttctaaatgctgtcacggaaaaagaaaaccaaaagaaatgctagtggccaacagtggccaatgattgtattcagccttttggaatctactaagaactctgagttcaatgagataagtttattccaataaatgctcctatatttactatctcatttcagtaaagaggcttccacagacaaaacttggtaaagggttaacagtctgagacttgctgtgatgtgaagcacatctgaggccgttggttatgtaaatgtaatgctcactaaatatgtgctgagtgttattttttaaagtatcatcatttcttgttagcctagagaataaactaatcttggatgtacttggccaacgggaatcatttgaattctcctgaaggctatccgtttgccagccaagagaggtagagtattcccctcctctgacctttcttgaatccttggatctaaaggttaaaagtaatcaatatctcattgtgctgcttggtttcagggtaataagtaataaccatcatgttaaaatccaaatgattacagatagcccttaaattagttgacctgtttgggagattttattacttccaatcaggataataattagagtttgctaataaaattttggattaagttgcaaaaaatttcagcctttaattttttgaaaaatgacttttacttaattagatgggaatgcgtagtattccctcttttgttaagctgatagcttttgctttagccccagatatttgtagatttctttctagtttctagaaaagaaagtagaggaacatttaaatttctgataagaaaaggtttttggatcactgccatctttggctcctgaactactcaaaactatgtatatgtttcaggttagtgacttcatagcagtgaccctcacctactttttagcatgtcctgtttttaaattacttatctttagtggttatattcatattggggctaatctggtttgaggctggcaaaaaattatatgatgtatgattaaactttacagacagctatggtatgaatggggttatttattttgtttaaaaaaagagtatcaaaatttaaagatgaaaaccaaatattatcattgacaaagaggtattaatataaaaaagataaatgataggcttaatgttccatgtaattacatcaggaaggcattggttatcataattataaccacaaggaaatgtataaggtacatatgctatttggtctaaataatttgtcttttatcatcgttctagtttttatagtttattagaacttcttgaatgtattcctaaagcaggaatgtggggctaaaaggtacctaggtaacgtttcagttatttcaaaagaagtcctggtacctgttcagaatagatggtaaggcgcaagggaaaagttttcccatagtgctttcacattaaactcattaacttcctttatgtccgtatctcataacattgtctaactttggaaagaagcacatttgtggttgtcctagggatatcaatttggagtattagggaattctccaacccagctagctgcattaccaactgaccatactgcctttaatcccattcttaagattcatttctttggggtaaagaagaatgcactctactgaatgcagatattctgtggggaaggcgcaggagaatgatattgaattaaatatcaattttaatatctagctaaaatagaaaggcattgggaagggaagagagtgggtagagagaagaaatccagaaaagggaacaaaaacagatgttatcttcttcaacatttgataaaaagagaagtgtgtttatgtgtatgtatatgtgagtgtgtttttctggtattgagatgggtgtaggatagagggagaaagaaacttatcaaatagtaagattttactaataaatttgattgtgtcagtgccccattcacattatcttatttaatgctcacagggatcttgattattttccttaattcatagaccctgagccaaaaacataaagaggttaggaagctagcctaaaaaggcacagaacttgtcccttagtcaggctaggctagggtatgccaagataacaaatatgccccaaatctcagaggcttaaagctgcaaagatttatttctcatgcatactacatgtccatcacatgttggctattggctctgcttggcattgtcctcactcttagacttaggctaatggcacagccaccgtcttaaatattcccttactatggtagagagaaaagggagctctagcgggtctcactctggccattaagccttctacctggaagaaacacatgtcagttccactcaaaattttttggccagaactaattgcatggccacaaccaacttcaaagtagatgggggaaatgcagccctaccatgtgcctgaaatgcagaaagctagaaatatttgtggagctgtgctaataactaccacaagaactaagtaagttgggatttgaacccaatctgggtggctccaatgctcatggtcttttgctcgcctgctcattgttgccccatatcatcttctctacaacaggtagattcttgcaagaacgttatttcctccctctgtatgaactttttgtgctaagatagaagaaagaaatgttagaaggtatatctgcaaagaaaagatgatagacttgggttggctctttagctaatcatcaggctgttctgtgaaagcccccaaatgttcttaagcacctcaataccctggggaagtattgccatgctgagcctcactggggcctcctgcattttgttagattcaggaaagctaaggatgaaaacatttatgctttttgggagatgcactaaaggcagcattgccctcagatgattcaacctcctggatcccgttatgccaaaggaagttactaaaggagggtccccatggagagatgctctataggaatatcatttgcagaaaaaccattttgcagtcctgttgaggaagcaatttcagttctcagaaacaagagccttcctaagcatatttttaataatgtgggcttttgtgaaactcatacattcttaaactaagcacttctgtgacactctatccctaatgaggcacactggggtaagcaaagaaggaaggagtggtcttcctgctgaaccttgattcatttacataagacacaaaacacacaaacacactacacacacatgcaagctaggaaagaaacaaccaggctaatgctcttatggcctttgggttgatttcaatttcacttctaaagtttctcaaaccacagagctctagcctttctccagaaggatagctataccctactgaaactcatctaaacttactatttcagctgctttcctaagtagttgattccatatgcttatagacatttacataaagaaaatgtgtgaattttaatatcccccttgtcatctcattttagccttaaaaactgggaagtctgtggaggaagtacacacacataaaatgtgtttattcacatacatttatgtgtgtatacatatatacacgtatacaaagtattaacttatttaatttaaaaaaatctttcaccaagattgaatttgaatgaaaccagattccttgaatcagatatgctatagtcccaagacatttaaatcatgcatatataaataactgtacaaaattccttcatatatgccaagtttcagtctggagcacatttccatgttacaaatcttggcatattggattttacaaccttcattacaacagtattatcccttttagtactcaaaagtgcctccctgtgaaagttcttcttggggattattcagctgtgaatacttgtttattagtgaaatgcatattttaaaataatgatcataaatatggacttagtaggccaaatttgagaatgattgattatattttttgttagacttcacactccacgtggaggattcgtgttatttattgattatttattaatgtatctccagtgccaagcacagtgcctggcacataatagaaactcaataaatatatgttgaaacacatattttcaacaaggcttattcaatagttaattaaactctattaatcagaactatgctatcaattcattactttttcaacaaaacagtctatttttatgctgtgataattgaatgtaaaactttatgttcttttatatataaaacaaaaatttctctcctggcaaaaccaaagtgcagtaaagacagttcctaataccaagagtactcaggcttggccaggttgatatcagggagaaagagaaagtagtagggaaagaataaggcagagaggaagggaaggacaaagacacccatgtctgagacataaatggtacagaaatccacaactaatcaccataattctatggctagtctccagcctctcaaaccatagtattctctggtgtattcttgaatatttagatacatacgggtatgattatttatacatgtgaaggtaacatgtgctgtgcaaatgtgaaacctaaaaatcagacaatagatgtaggtgaatatcaacagtaattagaaatggtaggtatagaagcacaatttgtacttgtaccatagttggcaggagagtttattgacatattcattgcagaaaattagatacgacttcagatgagtgtgtgcttccgaaaatgtcgtcagtaagggagtgaggaaaacaagaagggacttagacttgggctggctctttagtccaagtttatgatgagagggagagacatgtgcacatgtgagagaaagagagagagagagaatgagcaagagagagaaagagagagagtaaaagagtgacttatcttcccaaagccgtagctagctaattcagaatatggaaatttaaaaattaaatgtcactgctctaataccaggagagggctgaaacacttttgaaactttctcccacattttcatttttaaaaagtattatactattcataattttaagaaataatcatatatggccattagtcatttttttttacttagtgattaattgtgaactttaatgattttaaacaattaagaaaatgttacaagatgcatcatttcaaattagcatctgacagatttgtaatcacttcacttcttggccctctttgtgtccaccttgacatccttttgggtttactgttttcccactgaactttgtccttcctccttagctttcctcagctgacatgctgcagtttgaaaatatgcatgataaacattcctgtctgtatgatttttccctcctcttcctcactctcatctgcctggtggtactaaagacccattctgtgaagtaatgtcttataaaccaggagccaaaatcctcatgttaacttaagtataaatgagtctctagggttaagctaattgaaatattttctgtaacttggaaataccgcaaaagaattcaaatttggctagcatcttataatccaagttttgatgatagtttcactaggctccatccgtccaagtttgggttagaaaaagaaataaagtatggaaacactgtcagaagccttttctgtttacaaaaagatccagggataccatgagtaatgccagaaatctcatgtgacagccagctcttgtgggagttttgagctcaccaagttcaggaaatagttccagaaagctgattggagcattggagcacaacgatttttttttttaatctgaagtgaataattgtgttccccgtctgctgtccacactgctgctcagaactataccctggtggggtggacatctccccagtgctaggtaatatttggcactcagtaaatactttctgatttgaatcacctacttaatgattcttctcctgaatattccaaagttgatctctaagagattttgtacagttatttagttccatggaaagtgagaatttcagtggtgttccaggactgcaagtaccttgaaaagaccttcatttcattccttctctttcaaggattgtttttatccattccatataggagagaatttgtcctccattaaagatctttccagagggaattccacagccttccattaaaatgtttaactctccctttcctgaaagtcttcttatttctagtgtaaatcctctctgttggtggtattaattgtcaaatcagccagaatccatgctctgtaactagctcttctgttttctgtatagtcacatttctcaagcttttgcagtttcaagttagaaaattttttggtgctcaaaactggttggtgaaaaaaatttttttaagtcatttatttcagttttgtctacactccatctaactgaaaccacttccatcctcttttgtagcagaaaatatgctaatattgaaagactgctggtaaatccatatatctgagaggctttaacaagctccatggatttctccatcaggtttttcaactatctcttattaacagttaataaaatagttcatggatggtttggaagacgactgtagcttttctgagatggtatgacttacagtatatgcctttaaaaaaatttaaaaagaaaaagaacatgacataaaaaatggacccaaaaaaaaaaaaacctcttccatttagggacagagctacttcttctcccagtggatgcgtaatatattatttatgtcggagtgagcattgtgtttttggctcacattccatttggagcatacacaatatgacagtttccttggcttattgttgtatatgtggctatctatttttaatacattgcttttgtctctttttcatgcttgcttacatctgttgttatgaaaactgacataaagtttttaaacataaaagaagtgatggagaaaaagatgttaagagacacacaacatttcaagggaacatgaggtggagaaacaggagcagagtcactactgagggaaaccgaaagcagcctctgcaagataaatgggagggaggttgagaacaagggtgcgcaatcacagaggaaaaaaaacagccatggcgctacacaaagcgtttctaatgaatgaggcttagtgccttttcctccagatcattgaaacattttaggcttccgttgttaaacgtaggaagtagggataataacacctaccttgaaagattgttgttaggattctatgaagtaatgtatataggggcttcacctggtccttggtaaatagtatgtgctcaaaagataaaacagaatcggggctgacaactatgacctgcaggtcacatgcagcctaccactcatttttaaaagaaagttttgttggaacactgccaggcacattcatttatgaaatatctatatctgcttttacgcaatggtagagttgagtagcatgaacagtgaccatgtggccagcatgcctaaactatttactatctgcctccttacagaaaatgtttgctaatccctggtataaataataactattatggcaacgctttaggaatatccattattgtacagacttgaatggtttcccaattcaattttctatctgctatattgcagtaatatctgttgattatgatcctcttgccccaggttctaattttccttttgtaacaacccaaactctgttttgcttgcttttcagtgtaacattaaatgattaattggttcatgtcaccaccaggtggcctcctatactctgttgtgcttctggtaaccaaagaaaatcagaaagtggatcctatacatttctttcaactgtggttgtcactgtgctcacaggcacttctctggcggcttgactgctctgaaattgttcattgaaccctacacttcatgtttggccttgaaacataaatagattcacacggacctttttataaaatgaattaatgcttttaaatgcatacacacacacatacaccaaaatggatttttaataaagaagcttggttgtcactaatagcttcgccatgattcagtcccactctcataggtatacagagttaactgatcttgaagcttcctcaggaaaagacaaaggccaaagaggctcagatctctatatgttaatttcccttgaagggaatggatggacctcatctcagtgccccagtttatgttattttattctatagatccccctttgagctttctttgatcttatttttaagcttcactaaagaccagtgttagcaaaggaagattgagaagccatgtgataaagccctggagaaggaggccagattcccctcgggcaattattcttatcctctcaggcctcattttcttcatctgtaaagtgaggggggtggactcagtgtctctcaggtccattccaacttcagtattttctctttggtgaaaaaaatcaaagattacttcaattagtaattgactttgcctataagcaattggacaaaatcagaattttaagacttaatttcacaggctaaaagaacaaactcatgggtaaatataatacaggcatacctaagagatattgcaagttcaggtccataccaccataataaggcaaatatcataataaagcaagtcacgtgaatcttttggtttcgcagtgcatataaaagttgcgtttacactatactgtaggctgttaagtgtgcaatagcattatgtctaaaaatgtacttaatttaaaaaaattttattgcaaaaagatcctaaagatcatctgagccttcagcaagtcataatctttttgctggtgaaggtcttgcctcagtgttgatggctaccgactaatctgggtggtggttgctgaaagttggggtggctgcggcaatttcttaaaataaggcaatgaagtttgccacattaattggctctttcacaaaggatttctctgtaccatacaatgccgtttgatagcattttacccacagtagaacttctttcaaaattggagttaatcctctcaaaccctgccgctgctttatcaactaagcttatgtaatattctaaatcctttgttgtcatttcaacagtgttcacagcattctcaacagcagtaaattccatctcaagaaactactatctttgcttattcttcagaaggaacacatcatttgttcaagttttatcttgcgattgcagcaactctgtcacatcttcaggctctacctccaattctagttctcttgctatttccaccacatctgctattacttcctccactgaagtgttgaacccctcagtcatccataagggttggaatcaacttcttccaaactcctgttaatgttgatattttgatctcctcctatgaatttcaaatgttgttaatggcatctagaatggtgaagccttttcagaaggttttcaatggactttgtccagatccatcagaggaatcactatctatggcagctatagccgtacaaaatgtatttcttaaataagacaacttgaaagtcaagattacaccttgatccatgggccacagaatgaatgttgtgttaataggcatgaaaacagtagtaatctccttgtacatctccatcagagctcttgggtgacccagtgcattgtcaacgagcagtaatattttgaaaggaatcttttattctgagccataggtccccacaatgggcttaaaatatatagtaaactgtgctgtaaacagataaactgtcatccaggctttgttgttccactgatagagcacaggcagagtagagttagcataattcttaagggccctaggattttcaggataggaaatgagcactggcttcaactcaacgtcatcaacagctttagcctctcacaagagggtcagccgttcctttgaagctttgaagctaggcattgacttctcctctctagccatgaaagtcctagatggcattttttttttccagtagagggctgttttgtctacactgaaaaatctgttatttcgtgtggccacctttatcaatgatcttagctagatcttctggagaacttgctgcagcttctccatcagcacttgctgcttcaccttgcacttttatgttatggagatggtgtctttccttaaacctcatgaaccaacctctgttagtgtccaacatttcttctgcagcttcctcacctctcttagccttcatagaattaaaatgagttagggccttcctctgaattaggtttggcttgagggaatgttgtggctggtttgatcttctatctagaccactaaaactttttccctatcagcaataaggctgttttactttcttttcatttatgtgctcactggagtagcacttttaatctccttcaagaacttttcttttgcattcacaacttggctaactggcacaagaggcctcgttttcagactatctcagctttttacctgaattgctcacaaagcttagctatttctagcttttcatttagagtgactctttctttcacttgagtacttagaggccattgtaggattattacttggccgcatttcaatattgttgtgtctcaaggaataggaaggtctgaggaacagagagaactgctggtgggtggagcaatgagaacatacacagcacttacggattaagttcacagtcttatatgggtgtggtttgtggtgcctcaaaacaattacaatagtaacatcaaagatcactggtcacagatcatcataacagataaaataataatgaaaaatttgaaatattgaccaaattactaaaatgtaacgcagagatacaaaatgagcacatgctatggaaaaattgtgccaatagccttgcttgacacagggttgtcacaaaccttccatttgtaaacattgtagtatctgtaaggcataataaaaccaagtatgcctgtattttttttaaagtaccataaaaagtgtataatttctaaatactacactgcttttggttcatttcagaccataaaaacataaatatatattttatgaaacttcttagacactttccttttccttttactttttttcagtggcagataacttccattggattctctgcagtgtcttttgctgcctgtaatggaaattcagctttctctttgacgtcttattttccacacattttaatttttctaccttcttctttaggcagaattaccaaatgcccctcagtttttttcacagcatggaacagatatattcacttacatttccattgaaactaagtcatttcataatatatgagcaaccttttcttaccttctgcttgtattgtggtacacacattggtagtttatacagtatttgaattgtcacattggatgtcatggcaaatatgactaaagacatttagctgtctatgaggaaaggacctgaatagtccctaaggcattttggtaaagaacagactcacgtttgaattcgaagtctacaccctgggagacctagtgacaggcaatcactctaatttcaaattccctactggggaggcttctctggagagctatatggtcgaaggcagattcatatttgcttgaggaaaaaatgattacaaatttttctaccttgcaaactgtactaattggtgtcaaattcaactaacaatttatgaagtttgcatcactttctgtgtgtttaagcacaaagacatttttcacctgaattctcttattttatcacatatattttgaaaattacatatgtccatctaatacatatatcaggaattaatggtctaattattttacttttacttaaaaggaataaggaatgatgttatctcattttagtgactgtgaggatgagacaataagaattcattaggatactatggtgtgctgtggagaaccaaataaagggaggttatccttttccttaagtaatttataatctacttagaaaagcaaaacgaaaaaacatgaaataatagcaaagatagcaaatttatgtggtatgaaaaataagtgctagtcttcttagaaagtcctcatggaataaatgatatttgaactgaaccttactggatagaatttaaataactggaatagagatagatgcattgcaaaataatgcattttagggggaaaaaaacctcagatctaggaaatagcttggcatgttcctaggattttaccaaaaacaggaagacaaactggagaagaggaaaatcagtgacaaaccatatagcttttatcccatgtgttcagtgaaagtcaataaaaggaaagattttttttaaaaattctagtgaattcctagattcaatgtttcatatagtgaagagaagttatatatacaaataaggaattagtggcataaaagagatgagaaaagttatgccagagatcatattttcttagcatgcaactctgcatgctaagaaaattttgaacaaacatttgtatatggtctttactatgtaacagaaattgttctaggatctttgcagatactggcttatccaatcctcacagcaacctaatgaagtattaacagtattctcaaatgagcaactaaggcacagggaagcacacagctagtaagcaatgcaagcaaagtttaaatatgggcagtctgattccaggcatatatttaatttttttaattttcttaatcaatagccttttatctcattgatttacaaattaaaatgtttggcatggtttctgtcaccatgtttatgtttaatcactcatgagcgattaaatggttacatatgtataggttttaagaagtagtattaataggtaatatcaacaagctccctcctcccttcattaagagtcaagaaaaatagtaaaactttgtcactgtatatatatatgcactgtatgtattacgtactatatcctattaggctggtgcaaaagtaattgggattttgccattgcttttaatggcaaaaaccacaattacatttagtatatactatagtatacactatgtatttagtatatgctatagtatacactatgtatttagtatatactacatatatactatatactatgtactctctctaaatatgtatatattcctgtcttttagaaaatacataatatatataattatatattatctacattatataatgtatattaattatatattatatggtatacattatctatctatctatctatctatctatctatctatctatctgtatttacctttctaatgacttcaccctgatgtgtgatttcttttactctctaatatggccaatctctaataacaatagttacaatacattatttctaagacagaaaataaaaaccatgggaaatttgcagtcttgctttcacatcggtagcaaaccaaaaaatcttattacaaaactcatctgtgttaaaatcaaagacttcttattaatggtgtattttatatcgggatctaaaatttcttacaagtatgatctatttacctcttaaaatacctgtgttagacaagtggcaaagatagctttgtccctgttttgcagatgggatgaccatggaaatatgaaatgactttccctggagcaggtggatcaggtggatcaggtggcaagccaccaagagaacaaaggcagaagtaacagttgcaggattgatggtgcccagtgaaggtgcttagggaaaattctcaaaaatcacatgttttggtactcacatcttcttgaaaagttatcccttgttgtggctataagctgtgctaaatggccacatccttgtacttctgcttcttttggttctaatatcctcttaatgaatttttttcagcctttatgcaaaatgtttaagtcatcaacatcatattctgtcatctgtttatttcagggaagccattcactaagaccttttctccagctgtaatttgcttccttttctgcaatgctgtttatttttatgtagtttttaggatttattccctgtagactaggaattgtttttcctatctggtgaaacctttgtaacttcccctatttacttattaactttctctccatgcatctatgcatctccatcattacattctccaaattttcacttcttcctcctctttacttttatcactcttgtctcttatcacacacacacacacacacacacacacattctgtttctcttcgatgtaagagaaacttctttgaatatttatagcagactcctttacatagctgaaaaagtgctcaaaagcagttataaccaaggtttgttctctatggtcttagtttataccaacaaatttccacttgtaccctagagcttctttaaactgtgaactgtcattcttctgagtgacaggcatgaccatcagtgagaactctcctatctgcccttttagcctcaacctcaggctattaaaaatctgttgggtttttgaggatgagcctacgccaaatgaatctggctaaagaggttcaagagtagggttcttaagtatgtgttggccactccattgtcactttgtatggcattcttgactttatttacattatactcttagggcccaccaatttcttcagacttctggactgagatctaaagatgtattttcaagagcagtagtatggcttaccaagctaagctgaaattcctcctgaaattctatttgtggattttagtacaatcttactgaccttgggcaagtcacttagcttctatgtatcaattttttatctgtaagacagaagtaatattactaactttccccatgggcttgccataggagaacagcaaaaaaaagaacaatccattgaaatgacagtcaagctttctgaggctgcagcagcagcgtttaagccttaaagcctaaaatctctaaaatttattttgtcaaaatatttttctgacaaatatgggtaggtacccaaaagaaacaaaaaggcccaaggggtcaggggatgggtagaacagaatggtttttaagcctgtagcatactggtatcggaactaaaaattagacttagcctttcgcattctgatcaaatgttcttgctatgagaaaacactgcctcataaaaggtgcccttaaaatattcaaagaactactgccaccttcctcttttctttgataggttttcacagaagcttttcttgtgttaaccgttcatggccatgataaacaattaactttgttcatggtttctgtctgaaaattgagaataatattcctgtattggatgtttcaccaaataagtttttcacagaaaatgaagctcaaagataaagcaatcacactgtactcatttctgtgtactaacactgtatctggcatatatttcaacagctctctatatctgcctggactttcttttgggagaaattcaaatgaataaatattttccaacaacctcctacatttaaaccataatgctaagaattacagtgggtaaagagtgaatgacatgtggtctctgacctcctacagtcccttgtagaagcttataatctaattctgaaaccatacttatcctcatctgaagtgaaggcaccagagatattcttaaaaagtagcataagaaatcagatattttcactatacagggatttgagcagtcaccaagaaaaactccatagcattatggatctgttaagattatagatgtgaaaaccctttgaaaattaaaaatactctgccaaaaaaaaagtcacaatgtgaatacataaaggtataatggcacttgcattgtgttttgggaacaggcaaccctggaaatgctttgatcagctctgtcttaacacctaccatcgcatggtaaattctgggtgcagcctctcagtgctggagtccttagtccttggggaatgcccatttgcatgaaacttgaaaagatagttttttgatgatgacagtaagggcgataatacattcagcctttatttaggcaactgattctcatagatttcaaaagtcaccatgttctgcagcaacacctttttgataaactacaatggttacagtgttctacttctcatttttcttcttatcctcagagagaaagcaagatatctctttgaggaaatatcaacagagttaacataagaaatatatagtttcttccttatgaaattaatttggcattatttttgaggtgtggagcatcttggcaactgctttggtttaaaactctatgtgatttgggaaaagcacgtttcagaatgtttaattcagtgatacaaaaggcactaatgaaatatgcatgtatgaattttatatcatattagttccctctttcttgaaatctgaataaaagccaaacatctggattatgtttgaaaagcctgaatttccaattttcagagagatccagtctattttgacattgcacacttagccttcacatttacagtgtgctattaacattacttgcaattgtagaaaaaaaaaagtccagatttaaacaaacttggtgcctcctaatgctaaaaataaatctatatttgaaatggctgctgctgctgcacaaccatacacatccatagttcaggcttcttcagcattttcattataaatacttgcactgaacaggcctataattcagctataaagatatgtggtaacctatgatacataaattctcctttgattgtatattaaaacaacaaacagcaattcatacatcacttagtttgagaaactattcactgactcaaggctttctgagggtctcaaatattcaagatactctgtggtcaactaaagaagacatagccaccatcttttaaagtttattcttcaaatttacaaggcaaataacatttatgtttttatagatatttgggtatattttagcatctagactaaaggcaagtgaatatttatggttttagtagcttagagatgtaaatatgcatatcattgctttatctcatttcattatcatagttaacttaggagatagatggtcaatcaagttttaggcaaatagtagtctgtccacacaagaggtcatggaagatagaagaatgtgactgttgtgtttgaagtttgcataatggtaattcttcagtggactttaatttactacacttaacttgttattggatttcttatagcacatattaggtaagtgttttcttttgttatgtttggagaacagctagaatcaaagatttttcttttccttttcatcttattttgtgttattagaaaattctaaattaagtagttgtgctgagtgcagtggcatgcacctgtagtcccagctacgtaggaggcttgaggcaagtggattacttgagcccaggaactcaaggctatagtgtgtgttcatcatgcctgtgaatagccaactgcactccagcctgggcaacacagcaagaacctgtctcaaaaaaaactttaaaaaattatgtagtagtgccaaattcaacagaaatagctgtgtttagaggtgtttgtttaggttgggaaatggaaaacaaaataaatgaaacttttacattggaaaccttttttaaaggagaaaactgagtttcattacattaattgctgcgcctcaagtcttttttccttcctacattgcatactctgacagatattacataattgcataactatttttactatgtgcagacatgacattacaacagccctgatatggtgcatcataatgaaaccataattagagtagtcatgatgtattatggcaatgatccacatcgtcactaaagtgcattggaatgcacagaaaaccctttgagatgtgtagattttcaatgtaatatagcacaactctgaagtttcatagcatggaggagaaattgcaattatgcccatgctgctggtagcaaggattaaaatgcacatcttcgatatctaccgaagaaagtctgtattgatgaaggaaatttttgagggtgatatttatcttgaagtttatgtcttttaaaaaaatttacaggaaggacgttgttgaaatatgaacctaaccacataaattctatagtagaagtctcctgtatttatcagataaaaagacttgaaagtttcattctgtacctcaaattcaatgaaacgcctctctaaagtaggatggattgaagacagttttagaattttcagttaaccctgccctttcttttggttctctgtagcccatcttagcttagattatacagcttacattttatgtggttgtgtctttgctccattgttgttctctcaggtttttctgcatgagaatcttgtttctgaatcttgttctagcgagtgacagcttcttcttaacttggtgattttcagtcttggcatttcttttacctgggataatgtaattgttatggctgatcttatgaatgtggatccaaagaagctcaactttctaaaacagagaggaaatttaggctctatctcccaggccaatcctcattcaatgcttcatttgcccataatatatcccagccaggtagacttctcatctctgcctgaacacctctgatgaatgggaacccactatctctcatgctgtgttcctactcaagcttcagcatttgacccccagtctgacctctgaggtcagatggaacaaattaatattttttatgcaaaagtcctctaaatattcaaaatcttctaacatgtccttcctctcttctttcacctctaacttttatttgccctcttagctgaatacctttagctcattcaacagcttgacccttggggaagtattgaatcttctcccttactgaagtgcttttttttggaacatttaatacattgtctaggtcccttttggaaaatggaatgcaagcagtacaaggttggggcctagcaaatcacagtcaaactaatatatccattacctttctttttttaaccctgtgtttttcttaattcaatccaaaatcatgtttcctttcaatatggacaggaagcagggaaatattgggtagaagagggcagggtccctggcaagggctccaccttcaagcctggaaccgcagccctaaatgagaacatgcattcctgttttcctgcccgaatgttgccttttccaaaaccaccctggcccaccacgccccctaccctgtacccgtaaaaaccccaagctccactggcagagcagagcagtgcagcacagaaggagagaagagaagtgtctgaatgttaagaggagttcggctggctggggacagagaggagttcagccagggatggccaaactctagggaaagattatcttctcactccatcgccttcccagctccccatcccagtgagagccacttccatcactcagtaaaatcttccacatacatcacctttccatccatttgtgtgacctaattcttcctggatgctggacaagaattcaggatgcaccgggtgcaggaacccaaaaaggctatcaagctgactcttcgctaagctgtttaacaccatccatggatggcaaatgctaaaagaacattgtttgtaacatgtgccctctgaggctccagaggttatgggcaacccctagatgctgccgcgggccagtgcagtgttttttcctgctgacacccaaagtcacttgccctggctcctgcacccgctcacctgcgggctccccctcctgcaaggggtttaactgcaagtggccgagtaaacgagccacacctctatcacaagtcttgtgaaggggtcaagggaactctcctgtctcacttttttaaaaatttacatctaccttctattgtctgttgactcacattgaacctaaaggcaagtgaagccttgttacctccattctttatgcagtttaaaactttttatcattttggagtgggggtagtggggtgaaatggggtggttattaactctgcctgactttacatttgtcatttctccttcttagatttaactcattatggcagcatgttttgttccttttagagtctattatcatctgaaatagatattataaagtagttgcctgcagattcatatccagagacatagtttgatctgtgtagtgttaaaaagttttaatgcaacatagaacaattttgagacttcacataatatatatatgtgtgcgtatgtgtgtgtgtgtgtgtgtgtgtgtgtgtgtgtgtgtgtgtgtataggctttaaaatgtatatgtcttgccatactgaacccatgttgaagccatatttccacagggtaatagctggcagaactgagttaagggttgccccttttagatgaggcatatgctctcccatcctccacagttcacactatgcctgcttatctcttactgatattagatattagtaatagtcacatttatgcattgtctttatttaaaaaaatagttctcttttttatgacagtagcaatagttagaatatgaaagagagaagaggatttatccttgccctactcaattccttgatatcatctgcctggtaatgaggtgttggagctggctaatactgacttatgagagcatattgttaaatattcaggaattttaccagcagcaaccaccattggtagattggaatcagccacagtgggagtatttacaccagggaaatcaacgaacattacaaatcaggtcttttcttcttcttcttcttcttttttttccttagagaaccagtttactagcatactgctacatttaggtatttgagtttatgatctctgaactaaaatacatattatactttattgatcattgacgttagtataatctgccaatctgatcaatatgccatattcatattttctttatctatgtcattaataaaatatttaataagaatggaccaaagaagagacctatggcataacatccattaaacaatgatctttacatatggttgttcaacaggtcctcagtaaaactctccgtgcttctaaatgattgcatccatctgctcactttatgcttatgaaaatctactggaagtgcatacgcctgatccaggaattcacatccttggtgaagggatttaagtcattagattttgggtgtatgttcttagcaatttaattatgtttaaaatctggttagtagtgtagtaaataactggtattgctacaaaattgcattgagaagataataggattgaatttctacacaagttgacactcaattaaaatttccatatatccagtgagttagccagttcttggctaaggagttagagcaaatgccttcctactaagccgatcacttcaaaacaggcaaaatttataatagagtcaaatcaggactgaatgcatcaacaaaaactggagttcagcttatcaaatacagatcaaaagcaagaaatagactagagagcacacgggatatttcttccttaaatttctctattttttattgacactggaggaaaaaatagcacattaaaacctccttgctgaattactgtcctaaaccaatagatccgtggggcttgttcagctaaaagccacaacagactttgtaatgcaatgatgtaatcttggcatcttggctttgtgtcatttatattcaacctaaaaaaaaaaaaaaaaaaaaaaaaaaaaaacaattttcctgaatagacaggctgacaacaatattgttcagtgtgggtttttatttggattctctccaaatggttcacatgccttcacagtaacacatgcctgcttacgttttttgcctgaattctaaacttttccccttttactagctttctatttttcttttaaggtctcagttatgtttgtaaaactaaccagctctaccacaaaattaggatgtatcttgcagagagcattcattttactttttgcatatttttcccgaggtcatgtcaaggttagtttgaattccatcctacattaagacttctttcacagctatttagctcggcagcctactccccgctggggtctgccccttgggcacgtcaaagcttcagacctgacaaatcacacacagatgaagctgtacagttttttaaacagtttcatcagtaacttttttttctttttcactatcctccttcatgttgagatttttttttctctgaattaccatttcaggaatgttgatttccgtttgagacaatttgtttttacatcagagttgcagactagcaatatcatttattttatagtaaaggatattaatagccttctgtcaccaagactgcagacctacagaccattcctgactattctaactgtaattgctttattaaaatctattcgtaacaggaagtgtagtgttggaaatgtagctatatcatagagtctaccagaatctgaaaaaaatatcaaccataaaaatgcagtttataaggtattatgagttgagcctggaaatgtttcctgaatggttaataatatgctcttatccgtattttagcaaattatgaaactaaatgatgcaactccatttcctgtttaattgatgaagttaaagtccttggttgctaatgagtgtattagcaaacaatgtcccctttacaggcttaagtagatcaggatttttaaaaagcagcttactatccttatttttatgggatgaaaaatattgactgccacaaaattgctagaccaactgaagtcatggtgtaattatttctgtgcagtcattttggcaatttccaacgaccagattaaggttttctagttcccacactagaaaatagttattttcttttacacaccatagacttttcattacattttcattcaggacaaacaacacctgaagatctttactgcagactaaggagaaaacttagaagtgaggggaaaaaataatatttgagtgattcttctctcctcagtcttcttttacagtttgctcaacatgaaagtacccaaatgaagggttctgtaaaaggttgcttggttgaaactaattaaagacaggtctaaatagaaaaagaaaagaaaaagggatcaaaggaattacattaggtgtcaggacatcatttgggagcgttttgtttaatttttgtaatttgattccaggaaaacactaaattctaaaaatgtccattttttgccgtaattttatacttgtgttatttttgcaataagatacatgtcaacaggcaaacatcttgaagagatcattttggtattggcgcattaacacgttatggtgaaaagagaggcttgtgcttttcacgcagtgcatttcagtcttcaattaatgtgaaagcactacaatgcctatgcaacttctcttgcctagtggtgcaccatttatcattgcagttttacattgaccttgacacccacttcattagaataaagattgtctaccatttaggttacattgttcctctgcacagagaccccatgcaaatttctgttcagatagaagagctgcggggctgtcagaggtcatctgcattaaatgattgcagctattttccaactgcttcttttcattctactcaattcaggctaggaggatcaatcaagtcctctgcctgaaacagtgggactgctgggaatatgactgtttttggtagtagtggatatgccctaaacagtattaaatatttaatataaactcattaaaggccatacaaaggcttcagaaggatatcaaatttatggaaatatctaaggggatagagaaccgttttaaaaagtaaatagaaaaataataatcaatattataattttacagggtatgatcaagatagttcttaaacttactaaattttacctataggagacttttttctcacccttgacatgggaaggaaagaaaggagacaggtagacttggcgtccttatgcagtattttttatgaaattgacatgaaagttttcagttatttgtgtttttatttttgttctgtaacagtgacttctagtctagctatatttatttttaaaggcttagatatttgttatttaaaagaaatgactggagaaataagttgccaggtctcctacttaagttttctgagtggtatgattggaattaaattattaatggcagatactttaaaaaagattgttttatgatcttctattagggaatttgcaattcattttaatatttgtagtttgatttatattaaagataatgcaatctatgtccaattaacagtacatggccagtgtaatgtgatttccagatcatgcaaatggaataagctagaagagggggaaaactcaattcttaacctcaggtgtcatttgctgtgcgagttctggcaattttaaatgacattgcactttttaatttttccaaaggctcagcagcaaatttatcccaatcaggaaaacctattattaatttacaaggacaattgtaggagtctttataatttctctatgcaattactcaccataaattctactggtaaaatacaaggagtttgcaagaaataacaactattatttgtcttgggcttgaacccttttcttcagttttgaacatcttcttgaagtgttggtggtactgactccatgtgcagcatcatatgcgttatgagatgctacacacaagtcttctgaaaagcggggcagcacaagagctgctgcacaggcaacactggcctctggcagattcctgcactccgcatggacagctgagcttggaccctggacttttatataaaaagactctttgttcaccactgaatggcattaggcatggacttgctgaggggccaccatgaagcctcgaatgaggagggcaaacactagccagaaaacacgtgagagttgtaaatagacacatccctggatttttttttttttttttttttttttttttttgcaaaaatgcatattttcacacattattttgccagtagtttggtgttttggtatgttcctagcatttgctttcttactgatagactaagtaagatatattttattttctcagtgtattctatctatctatctatctatctatctatctatctatctatcaatcgtatctatcagtcaatcatgcatatatgggaaaggggatcttgctggataaacaggtgtttgtggcattatatttgtaccaggaaagacattcaatcctgtcattctaataactagatcattttccttgttttaacttttcctaatataaagtcaactgaagctcagttaaaagtaatatggtgtaagatgtaaatgctcaaaccctgatgacacagaatacaacagccctattctaataatcaagaaatgtctttagtttaatttgtgtgtttctcgcagccaaagcttcactctctgttcagcaatgtctggtctcttttcagcataaccaacagaagcaccatacaaaagtcttacaatggatgtcttaatctctctgtgtgcttttagagcattattttgaattccatcatgctgccttttttctttcctcttctgaagttttattacaacagcagaattcccagggagctttgggggcaaggttcacataatatagccctcaagttttgcttaggtggaagccatcccccaatcctggccatcttttgatgatccctctatttcaaaaagattcactcggtagagtcttatagcattagctgtatatagtttattttttattttttttatttaccagacagtgagcatctacaaccctttcatgatgttttctttctctgacctcacagtgacaaggcatcttgttccttaacattgagggaggcagaaaaatgcttgagttgctcaatgtgtgccttctataccagtttcaaaatggcttattcttctggtttccatggtgacaattaacactgtttcaaggcattgttccagtctccatttgggcagaattttcggtgtgatttctaacaaaaaaaaaggagggggacttcggtgtggcggggaagcctttagcgtaactgtcaaaaaagttatctcaatcaagtcttcatgcatttctaagtatatttatttcagaaattcctgtttttgctggctttgttttataattcagttttagcatttgtgctaaaagtaagtactcaataagaattttctacaacttctttagttcttagttaaaatggtgggctagagtttgtagttatttttaactcctttttttaaaagtttttctttatatttatatacacagggatggcatttagaatagtactgtcctgtgtctttaatttagatcattcacatatctattaggaggcttcattagtcaaaattgaattggccaagcaaatacacttaataatgtaaatatggcctttcaagagagtatattttatttttgactagacagagaggcccacagcaggtgctgtggggaaattaaatactggatgcttatttaccttagcactcaagaaaagctttctgactttaactttgctaatctcatttttgcctattgaagagtagtctatatcataacatccccagactacaggacacaatggggcagcctctgctcacttactgctgtgggtggaatgaatatgaagattaaattatcttctcaccacaggataaagtagccccacttgataggatgaccgaaaactgatagagctggcagttgattttctgagtctaatgcttctgaaaagatgttaagagacagaagagcaaaaacatactagcatcaacaaaaatataagctcctgacattattacacatacagcttgagcccctaaacatattagatttaaccttcaatatgcttcaaaaattaaaataaatattttcaccttaaattatataacattttagtacctttcatccatatatcaatacatctaacaattaactagatactcttagcttttgtattagagtttgaaggcattgtccatcaatcacatcttaaatcaagctgtttagacagtcggctatatggtgacaaagactgagagcacacataaagacaagtttcttttaaaggtaataaccttttataatagctattgcagtgactacttatacgcatttaacagagaagattggtttattacatctaaaattaaattaattgctttttatatttttatttgtgtaagactatcatttttatgggacacatctaagctgtttcctttcttgactgatgtgctgtgtgagagctgtttaaagttggggtgaagagggggggatgagcttgtcacaagttaaagggataactggtagaggccattcccaagtggcacagccagaggactctttctgtcaatgagtaataccatgtggcataagtaaaatatttgaataagattttcctgcctgcctgaaatactggttcccccaatattatgtggaaatcttaccaaattaattatgtaaatctttgtcagctatatcattttagatgggaacctgattacataaagcagattgtcctctcctccaatcatcgctctgacaaataaaacactgtctaggtttctagaatgctcctgaatattgaatccagaaaattcaagtggacagtgtgtttcctaagtgctggagtaacatggtcctggtaattgccttccattagaaaacgcaatcagaatttctcctgtatcacaggccagattctaaaagcgctctaaagcaacccttgattttctccactatgcatattcatgtaattttggatactctgacaccctgatcaacattcattaataatatgaaatgctttaaatcacctcatttaaaacattttgttctgtgatccacaaatgactaacatttggagaagtttacataatacaagtgatgtgcatgtttagtgtaaatgaaagattaaaatatgaagctaaaagtatgcaaacatatgcacgcaaatgctgaagatctattaaccgaaacagtgatttcataccttcttttcctttaatctgcttccaattgtatttttgtttgggatcttatataatatcatgttttcaaggtgagtgaaatcacccaagtgcttggggacatttgaacttattgatttatttatttgcccagcgaaaagtttttctcattaactctgataaaggtgcttatcttagggcaccgttggtcatgtagggcaaaagaacaaaatactaccatggaactcagtgacctaaatttggtgcctggaagaaaaaagttttaaaattgctattatatcttggaaatgtgctgaaaatgtaaaatatgtttaatattttaaccagaatctagattttctactcagaggagtttttacatgtacatttataaagtacagtcatagtcatttatggctatccataatataggactaactatggagttatccaaatagagttatttgaagagaatcaccatagtaactgtcacattaaatagcacttacattatctccagcaaaacatcttttaggagagactctcttggcagtttgttagaatataatacatactgggggagagggttctgtagtcaactatgatttgggggatattttacagtaatcaataaagaagcatagatttgtaactactcctaaaatgttggctttcctttttctctatatatgtaccttttctccaagcccacacagagtttttaaggaaaagaaaatgaaaacaaaatgttaactgagaattcagataacttacataatctttatgaataattttttttctttcactttgaaactggtcctttaggggaagagatgagaggtggacagcactctggaaccaaataatggccaaaattaactgtaatattaaacccccctagaccagttactatcctatttagaatattttaaagatcaaatatgtgtataaacttgagtttaagaagtaaatcttagtcaactaaatgtaataactgtgtgtgtgtgtgtgtgtatataatatattcagcaatattcttcatctactcaaagtacttaggtttagcctccccataaattttattgggaacaaaaacttttaatgctcgtaagcatcacaaattctgtgttcaatgattttctaagaacacctctctccctaatgatatctctttttctcttttcattttagcgatacagtgtggaaatgtccatcagacacctgaaaaagacggagctgcttagtaaggttgaagctttgaagaaaggtggcgttttactaccaaatgatctccttgaaaaagtggattcaattaatgaaaaatgggaactgcttggggtatttgcatttttattactgtttgtaggttatgtgtacattttttgcgtagtgaagtactctgtccgatttctaatttgaggcacaaatatctctctctttcaattcactacctacgtttcaaacaagctattcatgctattatgggaaagacactgcttttcctcttctgttgattttttttttttctgagcttgtcccctctcagattttaataattttggttctttaatacatgaaaaagtaagtaaaatatgccatgtattatgggtatgcaccaagtcaactataatacagtatatctgatatatactgactgtcatgcttgaatgaatgttaatagaatttattctgaaggtacatgtgagagacatctactgtttaactatttactgtacccttaagatgaaaagtggagttgtcactacagctttcaagtcacactaaagccaccaaaacaaagatgcaaatttgacccaaatctgaattgcagaattgaatcagcctgtgttttgtgcctcaatttccagctcacttttaacaaaagccaaaaaaaaaaaaagtttcatgtaattcatttcacgcaatgatgggctgggtctcagccaaagactgagatgcaagaatctggcaaaaaggcaatatagagattctgttacccagagaccaggatggcactgtgcaggagacagtactgtccttttgttggaagacagctgagagaaaagttaaactgtattttttcatcagcttctctcctaaattgccttcacttcaaatcaagggtaagctatatttgtcaattacctaaataattaattataacagccaagtatggacgatgtcagttatggagcataattttgcatgccttccatttttctaccttttaaaaaaaattttagataaataatactccaaaaatattttgaataaaaagctcttcatgtaccttgatgatttggaggaatgccagtattctgtttatgccatgcctaatctaggagattaaaaaactgcaggtttaagtccttgtttctcatttaaattcactacactctgcagttgtgcaaagtaacttaaaatgttaaaagtttttcatctaacatattgttgccttttaataataattaatggctttcactttataatacggtgacttaaatcaaaacctgccgtattctacagcattcattgatctcaaacaggagaaatgtggttagtgtatgacattttaaaaggttgtttactacatagataagaatggcaaccttatgtgcttgataaagtagcgataagtctgtttacattgcattttaatatatccattggtaatttgataaataacaataatatttttagaaaattgtttaagttatgtcacatgtattgcttcctcaacagaattttaagtcaacattattttgaaaaaagaaataatatttagctatcctttatgaatcagagactttaaaaatagttgccattttgacaaaaacatcattcaaatacaacatgcaggtttgcagtgagagagtagggtgagggaagatttttttaaatcctgtaccacactaacaccaccaggcatactgttttaattggcatgattacattttaattggcatgaaaaaaattaaagacaaggattttaacttctaacaatagtaaaatagaggtatatggtttttaatattactttcatctaaggtgaacagtgtggaatggaaatacattagaatgaaatgtcagtggtgcgtacagtttaatctgtgaaattgtgtcccctgtgctgcatattactctgtctcaattgcatattaaacaaccctatcaaggcaggcattggcatctgctgtgctgacacaaattgtgaattaaatgaaattgatgtcctctgtcgtatatttatgaagacggaccattctctgaagtattctgtttatgaagaatttatgattgcaaactgttccagaacaaaaaagtggcaataaattcttttttgtgaccctaccctccaagggcattgatttcacctcctgctgctacttttgttacagcgtaaaaacaatagctaaatctggattccactgagggtcttcaaattatcagtattttcaccatgaaaatacaagggtgttgccaagaaaggctatttttctgctacagtctcctaaagatactatttacagaacactacacaccagatgaatgtttgttgacttaattttatttatgttttaaagcttatttttgtaggtttaatgcatcattatagatttaaatcctattgattgggactgctttccaccaaaaagaaaaaaagaaaacagccctccccgacaacactctcctgccatagtggttaatttaagtaggcttctagtgtagtgaattggggattattttaacacatattcggtattagaaagtccagcatccagaaatgcaaaatggaaagaattgtgggattgaacaatttccaagtcaggtaaaatcaacaacatcaccaaggaggcttccttttcttaaaaccctttagttatatggtttcggaaatatgtcacaaaacaaaaaatggaatttaattctccgtgtttgatctactcttggcctctttagtatatttattaaacttacatctcctggacattttatgtggagagttttttactataaactcctatcatgataattcaaatgaatttttctctgtgaccaaaaaattcaaatgaatttttatcttgcgaactatgggctaaatctcctttctattaaaggaaagtaagtgaatgaggtcttcttaagtatccgctggtactcagaacaacttgcactgagaattcgaatactaaatggaacaatgacctaatctgaactgaatgtcagtagtgaggtggcaggtatagatggactcttccaggtggctctcgttaccaacaaaactgtggtgtgtttttggtacctaagttaatctatgtttttgtttttttgttgttcgtggggtttttttttgtttgtttgttttattttttgttttttaatctgatgcattagaaaaccctaggagagaagatccaggacacaatggcagggcacagtgggtcgagtccacgtgacctgctctctcctgaaagtggaagcctggtaaggcagctggaggtcaggatcaaagaactgaaaggatggctaagagatacagagcttttcatcttcaattcctgtctgagacaagaaaaggaaggaacaatgaatactgagaaacaactgcaatactttaaggtaataaaaaaacaatcaaagttgataaaaagctctttttatggtagggatgaaatatttatcaagtacatgaagtattatacccatgtatctgtgtatcactgtgcacctaaatgtttccttgaatttatagacaacctccacatttcttatatgtctctatgtgtataaagatgaacattaagcatatcacatatacattgtagaggggaaatctctgctgcatgtgtgttttttgcaatgcttgttgagggaggactttgatgagttaaaagcagaccagcaaacactaaagattactaaggcctttgaaggacagacctaaatgttctgtaaataacttggataaaaatacttacacaaattgatatgataaaaacacatgatttaatcgaagtccattactgctaacaaaaggaaacataatttttacatatgaaagagtcaactatttatggagggaagaaataatgtaaaacaagttcacacattacaggcatattccattatagaatataccaacctgagcaatacaatattcattttcactgtatgtccatggagaggcatttcccctggtttgttcctattgtttacacaatatctatttaaaagcaatttaacattagaatgttttcccctattgcccaacctagcccatactgcttgaatctttccataaatgcagtcattatttgggttctggctagtgctggcctgaggctttggggttgcagaatttgaatttggtggcaataaatcttcatcatgagaaatcttaaagaggagaaaaaggaaaaccaagaaggaaagaactttttggaaccaagcaaccatttcttctcaaagcatcgtaggaccaggttttattcatcccaccttgcctgcaatcatccagtaatccgtcagaaaatttagtcacatgtgattcaccttctctctgccaaacaggcagagtcatcttgctcacctctataaccctagtggaggcaccctcaaagacaagaccacaatacttcccaataaactatctgcattgcacacctgtaaatttgctttcattgaaaacctcctcttctgccacttaactgacagactaaactggaagttaaagtgtcttgccaaagcaaatgggtttatggtctaaaatctaatacccaggtgatttgctgttttatctctacttgacccatcctaacctctactgcagggagatggaatcttcagatcttttaatgaaacttttcaaactttttgagattatggagccctgatgatttttctttatgacttgaaactagttcctttctaaagttgaccttgaggagtttgatcagatgagttagggggatctagcataatggcacctttttattgtttttaaagaaaattttattcatgactgttggaataaatctttttcctagccagaattttaaataattctgagctatttactcttagtgtttggtatatgattaatccagtgttctgtgtattaccacattcactggaagaatggaagcaaatgtttgtaatataataataacgtaatataatgtttgtaacctgtcaaaattataattggtaataagcatgtacagagtaacaattttttacttgccataaacccaaagaacaggtacactctgcctttctaagtgatgaaacagctcagacaggagagtgactgaagaacctttttacatatgggaaaccctctgccatgctctgcctctcgtgggttcctaaaggtctcctgccatgactggtcacacagaagaggacaggctttatctacaaggtttagctttatgattctttatcctataaatcctcagccttttaacataactgaagtcctttatatgacactaagagtaatgacagataaactacaatgtactctccaggagaatggaagggaaggtgctgcatatgaaaaggaaaacccatagctttgtagacagaactgcgtttccttctaatagattggtctgggatgagacaagggatcaggatcttcagttttcagaaaaaaggacaaaccaattgtggaacattttccttttctttaagcaatacgtatgagaaatatgggattagacacagaagaaaattctacccaacaaagaaagagtccaaactcagcaagagggaagaaacatgaaggtgtggtcctaagagctctgggataggaatgcagaattatcaaggaatgaacacactctgataacaaaatgcaggagagtatgtcagggatttaatgaggccagctggcaaagggtccctttgagctgtgtgtgtgcagcttcaatgccattggctggaaagcactactttttaatgatgacccttcagagagaaaagaaaataattacttaatcatatgttccttgtatcccataaccaaattcattattctaaagactccaaatgggaagatattattcattaccagctaaagaaggccacagcgctggcctggtcccaaaacgagtcgaggaagagcaagtttagacctgttacaagactttgtcatcaagaaggtgaatgagtggattagatttaataaccttgttgatgattaataaccgaaatctgctttaataatttaaatttgaccaagcacttttatgcatattgttatacttaaaatatacactaattatgtaagtcagaaaattatgatgaccttcttatatgtgtgggtatttatctttatgaatgaagaatttgagttgtggaaaggtaatgtgactcatttgaatccccatagcaaccagcagcagagacagagggaaaatgattgtctttaagtacaaattcccatcctgtcattcactgacttttcaaatacactttgaaactttgctttactttaaatcaggggttgacaaacattttctgtaaaagccggataatagtataatctctgtatgaattactcagctctgccatcatagtgcaaaagcagccacagacaatatctaaatgaataagtatggctgtgttcaataaaactaatttacaaaactacttacaaaagtagggcagtgggcttgatttgacctagaggccatagtttcctgaccctgctctagattacaaaaattattataagcatgggaatagatacagtctgtgtcatctttaaagaaaggagaccatgctacaattgcattagggggacaaaaagttattttaataattgtaacaaccacacctaatatgtatgaggcacactttctaaatgttttacctgcattcacttacttattcctcatcaccatcctgagacatattatagtatgatctgctatttatattttatttttatttttaaaattttgaaaattcgtgggtccatagtaggtgtatatatttatggagcacatgagtttttttgttacagacatgcaatgggtactaatcacgtcatggagaatggggtatccatcccctcaagtatttaccctctatgttacaaacaatccaattatacttttttagttatttaaaaatatacaattaagttactattgactatagtccccctgttgtgctatcaaatactgggtcttattcattcattctatttttttctttgtacccattaaccaccctgcttgcccctactaccctttccagcctctggtaaccatcccccctactctctatatgtgtgagttcaattgttttaatttttagaggccacaaataagtgagaacatgcaatgtttgtctttctgttcctggcttatttcacttaacaaaatgatctctggttcggtccatgttgttgtaaatgacacgatctcattcttttttatagctgaatagtattccattatgtatatgtaccacattttctttatccattcttctgttggtggatacttaggttgggcttccaaatcttggctattgtgaatagtgctgcaacaaatatgagagtgcagaaatttcttcaatatactgatttcctttcttttggatatatacctagcggtgggattgttggatcatatggtagctctatttttagttttttggagaaccttcaaactgttccccatagtggttgtcctaatttacattcccaccaacagtgaacaaaagttcccttttctccacatcctcgccagcatttgttattgcctgtcttttggataaaagccattttaactggagtgagatggtatctcattgtagatttaattttcatttctctgatgctcaatgatgttgagtcccttttcatatgcctgtttgccatttgtatgtcttcttttgagaaatggctattcaaaccttttgcccattttttgatcatattattagattttttccctatacagttgtttgagctccttgtatattctggttattaatcccttgtcagatgggtagtttgcaaatattttctcccattctgtgggttgtgtcttcatcttgttatttcctttgctatgcagtagctttttatcttgatatgatctcatttgtccatttttgctgaggttgcttgtgcttatgaggtattaccccagaaatatttgcccagatcaatgccctagagatttcccctaatgttttcttgtattagtttcatagtttgaggtcttagatttaagtccttaatccatttttatttgatttttgtatatggtgagaggtagggatctagtttcatcttctgcatatagagatccagttttcccagcaccatttattgaagagactgtctcttccacagtgtatgttcttggcaagtttgttgaaaatgagttcactgtaggtgtgtgaattcatttttgggttctctgttctgttccattcgtctatgtgtctatttttaggttggtaccatgctatttggttaactactaattctgtagtatactttgaagtcaggtatacagttttattctttttcctcaggatagctttagctattctgggtcttttgtggttccatatacattttaaaattgttttttccatttctgtgaagaatgtcattggtattttgatagagattgtattgaatttgtagattgctttggatagtatggatgttttaataatattgattcttccaatccatgaaaatggagtgtctttccttttttctttttttttttttgtgtgtgttctcttcaatttctttcatcaatgttttgttattttaatcatagagatttttcagttctttggttaattcctggtatttaattttattttaggctattgtaaatggtatcacttttattaatctctttttcagattgttcactgttgacatatagaaacgctactgattttgttatgttgattttgtatcccgcaactttactgaatttatcagtttgaataggttttttaggagtctaggttttttcaaatgtaagataatatctgcaaatgcagataatttgacatcttcttttctgatttggatgcctctatttctttctcttgtctgatcgctttagctaggacttccagaactatgttggtgacagtgaaagtggacattcttgccatgttccaaatcttggaggaaaggttttcagttttctcccgttcaatgtgatactacctgtggctcggtcgtatatagcttttattatgttgagatatgttccatccatccccattttttttttaggatttttaccatgtagggatgttgaattctatccagtgctttttcagcatcagtttaaaggatcatatggtttttatctttcattctgttgatatgatggatcacattgattgatttgcatatgttgaaccattcttgcatccttcagataaattccccttggtcgtgatgaataatctttttaatgtattattgaatttggtttgctagtattttgttgagggtttttgcatcagtatttatcagagatattagcctgtaggtttttttttttttttttttttttttagtgcgtctctgtctggtttcagtatcagggtaatactggtctcatagaatgagtttggaagtatgccctcctctattttttggaataattttagtaggattggtattagtttctctttaaatgtttggtaacattcagcagtgaagccatcgggtccctggcttttctttactgggggattttttattatggcttcaatctcattacttgttattggtctcttcaggttttggatttcttcctggttcaatcttgataggttgtatgtgtctaggaatttgttcatttcttctaggttctccaatttattggcgtatagttgctcatagtagccactaatgatcctttgaatttctgaagtatcacttacaatgtttcttttttcatttatgattttatttatttggatcttctctctttttcttagtctgcctgaaggtttttcaattttgttgaacttaaaaaaatgactttttatttccttgatcttttgtatttttttcttcatttcaatttcttttatttctgctctgatcttcattatttcttttcttctactaattttgggtttggtttgcttatgcttttctagttctttaagatgctttgttatattgtttatttgaagtttttcctctttttttgatgtaggcacttataactacaaaattccctcttagtactgcttttactgtatcccataggttttggtatgttgtatttccattatcatttgtttcaagaaacttttcaatttccttcttaatttctttattgacccattggtcattcaggagtgtattgtttaatttccttgtgtttgtatagtttccaaaatttttcttgttattgatttctagttttattccattatggtcagagaagatgcttgatattatttactttttttggaatgttttaagactcgttttgtgatctaacatatggtctatccttgagaatgatccatgtgttgaggaaaaaaatgtgtattttgcagctcttggatgaaaagttctgaaaatatctattagatccatttggtctatagtgcaggctaaatccaatgtttttttcttgattttatgtctagaagatctgtctgatgctgaaagtgggtgcgttgaagtctccagctattactgtattggggcctatgtctctctttagctctaataatatttgctttattgatctgggtactctagtattgagtgcatacatctttcaaattgtatcatcttgctgaattgacccctttatcattatatagtgaccttcttggtctcttcttatagtttttgccttgaaatctattttgtctgatatacacatagctactcctcctcttttttggtttccactggcatggaatctttttctgtccctatactttcagtctatgtgtatctttatagtcaaagtgtatttcttgtaggcaacagatcaatgggttttattttttcatcccttcagccactctgtgtctttttattggagaatttagtccgttacattcagcattattattgataagttaggacttactcctgctattttgttatttgtttcctcattgttttgtggtcttctctttctcattctttccttcctgtcttcctttagtaaaggtgtttttctctgatgatatgatttagtttcttgcttttcattgtttgtgtatccatttgtgtgttttttggtttgaggttaccatgaggcttggaaatactatcttataacccattattttaagctgataacaacaatactgtttgcataaaccaacaaacaagcaaaaagaaaactaataaaaactctacaccttaacttcttcctcctgctttttagctttttgttgtttctgtttatattttgttgtactgtctgtgtcttgaaaagttgttgtagttattattttttattggttcatcatttagtctttctattaggatatgagtagtttacataccacagttgcattgttaaaatattctgtttttctgtgtaattactgaaaccagtgagttttttaccttcaggtgattacttgttgctcactaacgtccttttctttctaactgaagtattccccttaggatttcttgtaggacaggtctggtgttgatgaaatccctcagcttttgtttgtttgggaaagtctctatttctacctcatgtttgaaagatatttttgccagatatactattctagggtaaaaagtttttttccttcagcactttaaatatgtcatgtcactttctcctggcctgtaaggtttccactgaaaagtctgctgcccgccatattggagctccattgtatgttatttgcttcttttctcttgccacttttaggatcctttctttatccttgacctttgggagtttattaaatgccttgaggtagccttctttgggttaaatctgcttggtgttatattctgttctttttttttaatttttttattttattttattttatttttgagatggagtctcgctctgtcacccaggctagagtgcagtggcacaatctcggctcactgcaaactccacctcctgggttcacaccattgtcctgcctcagcctcatgagtagctgggactacaggcacccgccaccacacccagccaattctttgtatctttggtagagacagggtttcactgcactagccaggatggtctcgatctcctgacctcgtgatctgccctccttggcctccccaaagtactgggattacaggcatgagccactgcacccggtccttggtataatattcttgtacttattgatatttttctttgggtttgggaagttctttgtttttattatccctttgaatgaactttctattcctatctctctacctcctctttaaggccaataactcttagattggcccttttgaggcaattttctggaccttggaggcctacttcattgtttttattcctttttctgttgtctcctctgactgtatattttcaaatagtctgtcttcaagctcactaattcttctgcttgataaattctgctgttaaaagcctgatgcattcttcagtatgccaactgcattttttcagatccagaatttctgcatgattctttttaattattttaatctttatctggtagaattctgaattccttctctgtgttatcttgaattctttgagtttttgcaacacagcaattttgagttatttgtctgaaaggtcacatatctctgtttctcctggactggtctcttgtgccttatttagttcatttggtgaggtcatgttttcctggaaggtgttgattctagtagatgttcttcggtatctgggcattgaagagttaggtatttattgtaatctttactgtctgggcttgtttgtacctgttcttcttgggaaggctttccagatatttgaaatgactagggtgttgtgatctatgctgtatctgttttagggagcaccctaaacccagtaatgctgtagttcttgcagactcaaagaggtactggcttgatggtcttggacaacgtctaggataatttctggattgccaggcagagactcttgtttttttcccttactttctgccaaacaaatatttattcattctctctctctctctctctctctctctctctctctgtctctctctctctctctctctgtctgtctctctctctgttatgagccacctaaagctgggggtggagtgacacaagcatccctatggccaccaccactatgactgtgctggttcagacctgaagccagcacagcactgggtcccgcccaaggcctgctgcaaacactccctggctactgcctgtgtttactcaaggccctggggctctacaggcagcaggtggcaaagccagctctacctgtgtgcttcccttcagggcagcaagttctcccaggcccctgttgggtccaagaggtgccttccaggagtcagggactagagttgaaagccttagaagtctaccaggtgttctgttttactgtggctgcactggcactcaaatcacaagatgcagttcttcccactcttccatcccctttccaaaaccaggggagcctcaccctatggccaccagcacagaccatggagagtactgccagactaccaccgatgttcccttaagattcaagggctcttatgtcagcttatggtgaatgctgcctggcctgggactcacctttcagggaagtgggctcccctctggcccagagcaagtccagaaatgccatctaagagtcaagtcctggaattggggaccccaagagcccacttgttactctacccctctgtagccaagctgatatctaagatgcgagaccaagtcctctttacttttccctctgctctcctcaagcagaaggagttttgccctgtagccaccacacatggaaatctgctaagtctcacctgaagccgcaagtctcagggactcatccaaggccctctacatagtacctgggtattactgctggtttttcagggttcaaagggtctacagttagcaggtgattaatgctgccaggacttggaccttcctttcaaggtagtgggtttccttctggcctaggatcatgtctagagatgtcatctgggagctaggtcctggaacgggggccttaaaattttgactgctgccctatcctgctgtggttgagctggtatctgagatgcaagacagtcagagtggatcatcattaaattggtgtacttgtcaagaggtacaaggggaatgattagggagccttctattctggtatcttgctctgccccatccgctattatggatgagaacactgaggtggggaaaattgaagtaacttactcaaggtcataaagttagtaagtgatagagccaatagtcacacctagaaaccgtttcagaatctgcccctatgtagactcaaaagtccctaggtcaaagatctattacttgaaagagaaaagcacatagtttgctcttttgttccttattccattctgaatacttgacagccggctggaggaagtcagggagtcaacattttaagtcttggaaattaaaatttatagaacagggcctttaaaaggatttcaaattaacaataaaatgtgcaccattgacaagtaattactctgaaaaggagtatcactgatttacttttacagaataaaggaagaaaagagctaagcagttcatatgctttaagaaatgtttcctaaaacctcagtgcataattttcagaaataaaaataagaccaatttcatcaagtcttttagggggaatttctcatgtccactataaccaatttcaaatggtatcataagtaatctcacttcctctgaccccaaaaccacatttaaaggagatgagtttgaaagacaggatacaatgttttagcagttttgatgtataagaaaagtagccatgattcctacaggtgcctggatcatccctgctgctctaacttggagccattacaaacttagtaatgatgctgttggcaaagttgcaaataaagaattacagtaactcagtctaaccataacaaaagcatacaaaacactttcaaattcaatagacatcaaacaggacttaatcctttctacatatcatagatacatttaaaaaaactattatattaaccacgtatatccatcaaaagaaaaccacgtatattcatcaacagtcttttattaggttttttccccaccacatattaaaaacccgtcacctaacacttctttggaaataattttaaataattggatacagttcaggactgccttataagaaaaattggctgggttaaggttgaaattcaaaggtagatttaatataaataaatattattcacactactgtctgagggtggtgggaaaacccacagaacatttttacaggcagtcccagtgcagttttctagagtaaaagaaaatggaatagcagcccaattctttctgattacatattttgctagaagaagatgctgaatgattcctatgaagtagagagttctgcccttgatttgagaaggcagagatacagctgtgtactcattttatatgtggtgtttgcactgctgctgtcagacagaccagattcatggaagtcaagggctgtcatgctaatctagaaagaggaaagagagatctcacccatctttacttattgtcttgaaaatcagacagaacagcatttggcctctgaaaccagagaatgaatgtttctactcttaactgatctcttaaattacttaaatgtaactttctttgttagtacattcaaataaggaaaaaactggaagaacataattgcaaaggtatctcagtgctctccactcaagtaagtataggatgggaacagtgaatctgatccatcatagtttagaggcttaagtgtggattcaagttgcttgggtttgtcctagctctacctctttctgacagatcatcttcctgaaagctccaggtttcttatcttacaaacagggataatgatattacttaccttaagaagtggttgtgagtgttaaatgagacaatatataaatgaagactgcttaaaatagggcctgcctactaagagctcaatatattttagcagtcagcattagaattctaaagcatgaaactgtactttcaaaaaagcattaacatttaataaagcagggttatagtaaatagataaagcaaattccttggggtttcacctactttggtgagttgtatgatctctaggaactgaattatctattaattggatcattgacctgcttactacctagataaaaccataagagaacttttttccctcccaagactaggaaaaaaggagatagtcagtatacctcccaagtttgccctttgacctgggaaggaagagctcttttggggtggtaaaaaccaagtcccagattattaagggtgggtcttcactttcaggctacttttcctcttttgagcaaggcggcacaccatttacttcgagtccattttctactccaacttctgtctccatgaccttcttttgtaaaccctctttttacctcttgtttctccaaaattattgcattatgagtgcacacacaagtgtacacacacacacatatacacacacaattagaccttcatttaaggagagaaacaaaatttatattttaatgaccatattgaattgccattcatcttctgtaacttttactacaacatgattcttttataattggccaattaatagtatttattgagtatcatcactagtttctgttagttggcaaccctatgacctaggactttcagctgtgtaatctcaggaagtaagttttctttgcctgagactatttataaatttaggtttttttgattgagaagattcctttcaacgctagccttcttgtgattctgtaagagctacctttttccattggtaaatttttcaattatagatgtcatttaatttctttaaacagcactttcagcttggcacaaaattttaagtagatcagccaatagccaattctgtataccaggatttatgtttccctcatcgaaaatgatactgcaaaaggaaagaagcatcttttgaactaaaattgcagtgttcttgcctttagcacacggtagcagtctttctctttgtacccatttcctttctagcattgtaatattcagcacagacactggcccaaagagggaagtaaaaagtcttcccatttatgaatttcagcctggatagccatactgataacgtgaatatatttttactggcttataaattaacagagacttgtttgattgagtcgtttttaaagtgaaaagaaatacactaataaactgctagtgcggtgatggcaaacaaatgtacagatctataagatatgtaagacatacaattctcagttaaaattaatgaccaagttgaagagatggaggatttgaatctggaaggactaaccagaaaccctacaatcataggcctagcctcttcctttctcatctcttaggtaacttgaagtccttcacaatatatgtagaggcttatagtatatccttgcctgtccttttggtatcagttttccacattgtattattttaggcaagtttcttacaaattgcattctacccaaatctgacagtttctatcttctaataagaatattaagcccattcatatttatttccttgattaagattactgatcttttttcatcttatgacattctttcatttaggcactgggctgagttttagcaataccacaaagcttatattatgggctagtttaaatattttgctacatggaatgttattttctttgtttccactgcagtgaattggaaggattttttttaattacgtattttctttatttacagtgccaagattgaatcagatgccacttttacaatttaaaaatgagcttttttttcctgtgtcctccagcctatttccctatttttgttgatattatataatcttagatttaatttttaggttttatgattattttactaatataattatgtcctttttcacaccttcaagtatttcttttgacatttgcattatattgaaagtaattcaggtctagcttggaggctcattcttgtaatcatagcactttcggagaccaaagcagtaggatcacttgacgtcaggagtttgagaccagcctgggcaacatagtaagaccccatctctacaaaaaaaaaaagattgtgctcaattatctaagtgtggtggtgggtgcctgtagtcttagatacttaggaggctgaagtgagaagattgcttcaccccaggggttcaagggtacagtgagctacaattgtgcactgtagcctggacaagagagcaggactgggtcactaaattaattttgtttttttttttttgttttttttttcagatggagtctcactctgtcacccacgctggagtgcagtggtgtgatctcggctcactgcaagcccgggttcaccccattctcctgcctcagcctcccgagtagctgggactacaggcgcctgccaccatgcccggctaatttttttgtatttttagtagagatggggtttcaccatgttagccaggatggtctccatctcctgacctcgtgatccacccccttggcctctcaaagtgctgggattacaggcgtgagccaccgcacccagcctgttcattctttatactgcactctagcctgggcaagatagtgggactgggttgctaaataattttttttaatgaataaaaataaaagtaattcagaattaattatattattttcattgctgaacttcagtttttttcatatcacaactttccactaaaaatgtatttttagtactggctattggatcatcttctaataattttcacaggaaaagtccattcctagtattttttccaaacccttgtgtgtcagaaaatgtattttacttttacctcacatataaacaatagcttggctgaatataaaatttttctaagggcagcataatcttttgtcatcaaaattgctaatgattcttttggaatttatagtcattaaagagaagatatgcttctcttttatgtgtgagttgtagcttttgttttagtttcatttatgtaggactaggtatctgtctcttttcactttttttttttttttttgctgggaacttggtgagtcctaaatgattttgaaaatcctgctttagatcaggaaagttttacccgctgtttgattatcgtaatttctctatatgtttagtttcgtctttttggaagtcctgctctgcgcatattgaatctcccagatcttgccttcacttaaaaaaaaatctatttttatttttgtttcttcatctagggacttctggtagaattctcaagcttgttttctgtttctgcagaacctaattttgtaattcattgttttcattgcaatttttaattcaacagaagttcttttcatttttatacaatctttactgatcttaaattgttctgtcttcaaaagtaccaacttatctcagtgccatgaatgcaatatccttgtgcatattttcaagacatgaattgttttctcttttttggtattaacttatttcagtattgttctgagtcttcaaattgggccctcatttgaactacagtgtctgttgatgtgtgttgatttttctgtccctttttaaggagtttttgttttctaacactgggtgttgagatagatcctctttgaaatattatataaatggctccctgtacagatatttcagtctgagacaaaaaccaaagggaaattgtagattttcttcaattttattaaaattcagggatgagaaacaccatatgtgcggaatagcaaattgtttattgatattgaagcatagggtaaactgtctgatgtcaagtggggctgcaagcaaagcaagtagcctactctttgttaatttaccagggatgtcctcagtgttccagagcaggagggtggtcttgcagagcatgtttcaaccaacctggaaggagaaagtcctattaggaggttgctattctgtaacttaggtgatatgccctgagggtttgatatgggacaattacagtgagagggaagagattggatttccaccccccacctcccagctttattaaggtataacagacaaataagaattgaacatatttacagtgtacattgtgatgttttgatatatgtatatgtcgtgacatgattaaatcaagctaattagcatatccatcacctcatatacttgtcatttttcttgctttctaactgaaactttgtcaccctttgactaaaatctcttcacccctgtcacccccatcccctagcccagtctctggcaactgccattctaatctcttctctgagttcaatttattaaaattttacatataaatgagatcacgcagtatttgtctttctgtgcctggcttatttcacttaatataatgtcttccaggttcatccatgttgtcacaaatgacaggatttctttcttttttaagactgaatagcatttcattatgtgtgtgtgtgtaagtgtgtgtatgtgtatgaatgtgtttatcccacattttctatatccattgatcagtttggttttttccatatcttgattattatgaataatgcaatgaaaatggtagtgcagacatctttttgacatactgattttacttccttaggatatatatccagaagtggtattgctggatcatgtggtagttctgcttttaatttttttaggaaacttcatattgttttccatatttatattaatttacattcccaacaacagtgtacaagggttcccttttctccatatccttgctaacacttgctatcttttctctttttgataatagccattctaacaggtgtgaggtgatatctccttattgctttaatttgtatttctctgatgattagtgatgttgagcattttttcataaacctgtcttctgttgagaaatatctgttcagggactttgcctatttggattatttgttttcttgctgtttggttaagttccttgtctatttgggatattaaccccttatcagatgtatggtttgtaaatattttcttccattcagtaggttgtcttttcactctgttgattgtttcctttctgtgcagagctttttagtttgatgtaattctatcaatctgtttttgtttcttgtgttttcgaggtcatatcccaaaactcgttcagaccaatgtcaagaaacttttcccctatgttttctagggggaaagtttatagcaattttggttttatgttttacttttaagtctttaatccattttgagttgattcttgtatatggtgtgagataaaggtccagtttcattcttctgcatgtggatattcaattttcccaacaatttattcaagagattgttattttcccatggcgtgttcttgctacctttgttgaaaataaattgatcatgaatgtgtggatttattttggggctctctcttctgttcaattggactacatgtgtttgtttttaatgtgagtaccatgctgttttgattactatagctttgtggtatattttgatatcaggaagtgtgatctctccagctttttactttttgcttaatattattttggctctatagggtcttttgtagttctacataaattttataattattttttctatttctatagaaaaagtcattggaattttgatctgtccattattgaaagcagggtattgaaggctcctactataattgtattgctatttctctcttcgtttctgtcaatatttgctttagatataaaggtgctctggtgttgggtgcatatatatttataattgttatatcctttagatgaatttacgcctttatcattataaaatgaccatctttgtctcttgtgaaagtttttgtctgataaaagtatagccaccctgctctcttttggttaccatttgcatggagtatgcaactgatgttaacagcttaactgtgaccacatacaaaaactacattttaacttctcctcctcccccattttgctgatgtcacaattcacatatcttacatatgtaatgtaaaatgtattcattaccaaactattttagctataattattttattacttttgtcttttaccttttatactagagttacaagtgatttatgcaccaccactttattggaatattctgaatttgactttatctttacatttacactaagttttatactttcatgtgttttcatgtttttagcatccttttgtttcaacttgaacttcctttagcatttcttgtaaggcaggtttagtggtgatgaacttccacaacttttatttctctaggaaaatccttatctctcctttatttctgaaggacatcattgccaaatatggtattcttggttgccaagaatactttcttttcctttagcactttgaatatatcttcccactctttcctgccccgcaaagtttctgctgaaaaatctgctgatagtgttaaagctacccttgtaaataatgagttgcttttctcatgctgctttcaatattctctctttgtctttgacttttgagaatttgattataatttgtcctggtgaagatatctgtatttaattgatttggggttctttgagattcttagatctgaatgttcatgtccctcttcagattttggaaattttctctcactgtttctttaaataagctttttgcccccttctctggctttgcttattctgagactttcatatgcatgcattggttcacttggtgtggctcaataagtactgttggctttcttcactcattttcattatttttttctttttgttctacttactaggtaatctcaaacaatgttttcaagctctgtggttttttttcttcttcttgagtctgctgttgaagctctttatggaattttttggttcagtcattatgttatttagctccaaaatttctctttggttcatttttattgtttctttttgttgaactgtagttttgtttgtgtattgcttaccagattttgtttagttgtttaattttattgttgtttgttagttttgttagttgtttgttttgtttagttgtttatttgtgttctcttgtagcccactgagattaaggcaattattattattattattattattattaatttttgagacaggatctcactctctctcccaggctgtagtgtagcagcatgatcttgggtcactgcagcttcaacctcttgggctcaagggttccctccaccttagcctcctgagtagctgacactacaggtgaataccaccacacccagcaactttttgaattttttgtacagacaaggtttcaccatgttgcccagctggtctcaaactcctgggctcgagtgattctcccaaagtgctgggattacaggcatgagcccagccaagacaattatttttaattatttgccaagaagacatttagggccactaactcatggtttattttgtttgtttggtactgtcatgtttctctgattatttgtgatccttggggctaggcatttgtgcctgcacatttcaagaagtagccacctattccagtctttacagactcacttcatcagggaaaactcttcaccagtcaattggtctagagattctgagtgtgacatctggtagggtccatggccaggctggcctgctacctgggtcagcaggtgggtgggcttggcacctggattcatagggacttgccttgagcctgggtctataggatcatgcctggagctaggtccactgggatgagcctggagctagaatctaccaggacaggcctgaagcttgtgtctgtggtggctgggtgcagccagggttctctagtgtcaacctggtactctgtgggccttgagcctgagtctgtgggggctggcctaacactgggataggccagtgcttgggtctttggggataggcctggagtctgagtcatggaggtggacctggcttctggagctgtactagggtgagcctggatcctgggctcacaggggtaatcctggagcctgagtgtgtgggtatcagcccagtgctggagtatattagggcacactggagcctaaggcaacagtgactggcctggagcctgggtccatgaggcgttggtctggaacctctatcattggcttcagcccatgggttctagcctggtacctggggctatggatgctgacctgaagccttgctctgcagggtagggcgtggaggctgggtttgtgcataatggcctggaggctatctctgcaggagctagcttagagcctaaggccacaggggccagcctgatgctggaataggcctccaaggctggttccccagtagctgtcctggtgctagggtctcctgggatgggttttgactgtgagtccattgcagtgtgatgctgcaggggctggcctggagactgggacagtggatagcagcctcctgcctagaatcacgggtgccatcctggtgtctgaagttgcacgtgctgacctggagctggggtgtgcatgtgccagcctgacagtgggggaggcttggagactgggtccatgagtgccaagctgtagtctggggctgcaaaggccagagtggtgcctggggttgtaggggctagcctggtgctagagtcccagataaagtcaggtactcaattcattctccttgcctcaaatggtgggtgtctttccatgttgtgctgccgaggcttggggaaggagagacagctataatgtaaaagtttccttcctagccttttcaatacatcttttcttgtctctgtgctacccccaagtgctgtaatctctcatctggtttccttagctcttgtgaaggtatgtttgtgtatgaatagttgttcaaattgatgtgtctgtttaggggatgagcactggaaagtcctattttgccatcttgctgacatcctcctaggaggctaggttagagatgataggatttctgaactggtttgttggtaggggtggggaagagggaggaggtcttctgagaacgcctcactcccatgaaaagtccatctgtccctggaatgctaactgttggatcagcccaggctcccctttaaataaggaagggaatgtttaatgaaaggcattgtaagtaatagaatgtatgtaagaatggagaggttctggtagttagaaatgagaactagttcaagatgatttggggagtataagtagagatatttttaatttattcaacacccttctcttcagcaaacatctgtgtcaagtgctgggcatggtggatactgtggtgagccatatatagtcctcttccaaggaacacacaggctaaacggagatacagacagtgaaacatgcaagttgagtaggatgtggatgtggttggatgggagttaacatagtgtgctatggaagtgcacaagacattcctgggagggcttgggtgttttctcgtgaagagaagtgaggaaattcctggaataagtgactataaaatgagatctgaagtggaggggacgaaacagaacaatatatgcatgtgtggaggcctggagataagcgatggaagaaattcctgtgttgttttgtgtgcttatttgaatattattcaaatatgtgtacttatgagtctgtgtatcttgtcaacagactaaagtataaacttttagaaagtatcttgaagttttatttgttttgcatgccctttatagtattatagacaatgccttggagtcactagatactcaagaagtgcttagaagatggtagaatatcctcaccaattgatacctgagctcatctagctaacttagcctccttattccgaagagaagaaaaccaaatctctgataaattaaatgactcacccaggatcacacagtcagagccagctggcagcctacatcagaataccaatccaggccatagtccagtaacgttgaaccattggtttcttgtgggttatccttgatggctttgtaactttcacatcccaatttttactctgtaaaatataggtgataaacctgtatcatttgatgcatagaaacaaaaaaaatgaggctgggtgcaatggctcacgcctgtaatcccagcactttgggaggccgaggcgggcagatcacctgaggtcaggagtttgagatcagcctgaccaacatggagaaaccccatctctactaaaaatacaaaattatccaggcgtggtggcacatgcctgtaatcccagctgcttgggaggctgaggcaggagaatcgcttgaacccaggaggagaaggatgccatgagccgagatcgcaccattgcactccaccctgggcaacaagagtgaaactccatctcaaaaaaacaaacaaacaaaaaatgatgatcacaggggctactatgattaataggaaatatagaaatgcttattaatactactaagtactattttaaacagaattaaaaacacatatgacaacagaccaaggctcctctggcattggaactcagagatttaccatctcaacttgcaacagtttctcgttcccaggggctttacttttgggagctcaactcagcatagagtttgctaacatttttcaccttgtgtttatgttgcacctccatacaaggagcttaaagagctttacagacattagctcattaatcctcccaaaacctctcagagagggcggagacataaatcattattcccgtctgggaaaaaaaatggcctaacttatctcttttaattttactggtgctctaaatggctgattaaatcccaagttataccctctacatttagaatatcacattcttttttctcaaggatatttttctttcttttttgaaattaatattattaggataagtgtaataatagattgaaaggtttgatgttgaatgttcttttgagaagcatagactaggcagtaacctaggttcctcttttccatcatgccctctgcctttttcctcgtgccctctgccttttctcaaaatatccttctttatttttctttagtcatgattgggagaaatgacttttaggaaatggaaggatgtttcaagacccatttactccttatccaagccaagaccaccagcaaaagagccaatgagtgtctgtttagtcatgctgtatgaagccattcttgcattgctataaagagatacctgagactgggtaatttataaaaagaaaaaagaggtttaattggctcacagttctgcaggcttcacaggaagcatggtgctgtcatctgctcagcttctagggaggactcaggaagttacaatcatagtggaaggcaaagggggagcaggcacaacacaaggcaaaagcaagagcaagcaagggggatggggaggtgccacacacttttaaatgaccatatcttgcaataattcactgtcatgaagacagcaccaaatcgtgagggatcttcccccgtgacccaaacacctcccaccaggccccacctccagcataggggattacacttcaacatgagatttgggcagggacagctgtccaaactatgtcacatgccattctaactcttaataaaatactggtgcaacaaatttcaaaactttatcaaagcaacaatggaagttacattttcaatcttgtttgctttgcttacgcatgtggttctcactataatgttatttggagttagactttgaaggtgttagaacacgaccaagacatgaacggaatctgagaccaaacaaggttgtttcatgcaaattgttgcaacaacacacttatccagttaaagccagcaataaaggcatattgaaattaatattctgacacccctagaagttaatcagagaagatgagaaccaacttatatcttatgtgagagatattcaaaattgtattttataattattttttaaaagtccatcttagatcaccagaggacatttatcctgtctcagaataaggttatataatatttgatcccagaagatgttagagcctaaaggatcaatgcattttagagaaagagtatggagggcacatagaagttacatgttttacctgagattgcacaagtagttattatcaaactaggagaaaactcttaagttgtggtttgtttttcaatccacattgcttctcagatattcaaataaaacacctttatgattagtgacttgtgttctgtcttgctgccaaaatgttagatggcataaatgaaagtactaccctcccgtgtattcaatcttctttgagagagcaggcaggagagaggtgtggtgtcttttcccagaagaaaataaaatttattcctctaaaggaaaattagctttattcaagaaaatggtcttgaaaaattctcctagatcttcactttgttttagctataagagtgtttgatgaatgaagttattatatttccttttcacagggttgaaatactgcttgaagctaaataatcattataacaatttaccagttgactaatatttagtcaatatctctctactacctaatatcatatttgaagagtattttgctgttatgtattggttaaacttctaaatgaccctgagagtattaccacacatctgggaatactgaaaactggtgaaaaggaatcaagttgccttgagcttccaccacaaacggaaaggaaagagctaagaagcaaatacccagtggtccgaactcataggaaaatgtactatttattttagacgctatgaaaataaaaacagaaatatgaagtttataaagccatctctacctttgcctcttccgagtcacagaggagtaaatgaataaacagtatgtcttttctaatgttgactttttctctctagtatcattttccttctttttagaggtgttatttccccatgcttgactctcttcctgcattcttgttatgtccctagagttcttgaatccatttatttcccttctgtagcattctggaataataggaaaactttcctaaaataccttttcctagcgtttatacttcaagtaacagtctgaactttgtgacgagttctaggagtggcttgttagaaaattaagaatatattagctaaaaataagtctggaaaaataaggcttgctagaggagaagggtggagaatagccaactacgtatggatgagagagcaagaaaaataccatgcagcagggttgagcaagtcatgaaactaattagtaaataatctgtcctctcccatgagtcaggtcgcctgtgtgttctacattatccctaggaattcctcttgggtcatcatcctagctcctgtgttctcttgctttctttcttaatgttatttcatacccttttgtggccttttattatgattcttttttcagagagtttactgacggggtgtatggcaccgtaccctctcatactgaatcatttccttcctttcttcaagactgtcctgcatatcctttgacctgaccagtgaatacccaagatctattaaaagcaaagatgatttcaggtagctaggatcaacaaataatctagagaaggaaaatgccttcatccattccccagaattactttgaactaattcccacagaatcaataaaagataaaaagcacagtgggtgttgtaaatagatttcaaaatataataatataaaaataaatggcaattaatgcttatctgcttaggaaaagtgtgattgtggggttttaaggaaaagtattttgtagtataatggctaagtcgtgtttatatccagcacctttttccccctactactaaaagttaccttcctataattgcaatctatttgagcattttaacaataatggacatgtttttaacagattattgctaaaattgcatactttattccagggagactctgtaatagataccagcattttagtaatgatacaagcaatctgtaagctattacagttttctttagagtaacttaatcttcatattgttttatatgtctggaattttaatagtgtttttaatttagaaaaggagcgatataacatattattaattacatgtgaatatgaactaaacactgagcttgactggccactgagcttgactcttaaaaacaaacatatttaaaagtatgtaacttagtttagggaaagtaacaaagaaattaaagaatgccacacagagataaccgcagctttcgtgggataactcactgagggtctacatttttagaatggttattatattttggccctcagctacacaaaagccaagaggaatagaaatgcccctttccaagtaaaattaatacatattttttccaacagaaaaaaatacaaactattaaaacaaaattgtgaatgtttgtaaaagaatgattcttttcccttgatgtatctattcatccaaggatcttcaagaatttacagtattaattaataatcctggttgcccttaatgattcaacttgattggtgagtataccagatggcaagaaaaattaagatctttaggtcaaaaggtcagttcaataaggccatggaggtaaaggtgattgcggtaactttagacctcacttatttgtggactgggtaaacaaacagaggggaggtaatttttcttaaaaatgaaaagacttactgaaaatatttttattttaaatggttataagaaataatttagtgtttgaatctagacttataatatcatgtacaatgtcgaaactattttggcacactacccaactcctcttcaagagccaatagaaatatgcttggtgaaccaactcaggaagctttaatgctatttttaaaatctagcttttacattgaataaaccagtttgctgttttgaaagaagttataatctacttaaaactgtcattctctgtttctgacttgcaattagatgatatttccaaaatgtcaaacttagattctgcttctaccatcaccataataaaatgtgacagccaagatattatatcaataccttttccataattagcaataaggatcctgccaagggttaactagaaaagtttcataaacgtttttctacaaatggtcctgaagacagtgttatgcttttaaaatctgctaatgtggcaaagactcatgacaaccaggagacaaatctatgagcaaaactatttggagagaatagttttgtagtatatgatgtatgttatgtaaatgagcttattaggactctcatctattttattattggtgaccaatttaatagaggcttttaaaaaacaatatttctgcctgactcctagaaatgaagaagatacattgatataattgagagcaaatgattgcatgttgtgccatttaatcatgtcatttttcaattgctattttttgcacttcactgcatgcttatagaatatttagcttcaatatagattaagttccagggtttgcaactgagctgaatctctatattggctgacgttgtcttttaagtttgtaatcagttaaaacacccagatgtcatttgcctatattttctttaaaatatgcaagtcattattcatacttcatttgaggtattttaatgttttgctattttgaagaattacttcttacaattccaagatacaaattcttatttgcaacatttatatgcaaggtatagttaaacacataattggctagagaatagagctatcaggaccaaaagagcttctgaccccttgctggaaatgttgataatcacttgcctaaatgaatgtttcctacctttttaatctcttctttattatttatataatttacatcttcctcaggaaagagattactcccactgtccccaggaatatgaggtctttgagaaaaggttttgtctgttttgttcactgaaattctgaagtacttacaacactgtctattatgaaaagtgttccataaatatttgttcaatgaatgaatcagtatttttcccatccctgttattataaccaccctgagcttaaattctgtatagattactaactgttacatatttgcaggcctgtgaagattggacctctaaaaaggttcaatctccttccctttgcagaaagaggttgttggctgtcttaacaataactttatggctatggccacttctggttagaaatcagggacaagattgtctgaaaatgtagaaatcatacaggcttcttcagctttcttatgaaaagcaatgtagcatattgtttttgtgaatcagctttggattcaggctgcctgggttaaaatcctgcctttgttgcttattagctgtgtacctatggtcagctacttaaccactctgtgtctccatttcctcgtttgtcaaataggtagatgacaataatacacacacacacacacacacacgcacacacacatattgtagtgttgctgtgaggattaaatgattcaatacatataaagtaccttttaaaatgtgtggcacacataaatatacaaaaaatgttggtcattactgctggagattagtgaaaataaccaagaaaatattatttaaaatagtgctccagcaattgataagtcccaatgattataggctattattttgcattcaagtgaatctttttttttttttttttttgagacggaatctctctctgtcaccagggctggaatgcggtggtgcgatctcggctcactgcaacctctgcctcccaggttcaagcaattctcctgcctcagcctcctgagtagctgggattacaggtacatgccaccacgcccagctaatttttgtatttatggtagagacggggtttcaccatgttggtcaggctggtcttgaactcctgacctcgtgatccgcctgcctcagcctcccaaagtgctgggattacaggtgtgagccaccgcacccggcttcaagtgaatcttgatgaaatatttgaagagaatgtaacattatttttattttgtattggttcagatgcatatagtcgactcagaatgatctttggtaaagtatgtgaagcacatctgatatgtcaggtctctcatttttgcactgatactaacaccacaatagattacagtttcataagatgtatatgattatatatgaaattcatcactgcaataattagatttagttaacattcttcatttcccacatttgctttaactcctctttcagattcatagtcttctatgtttacttttatgtttatgttttatgctatttctaggagtaggacagctatattaaaaatgacactgcattatttttatcatacagcagaatgtctgatctgttggcagaaatacatagatgtatatggcagaatgtatgtataatgtagtaatgactctatccgaggacattttatagccataacttaaaaaaaaaaaaaaaacctacaagtttgcattggtaaattaatccttgtatccacccatggttgcagaaccatagtgattgtatggtattagttatatcattagcatctgttgtatgacacaccctagcagaatggtaaattctctgattgtataatcatttatggggttgataatatatttctggccttaccaagaggttttcttaaaataatattttcattgagatataatttacataccagaaaatcttatttcagaatgttttcaccactcttaaaagaaaccccttacccattagctcgctttttgcccctcactggaggccatggcaatcactattccactttctgtttctatgtatttgcctattctggacatttcatataaaaggaatcgtaaaatatgtgaccttttgtatctgtcttctttcacttaatatgatgttctcaaggttcatccatgttatgatatgtataagtacttcatttttaaatgccaaataatattacattatatgtatttactgcatttttttaatccactcacagttgatgggtgtttgacatgtttccactttttggctttatgaataatgccattatgaatatttgtgtgtaggtttttatgtggtcatatgttttcagttctcttgggtatatattcaaaaggaaatcgctggatcatacagtaattatatgtttaactttttgaggaaatgtcatactgttttttcatgtggctgcaccattttgcaatcccactaatggatgagggttccaatttctccacatccttgttaacacttgttatttcctttttagccatcctactagggggtgaagtaatatctaatcatggcttacatttgcatttatctgatgactgattgtgttgagccttttttcatatttttttgccatttgtatgtgtttgcagaaatgtctattcaaatactttgtccatttaaaaaattgagttactggtcttgatattttctcccattctgtggtttttcttttcacttttctatggtatcatctgaagtgcaaaagctttaaattttgatgaagcccaaaagttgcttatacttttgtgtcataaagaagaagccattgcctatgaagtcaaaagctgtttctacttttgatgtaatatctacaaaatcattgtctaacccaacatgatgaatatttacctctatattttcttctaagatttttatagttttagctcttacaattaagagtatgatccattttgtgttagttttgtagatggtgtgggataggggttcaattcattcttttgcatgtggatatccagttgtctcagcaccatttgttgaaaaaactattctttcctgacttaattataccagagctttttaattttacttattttattgaaaggtatcttatatttaatctttaatatgccataattaactgtaaaagaagtcttttatggcataaattagtcttgattgtatgaacattatcttgtctacactattacagcatcagaacactaggtgatattttgtttctacattgaacttgttattatgtgaagtcaccttctcagagaagctttattgaaaacccaaacgaaaataactcccaagccactttctgtcatatcaccctgttttatttgatagcttttagcactatctgatattttcttgtatatttcatgttttgtttccagcctctcatcattcacatgcatacaaatgtgaatgtaaattctatgaaagtagacattttgtgtgtcttgctcactgctatatccccaccactgagagcactgcttggcaaataaaaggcactcaataagtacatttggatggatagatcaatacttgaataatgattattaccacaccccacttgaacttccatcttgttttaaaatgttacaaaaattatggcttcttggcctttttaaatgtgtgctccccaacctgtaatgcctatcctctcttctctccacctttcttaccttcagcaactttcacagcctggttttagtcccatgaatcctaatctgtctactccagttaataatgatcttttttattctcaaactcagtgcccatagtttagcatatatatcaatcacaccttacatttgggtcatggcctcactattctcaaagcacattcacctcccttaccttatttagaacctactacaacctgatggtcttacagaaaacctttgcctcgtatttatttctctcactttgaggaatcagtgtcttctctttgccaccagctcttaagaacaggtacattttattacatgcctcttatccaccaacactaattccataatgaaaagtataaagtttggcacataaatggtgcccaatgaatgcttatttgctatgaaaattatcatttgccaaccttcccccacaaaacaatgatcccaaagcagccagacaaatgcatcttctaaagaagcatagaggtaccagaatagcctcttattttccccacttgctctatttcttattagagtatagcttcaggcattaacattatctgtacctgaatagcttgtaccttccaagtaatcatcattgttttgctttattatgtgtgctttctgggagcagagtttctttttagcttagcaaaatgccatatgtattagagtcattaattagcaaatgacttatttgataaaaatgacaaaaaagagtaaaatcaccaaatactggatccaaatgacctaatacataattgcactggaaattctggagatcatcaagaaaatactagtaacataaagatatcactggatgaaaagatctattcattgattcactcatttcttttcagtcatttgataaaaataggaaagtaattgatcatcaacaattgtggtccctaggctcttggctaccagtttcattccagaattagaacataaaatttctattactatttttatactttaaaaagtctactcagctagattaatcctcttacctaaaaactaagtttctttatttcctgtagactagtgttctcaaactttagcatgtattggaatcacctatagggcttgcttgttaaagcatggttcattgggcatcaccccagtattcctgattcagaagacgtatagtagcatcagagaatttgcagttctaacaagtttctgggtgatgtgaatactgcttggcgtgggcaccgtactctgaggacccttgttgtagaaaatctggtcataggtagcagacaaagaggagacagcaaaacacatggaaaattttaggaaacttacaactaggggatgcagctgctcttttgatttttttttttttttttttttttttttgagacagagtgtcactcttgtagcccaggctgcagtgcaatggcacgatctcggcccactgcaacctccacctcctgggctcaagccattctcctgcctcagcctcccgagtagctgggattacaggcacccaccaccacacccagctaatttttatatttttaatagagatggggtttcactgtgttggataggctggtctcgaactcctgacttcaagtgatccgcctgcctcctcctcccacagtgctgggattacagatatgagccactgcgcctggcccctcttgataatatttaaactagaagtcacctgtgtttgttcacacttcccttctctctccagctagattgaaggcaggtacattatcatatatgcagattataccttctttgttgtgcttgccacatagaagccatgctcaactgatgttaaacagttgatcagtttagaaggcgaagtctgaaagtgggaattgcttcatgggttttttgtttttttttttaacagatcagctaaagtcccaccactttgttcatattggcctacctaatgatgtttaatcaacctacaaagttaaattatgtaataaatattggagacaaattgctttggagtttctcagctaaatttgtttctctctgtttttaatatatacttagttttggtgtttttaaagtattattttccttctcatctctctttttttctgatctggttcttacatctcatttgctgtaacagttcttggtgtaaataaagctgttcttttattataagcttatttatatccttttataaactatatgacattcaatgtcaagtatgtgtatacaagtaaatataagtaaatatctatctgtttgcatatatgcacatatttgatatataatgaagactaaataccagtattgaaagtcttaacttcaatggtgttaaactgaagccaatgtgaggaataatattgcacatttgctcaataatatgattggtttaaacagttgaaaagagtgacagaggaagtcagtagaggaataaaacccagataaaccaaaaaacacccctgcacattgccactggtaaattgaaaatcaaattgacggtttacaaatgtgaaacaaaagccttaagcctgttggtaactaccttataatgtggatcggagatcattataaagggggaaaaaagacagataatgacctccattctaacagatttaaccttgcaagacgaaattgcctaaagattatcaaattataggtaaatataaaagcacttgcaatccctttcttaggcatattgatagttgtgtttttctttctttttaaattttgtttccctcttctttatagttttctaggaaggcaatatgactatgcatgggaaccaacatgatctcattagatatcaaggaaaatgcttaaaaatggcaataatgaaaagcatttcaaacttttctgtttcctacttccttttccagctcagctgcttcactgtctctccccaacacaccaggcactcccactgccagaggctacttacttgttttccactttaacatacctctcagccttctacccatgtaaccaccaccacccatcttggtccatctggttcacaccattcccctgaatatttcattgactcttcaatagcaacttgcacatacttctgttagcaccttcctctttgatattatacttatttgtatagtttacttccagtagactctcaactccttgagggtaaaagggaacttgctcctttttgaaagcttcattcctgaaacggtgcctagcatatggaaagtgcagtacacatttgaggagatcagggaggtagggatgtgtttgtcttatttctgtgctttacttaggttacttaccttgagtttctgtttcaaagcacattttctctgaaatgaagccaaagatagttataataattgtttctatctatgcatattttattatggaattaatataaactactgattctaagaaatgttgccagcacatccactgattttattatgaatttttgattacgaatgcatatgtatattttaatggctgtcatggaagcccatttatgtagaaaaatgttattttattaattatatcttctaggtataaaaaagtactgaaaaatatgttggtcatgtaaaatttccaattttcccctcctttttaaaagtagcattatttcccaagtgcacatgtaggataaatttttaattcagaatgtagactaagccctgtgttcatttaaaggaaaaaaaaaaaaaaccctgcagaattgtgaatatccaaaaatcagatattgaatatcaacagtaattgccttcttagtttttaaaccactgtattcatcttgattattcatcttaagataggagtggggatcacctagatacttaaaatactggatacattctagatacttacaaaaaaatttatggccaatgatctttatgaaaaatttctcctagcaacctcagatgtcctgtttcagaactttgaaaatgcctataaggtgaatgaagtctgtttggggtgctttgcaaatgttgcctgatgtggcctgtgctaactctgcacatacctttagtgccatccattgcaaattttcatttggctaagaactttgggactttttgttggcttaagaaatacagttattatgctagttaactttattttaaagacagttttgcaaaattcagttctatggcacagaaacatctcttttgatttttctaggcctttacgcttaacaagttaacaaaacagaaagaaaaccccaaatccttaatattaatatttataggactcacttgggccaatttcatttggccgtaatgttatcttgaagtgtttaatattgggccccaaattggcaggtattaggtggccttcatagtttgacttgcccaacagtcgttctagagcaagagataaattgaagggtgtgtgtggatgtgtgtgtgtgtgtttgtgcgtttgagtgaaaagaagagacagagagggagagagagaaagagaacatgcacgtggggttgaggggagacatttgacagggttgtaggaagagatggtaacaatgctggttgccttagtaggcttaggttttatctttgaatgtcttagggatttctcctcattcagcactgaaccaattaatagcagcagtaaagaaatttgtcagacatggtggttatatcaggacttatataggaaaatagtaatgaactctaggaaaataaataaggataagttcaagaaacataactgaaactgctgcgctggtataaattgaataataaaatttctagtcatattttgccataaatagaggtttgggaatttgtcattcaccttatttaaaattcagaaatattaaaggtacagagttctctcattacagaaataatagaattccagccattactgagtcagggtcatttaaatggctctagcatgcattatatcagtaagtgggacatctgtatgaaatgtccacctgctgatctgatacccccactccaagcacatttcagcgcaccacacttaatcattttaagatttcttctaatgaagccttatctagattaacattttaagcacaaatactttcaggcattaaaactctcacactaaatgaaattgcattgtcttgtttacccttgttgattaataagcactctgttaactgttagaacagtccaattgtggcagtagaaggagattagtaattcagtgatgtttgtggatataatcatcatttctcctgaaggctccgaattagaatatcacttacacactatctgtaggcaaagaaaggatataatatttttagacatgtgtacccactattttgcttgaatcattcagtttagggtcactgcagcaatacaaatgcttctgggggcaaaatgctattttggtgccggcatgtccttcttaaatagtgtgaatgtctattaaaagaaacacagcaaccaacaaatagtgcagtaataatccagtatcttaattttcgctttcagaacattattgctttgttaatcaagcttcggaagaggaatattgcttatctttttttttcagataatagattttatatataaaaattctttgcaatcttgtttaacttgttctcagccagtagaaaactgaactttttgcctccaaagaatgtaggagtaaatttggaaaaattctatttcttttcggaggatttttctatcttctgcgtttccttcgaccttatgtcaaagcatgtcaatctgtttggcattcatgtgacctaaatgatttatttcattaggctagaaattgttaattacccaggtgtctagggaggaccctacatttcggagggataaatcagtgaaaagtgtggaggaatgggatgcagctaaattctttagcatattggacttctgtaggaggcctccattctaaaagggacatcagagctcttcttgtcctattgttggtagctgagtgtatcactacaatttgaaattatgatggaagaaggtgtttcatgttttagggaactctgccctataaacactcatagattggtttctctctatgttgcagtccctctgtcgtgaaatcaagcaacgacgtcgaggagttgcctccattctgcgactatgccagcatcttttggatgaccgggagacttgcaatctgaatgcagaccaccagcccatgcagctgatcattgtaaatcttgaaagaaggtgggaagccattgtcatgcaagccgtccagtggcaaacacgtctacaaaagaagatgggaaaggaatctgtgagtgatgctttttttaagcataattgtctgtcattttctcagacaaaaaataattctttcaggcttggaaacggtgttcatcttataaatggttttactaactaacttaaagtggttttgccatcttacaagtggttttaactaactaaagctcatagttttactacgaactagctgtccactaaatgaaactccatttgtcataacactgacatttatttgctttattaaaattcctttagtgtacctcattgtctttttgaaaaaaatcacatggagatttcgcttaaccttaccaacctaagccattaattctttcaatcattccttcactaacaatattcattaatcatacaataacccatgaatattttgctagaaagtagcttagtactgtcagagcatatggagtaatgtgtatgctctgcagataatacaacgaaataaagtacattgtttacttttccctgacatgacatgagttaacatcatctatttgtacagtaatctcctagtgttcctgcttagagcttcttctgatagttacattgctgagaattggcaagtttcctcttagagttttaatgcagtgctcaaggtggtgagtagagattccttttaaggattttccaaattgagtacaggtttaagctgttgctagatgaaggaaatagatataactagaagttgtttccttgtaatatacgatgcatatttgtccagagagccttcatatcctttaggaaagaatttatcgataaaaaagattgcatactccaaatgaccttgaggtcaatgtctattagttgaaggcccaactcccatgtttgacttatataaatggaatgcatacatacatacatacatacatacatacatagaatggaaagttttccttatatgtttatatttttcagttctataactttggaaagttcaggatccaaaattgaaaaatcaaatgtaaaaatcatgaaaaatcctcctatgaattctgattttaacgaagccttaatatctgctctttgacgtgttaggcacttgggactgggaacagaagggacaatgaatcagcaagccatctaattctttttgcatctgtagatatattgagtctagggggtgattttatcgtcaatagttctgtttaattgttttaagctgaagttgttaaatttcttaagacttccaagttattactagtaatcagagtcaacataattagatgtcttttcttgaaatgacctgtttttttgtaaagctatttagctggcatgttttttgtttgttttgagagtgtttggaagggcagatgagattattattattactttctatacttttaagcctgtaatcgtggtagtggccataagatatatgcaaaaatcaactgcagcaggcaaagttgtgaaatttttgaagcattcaaactgctttggaggaggcaaagttgtgtttctttgaggatttatttgaaatcgtatgatcaggggttctagagcagttctctgcagactagatgtagacatttttatcctttttttttttttttcaaggatggagtctttctctatctcccagactggggtacagtggcctgatcatagcttactgcagcctcaaactcctgggctcaagtgatccccccacctcaacctctcaagtagctaggactacaggcatgtgtcagcatgtctgcctaatttttattttactttttgtagagacatggtctcactatgttgcccaggctggtctcaaattcttggcgatcctcccaccttggcctcccaatgtgctggggttgcaggtgtaagccactgcactcagccttttattctacttctatggtaaaggcaagctttagctttgaggcaaccctggctgcttcttaaaggttcaagctactacatacaggtagatacaaattccaaacagagaaaggtgtttccttttgtttaaggtgactgctgaatgtgtagactggaaaaatgaaggtagcaaataaggtcctctgtgctgaaagttgaaaatctctgtcagaaaaggaatgaagagagtggtctaatgccaacaaatactgtgagcaccgggtacatcattcagtgggagatatttctctgcttcttatctctgttggttgagtgaagagtccaggttgctttgaagttgccaatgtgggaggctgcctttgcagagaatcagaatcctctaagttggctcttcagttatcatatgtccccactcccatttcatccttgcttgtgcattgggactttcacttctttgatatggtttgtctgtgtccccaaccaaatctcctcttgaattgtagctcccataattcctagatgttatgggagggaccgagtgggagataattgaatcatgggggtggtttcccccatactgttctcatggtagtgaataagtctcactagatctgatggttttataaggggaaacccctttcacttggttgtcattctctcttgtctgttgccatgtaagatgtgccttttgccttccaccatgattgtgaggcctccccagccacatggaactgtgagttcattaaacctctttttctttataaattattcagtcttgggtatgtctttatcagcagtgtgaaaacagactaatacactgctatatcccccagggcctgggaaatacttgcacatagtaggtctacaaataagtatttgctgaatgaatgagtacatgtgttcatttaataaattttgtttcattctggcatttgatttggagttactgtatctatattctaaatttttacattttttcacaaagtagctgagtgttatgtttctataagaacaccaagaagatgatctttaatctttcttgcttaataaggcctccccagactctcagacctgtttcctaaactcaaggagactgtcagtctctaagtggagtctaaggaggctaaagtggctaacattgctacagggcagagtgccaaaggggaaagggctacacagacagggcgcaccggagatatacagagggatgctctcaagtactcagcagaaggaaccacctgaaaggattagagggaacactccctggagcttgcacagagctagaaatcattcccttttccctcactcatagtagaaaccctcatcattcacaaggcatgtgatagggtaccaagaaaagtttttgccttagtaatggggcaaacttagactaaatgctgctctggtcttgcccaaaaaaaacttaaaagcaagacctgaaaggatcaaactgtttcaaagtaatttaactatactcccaggacaaagctcaagaatatttataggaatacaaatacccaacatacaacaagttaaaatttataaaatttatagtgtctgacatccaatctaaacctaccaggaatggaaagaagcaggaatagtcagctgatgtgaatatgaatattaatcaatataaactgatccagaaatgtcacagagtatagaattggtagacaaaaacattaaaagttattatacccgcattccatatgttcaagcagctggaaaaaatattgatcatattaagtagagacattaaaaatatctacctgaaatcacattataaagaggaaaactatcattactgagatgaaaaatacactggatgagattaacagccaattagacatcacagaagaaataatttgtaaacctgaaaacatagcaataaaaattgtgcaaaatgaagcagaaagaaaaaaagacaaagcaaaataaaatcagagcatcagtgagctctgaggtatcttcaagcagcctaattgaagattagaattagaatcccataataaaaggaaggtggaagctgggtgctcttgctcacatatgtaattccagcactttggtaggctgaggtgggaggactgcttgaggccaggagttcaagaccaacctgggcaacatagcaagacctcatttctacaaaacaatacaaaaattaggcaggcctgaagacacatgcgtgcagtcccagctacttgggagacagaggcaggaggatcacttgagcctgggaggttgtggctgcagtgagctgtgtttgtgccactgcactctagcctggatgacagtcagaccctgtctcagaaaaataaaaataaaaagatagtggaataaaataacctagaattatatatacagagaaaatatcattcaaaaatgaagacaaaatagttttcattcattaaaacctgaaaatattcattacccatcgacctgtaccacaagaaatgttaaaggcagtccttcaaccaaatggaaaattatatcagatggaaacctggataagcacaagggaatgaagaagactgaaaatagtaactatgtgggttactatgaaattttttttgtattatttaaatctctttaagtggtaatagactgcttaaatcaagttgataacagcttattgtctatttataacatatgtagaagtcaaacgtatgacaacaaaatattgcaacggccaggaactatgtggtttttattctatgtgaggtggtataatatcatttaaagtttttttttttgaaaagaggattaaagaaaaaattagacatgtgataagataaaatatatggttttgggttttttttatttgtttgtatttttagatacggggtcttactctgttgctcaggctacaatgctatggcacaatcatggctcactgtagccttgacctcctgggtgcaagcaggtctcctgcctcagtctccaagtagctgagaatacaggagcatgccagcatacccagcaatttttttttttttttttggagagatgggatctcgctatgttgcacaggctagtctcaaactcctggcctcaagcagttctcccaccttggcctcccacagtgctgggattacaggcatgagtcgccatgcctagcttataactctttaaaaacataacaaaaagctataatgagtaggccaacagaggaaatgaatagaatcatttaaaaaaaaaataaaagaaaaagaataaaaaatagatgcaataaatagaagaatagcaagatggaagacttaaaacaactgcataaataatcctgttaaatgggaatggactaaaagccccaattaaaaagcaacaatgatcggattaggtttataaagctctactgagttacatgttgcctatgagaaacccaatttaggccagatgtggtggctcacacctgtaatttcagcactttgggaggctgaggcagcaggatcacttaaccccaggagtttgagaccagcctgggcaacatggtgaaaccccgtcactacaaaaaaataaaaataaaaaattagccaggcatggtggcagtgcacctgtggtctcagctgcccactactcaggaggctcaggtgggaggatcacttgagcccaggaggttgaggctaccatgaacagtgtttgtgcccctgtaccccagcctgggcaacagagtgagactctgtctcaggaccaaaaaaaaaaaaaaaaaaaacaaaggaaacccactttaaacataaagatataataaagctaagagatggaaatatatatattaagctaacacaaacagagttggagtggctgtattaatagtaaacagtgtagatttcagagcaaagaagattacaaattataaagaagctcattcttaatgataaagatgccaattaatcaagaagacaacattactaaatgtttatgctctaaaacagagctttaaaatacataaagcaaaaattgatacaactgtgaggagacaacaaaaacagaccattttgggcagagattccattactttttctcaatagctgatagaccagaaaaatcagtaaagatataaaagacttggaatgatactataaagcaatttaattggcacttaaaacactctatccaaggcttttatcaaaaggataatgaataacaattgttggtgagggtgtagaaaaaagggaacccttgtccactgttggtaggaatgtagattggtgtagcctctgtgggaagcagtatggaggttcctaaagaaagtgaaaatagaactaccgtatgacccagaaatctctcttgtaggtctatacccaaaggaaatgaaatcactgcctcataaggatgtctttagtcacatgctcattgcatcattatttatcatagccaagatatgggaacaactgaagtgtccattagatgaatggaaaaagaaattgaaaaaaaaaacatatatatatatatgcatgcttatacacatatacacacacaatgtaatatttggccttaaaaaaaaaggagatcctgctattggtgaaaacatggatgaaactggaggacattatgctaagtgaaataaaccagacacagaaagaaaaatattacatgatctcacttatatatggaatctaaaaagaaaaaaagaaagaaacagagaatctgaagggaaatggaaagatgtaggtcaaaagatatgaagttggagttatggtcctattaaaaaatctagagatctaatgtacaatctgagatgatggatatgtaaatttgcttgaatatagaagtcacttcactacatgtatcaaaacatcatgtcgtacacaatatatacatttaaaaatcagtcatgtcatccagcagcagcagaatatacatttaagtgcacacataacatctactaaaactctcttctgagccacaaaacaagtcttaaatttaaaagaattcagccaggtgcagtggctcatgcctgtaagcccagcactttgggaggctgaagcaagaggatggcttcagcctgagactagcctgagcaatatatcgagactccatatctatttttttaagttaaaataactcatgtcatacaaagtatgttatttgactataatagaattagtttcaaaataagtaatagcaatatatttggaaaatcctcaaatacatggaagctaaataacacacttatatacaactcatgggccaaagaagaaatgaaaagggaaattagaaagtatttttaattgaatagtaacaaaatattaaaatctgtgggatgccaccaaaactaagatcttagttttcaccttatgaaactagaaaaagaagaccaaattaaacccaaagtaaataggagaaagaaaataataaaatcaaagcagaaatcagtgaaatagaagacagaaaaaataataaagaaaaaaatcaatgaaatgaaaatctggggttatttttgagaagaccaatgaaattgataaacctctagctagattgattagggaaaaaaagagaaaaataaattatcagtatcaggaataagagacagacatcactacagcttctaccaatactgaaagaagactgtcagccaagatcgcgccattgcactccagcctgggcaacaagagtgaaacttactctcaaaaaaaaaaaaaaaagagaatatgaaggtaattttatgaataatcttttgtctactaaatacattgagtcattagtttaaaacctccccagaaagaaaatttcagacctagttggctttataggtgaattctaccaaacatttaaagaatacataatattaattttatgcaaagttgtccagaaattgaaaaggaaagaatatttttcattctcattccttgggcaagcattacccagatgtcaaaaaggcaatacaagaaaactgctggatgatatcccttatgaatgtcaataaaaagattcttaacaaaattttatcaaatcaaataaaaagtatataaaatagaaactacatcatgatattgtgaggtttagcctagaaatacgtagtttcatacttgaaaacaatcaatgtaattcatcgtatttgcacactcaggaaacccatttgattatctcaatgctgaaaaagcatttgccaaaatccaatatccttcctgataaaaactctcagaaacctaaggaaaaaatgtccaggtgtggtggctcacacctgtaatcccagcactttgggaggccgaggtgggtggatcacttgaggccaggagttcgagaccagcctggtcaacatggcgaaacccccatctctactaaaaatacaaaaacttagctgggcatggtggtgcgcgcctgtaatcccagctactctggaggctgaggcaggagaattgcttcaacctgggtggtggaggttgcagtgagccgagatcacgccactgtattccagcctgggtgacagagagcaactctgtctcaaaaaaaggaaagaaaggaagggagggagggagggagggagggaggaagggaaagaaaaagaaaggaagaaaggaagaaaagacctaaggaaaaacttaataatggggatccacagctaagaaacagttaacatcatactcaataggaaaaaacagaatacttctcctctaagatcaggaataaggcaaagatgtacaatttcaccatttctattcaaaattgtattggaagttttagccagatccataaagcaagaaaaataatttaagacatgccatttgtcaattaagaagcaaaattatttttactcagagattccatcaccatctatgtagaaactgctacagaatctacaaaaagatactagaacaaataagggaagttaacaaggttataggatacaagatcaatatataaatgtcaattatattctagatattactgataaatagtcataaattgaaatttttaaacattcaatttataatattaatagtacatgaaatgcttagggatgtatctaacaatagatatggaagaactgtatgcaaacagctacaaaatattgctgagagaaattattaacaaataataactaaattaatagtggactatactgaattcatggatcagaggatacaatattaagatatcaaatctccccaaatttatctatagaattaatgtaatcccaatgaaaatctctgtgatttttttttttcgtaaaaatttgtaagctgattctaaaattcatttggaaatgcaaaggacatagaatacccaaagcaactttgagaaagatgagttaaattggaggatttatacctcctgatatcaagagttataataaagctacagtagtcaagaaagtatggcattgctgtcaaggtcaacaaatacatcaatggaacaaaataaatatttcagaaatagagctacacataaatggtcaattaatttttaatagaagtacaaaggcaattcaatgaagaaaggatagtcttttgaacaaatgatcctggaacaattgaatttccatatgcacagacatagattgatccgtataatgtgccatataaaaattaagcaagataaataattgacctaaatgtaaaatgtagaaaattttagaaaaaaaatcatagggtaaaatcttgtgatcactggagcaataataaagggtaacgagaaatcttttgggagtgatagaaatattcatgatcttgtttgtagtgatcattttgtatgcatattcttatatcaaaacataaaattttacattgtaatatgtataatttactttatttaaattatacctcaataaagctgtttaaaaaaaacacatattcagaattttaattacaaaggagttgatagattaccctgaagcctggcagtgagtatccttgtcttggtataagtaaatgaaaatgggcattccttttctgaagaaccaaacaatgctaataacagctaacacatcgcacttgatatatatcaggcaatgttcagtcctttaagactcttaataaccatataatttacgtgccattatcctctattttacagaagaaaaaaattgaggcaaagaaaatttcagcaatttttccagagttaccacctggtttgtaactcatctgagatttgaacctgggagctctggcttcagagtcagtgtcctgaatcaacaacctaaactgcctctctaagacaaagccttctttaatgataagaatggtacatatgcagccacctttaaatcaagtaaatgaacaagactttcataaatacaaattaagtgacttagatttggaaattaggtgattctattttcaatatattttggaaaattatggatcaaattttcgtatcacatgtgacatatggagaagttttaattgtcaaaaattatatctaaatgggctatgaaaagcaataatttcttatgagaactttaagaaaaaggcgtaagcaagcactttctgtttcaatgtgctagagaaactagagaagaggatttgggctgctgtgtgaattggttgaccactgatagttcactgacacttatttaagcatttcctataagtccatgggaattcttattaaattcacacatgcttcacagaaactcatgacatttatggaatttgtagtaagaaggacacttttccagcagtgatttgtatataccacaaatcaaatttctcttctcaaatgccatcttaacaaacctctctactgaacaggttcagtctagtatacacaatttcctcaggggaatctgcaaaattgctaacacaagagggtgttatacattgtgaggagacatgtttctgtttttaacttttttccatattagttttgtttgtctaacttactgttggagatccctctaaaaagccatgtggcatatcttaagtgtcactcaccaagagagtggggctgttgtattacttgctaacagcattgaacatgtactgtttctcagttgctgtgttaccacttttaatatgttgtgttatttaatcttcataacaaccaaagatgaagaaactaaatttttgatagattacataaattatacaaggttatgcagccagtaggcggagaaaggtgtggacgcaggcgtatctgactccaagatgtaaagttcttttagttcttaaagggtttattgacaacaatttcttgcctttcttccccctaagactactttggttgtttagtatatcttggttaatgatttatattgttattctttttattggagactgcctggaattcctttttgaattgaatacaagaagaatcatataaatgattgatagcacagtaatttttgttaatatactgttttctattcattagtcagttctgaggactttggcatgacatattaaagatctgcagactcaagttagactggattgaattagagaacaccatttggaaataaatccagtgcttccctccattcttgttcattggctcttttttctctattgcatgtccttccaatgaaaattggctcttacataaagagttggattcatcagaagaaatacatgaatagaattaactattggtattatttggaaaaatttcaaaccaaagaatgagaaataacagaataaagaaagtaaatcttgagagggaaaacatttcttttgaataattgaaatttaaaattaaattttgaattgagaaagtttgaataattattaagttacagtttagatttttaatatatatttttaagaatgaaatactttggataacatcatcatatatgatcattcaatgttttttacttttaaaatattaccaaaagtaatagaatgagttctatgtaaaactctcttgagtttcctgttggcagttttcttgaatccaaagacgaaaatgaagggaaaactgatctgacagttaatatatgtgtgaagcttagttggggaagtacttgcaaagtgttgtaaatataaggctctttgagtgttggttggaagtagtatgggattttgctataaatatccttgctttgccagtctttgaaagatcttgtacaggacaacttctttctctcacaactttcccagttcagattcttacgtcatctgtaccatataaacgaatgctatacttatttggacatagtcaaaccaaccaagacataaactaataagtaaaaggacacaaatttctctttagttttcagaaatatgagaatgtgatttaaaaaaaaactggtgaagacacaagtatcattctcagaaaatgaaaatgatttcacaaagtgtcgtattacatttattgatgatgtccccaagtaatgtccaattcactcccagattttttaggaaaatgttctggggtcatttctaacaactgaggacaccactgccattgagtgggtgcatctggggagacagtaacaatgcatgaaacaaccccgtatgcagacagatttttccacaaatgccagcagcgtccccattggaaaacactttgttctgtaaccattttggtgcactgttactttcatgttcgctctgaggacagatctctgataatatacatctgtaaaatactcatttcagctctacttagccctctgaaagacctaaacctttatctttttttttttttttttttttttttttgagacggaatcttgctctgtcgccaaggctggagtgcagtggcgccatcttggctcactgcaagctccacctcccaggtgcatgccattctcctgccccagcctcctgagtagctgggactacaggcgcccaccaccacgcccggctaattattttattttattttatttttttatttttagtagagatggggttttaccgtgttagccaggatggtttcgatctcctgacctcgtgatctgcctgcctcggcctcccaaagtgctgggattacaggcatgagccacagcacccagcctaaacctttatcttaaaagcaagaaaaatttgcctttcctgtctgttttcttacctctctaactctcatataagtcctctgaatagtcctatcactgttttctgagttcagacaagtagttatcagtagcaagtaaattattcttgcttttcaattaaatgttttaaacagaaataatgtggattcctttgaaatatttttatttcaaagagtgtgcttttgaatcctttgtgaatttagggttttaagtttttattctttgtacaaatatatttttttcttttgctctggcactccagaactccagcattgaaaacagaacatcgtgtctagagaaaccttacacatttattggccccaaaaatacataacacatctagccacataattgaaaataataaggccacgataaatgggatggccccagggtaaaacacccaaaggattcaattggtgtcactttgcatcaatgtccatgcatcatggtaattgaggtaacataaccaattaccacattttaattagagttctaagaactcgaggaaatttgcaatgatcagacagctcactttacaaaagaaaggaaagaatgaaagaaagggggggaaccccacactttttctgcctctcaatcttattatttggtgatgcatatattaagataaatagcattcttatcttaatctgacgaatgatttcagaaatgtatgaccaaagaaattctctagattgtgacctcagcttataatttcatttcccatctaggtgtacctcgccattgtaacttggggattcattctaagtttttaagtcagtatctgaacacagtgacacgttattaaatacatatttatctgggtttggttgctgaacaaaaatagatctagatttcaccccccccaaaaaaattaaaagcaaaaagaattactacatttagaaaataattttgacttgtggcaattatttttataaggctagagtttaagtgaaaaacctcctgtaaaattttagtgctgctacataatcaagtaattatgtaattacttgtacttaattacttacaagagagatcgctgttaaaaaaagtctttatgcatgtcaaaaacagctctcttctttagagtatttctaggtaagcttcaaataccaaaaagctctttcaaagtaatctccaataaatttatttttcttttataaatccctcaccatttttttcaaatatatgcaagtacattacatagagatctatatgccctccctcctgtttccacttattacagccaaaaacaaatgtgtcattccaaatccttgggaggctgaaacaggaggactgcttgagcccaggagttcaaggatgcaatgagccgtaattataccacttcattctagcctgggcaacagagtgagaccccatctcaaaaaaaaaaaaaaaaaaaagaaggtgggaaggaagaaatgatttttaaattacacatgaagggcttggtattaaatataagaatataagacatgtatccttaatgtgacagtttccagtagacagagtagattttcaagaaagctgggaattttcttgagtattataatacaatatggtgattaagagctagagccagactctctcacttagtagctgtgtgatcatggcaaattatttaacttttctgtgcctcagtttcttcatctgtaagatagagataacaatgataaactataaaaaccctagaagggaggttcaagatggccaattagaagcagccgtggtctgtggccgcggaactcacggaaaggaatgaaaaggggcaagggaattcagcaccttcaacttatatatccaggatctcacattgaaactaactaagcaaacaactcaacccatgcagaatgaagaaaagcagggggtgggggcaacagcccacctgggagtggcgcggagcgaaaggaacccccaccctcagccaagggaagcagtgagtgagcgtgcaaccccacccaggaaaccatgcttctcccatgaatctttgcaaccggcggatcaggagatcctcttgtgagcccacactaccaggtctttgggtccgagacacagagctgtgtggcgtctcagcaaagcagccactcaggcacaaacagagacccaggagttttacaattctggccctggcatccctggcaaggcgggaaatccatccattcatatccctaggaagggtgctgaattcagggagccaagcagcgtcattctgcgggccccacttccacggcacctcacaagttaagacctactggcttggaattctagccagccaacaacaggctggagtctgcctgagacaggactgagttcctggggagagggtcggccaccatctatgtggttcggtagactcagccattccagcctgccacctttggacaatacaaaccgtatgaacaaggaagggtcctccacaatgcagcacggctgccttgccagattatggcgagactgcttctttaagcggaacctagatccattcctcctcacagggtgggatctccctgtggaggctttagccactccagcaagggttctgcagacagagctctgatctctccctgggacagagctcctgtggggaggggcagctgccatctctgcagttcagttgactcagccattccagcctgccagctttggagaatacaaactgtctggacgcggaagggtctctcccaacgcaacacacctgctctaccaaacagcagccagactgcttctttaagtagatccctgatcccattcctcctgactgggtgagacctcccaacaggggtctccagccaccttctacaggtgtggttgggccggcaacaggtcagtaccctactggaacggagcttccagaggaaggagctggctgccatctttgctgtttcacagccttcactggtgaaacctccagttacaggaaaaaacgagccaactagggcctggagtggacccccagcaaaccgcagcagccctatgctagagtggcctgaccgttaaaagaaaaacaaacagaaaacaacaatatcaacaaaaaagaccctacaaaaaccccgttcaagttagtatcctcaaagatcaaaggtagataagcccacaaaatgagaaagaatcgatgcaagaatactgaaaactcaaaaagccagagtgcctcttctccatatgactgcaacacctctccagcaagggcacagaactgggttggggctgagatggctgaattgacagaagtaggcttcaggaggtgggtaataatgaatgttgctgagctacaggagcatgttgtaacccaatgcaaagaagctaagaatcacgacaaaacagtacaggagctgaaagccagaatagccagtttagagaggaacataactgacctaatggagctgaaaaacacaacatgataacttcacaatgcaatcacaagtatcaatagcagaatagaccaagtggaggaaagaatctcagagcctgaagactatctttctaaaataatacaggcagacaagaatagggaaaaagaacaaaaaggaatgaacaaaacctctgagaaatatgagattatgtaaagagactgaatctacaactgattggggtacttgaaagagacagggagaatggaaccaagttggaaaacatactacaggctttcatccaggagaacttccccaacctaccaagacaggtcaatattcaaattcaggaaatgcagagaaccccagtaagatattccatgagaagatcaaccccaagacacataatcttcagattctgcaaggtcaaaatgaaagaaaaaatgttaagggcagccagagagaaaggccaggtcacttacaaagggaaacccatcagactaaccgtggacctctcaacagaaaccctacaagtcagaagagattgggggctaatgttcaacattcttaaagaaaataattttcttttcttaattaatttatttattatactttaagttctgggatacatgtgcagaacgtgcaggtttgttacataggtatacatgtgccatggtggtttgctgcagccatcaacctgtcatctaggttttaagcccctcatgcattaggtatttgtcctaatgctctctatccccttgccccccactccctggcagaccccgatatgtgatgttctgctccctgtgtccatgtgttctcattgttcagcttccacttgtgagtgagaacatgtggtttttggtttcctgttcctgtgttagtctgctgagagtgatgatttccaccttctttcatgtccctgcaaaggacatgaactcattcttttttatggctgcatagtattccatggtgtatatgtgccacattttatttatccagtctatcattggtgggcatttggattggttccaagtctttgctattgcgaatagtgctgcaataaacatatgtgtgcttgtgtctttatagtagaatgatttataatcctttgggtataactcagtaatgggattgctgggtcaaatggtgtttctggttctagatccttgaagaatcactacactgtcttccacaatggttgaactaatttacactcccaccaacagtataaaagcgttcctatttctccagagcctctccagcatctattgtttcctgactttttaatgatcaccattctaacagtcatgagatggtatctcattgtggttttgatttgcatttctctaatggccaatcatgatgagctttttttcatatgtttgttggctgcataaatgtcttcttttgagaagtgtctgttcatatcttttgtccactttttgatggggtgggtcgtttttttcttctaaacttgtttaagttccttgtagattctgggtattagccctattagtcagatggatagattgcaaaaattttctcccattctgtaggttgcctgttcactctggtgatagtttcttttgctgtgcagaagctctttactttaattagaccccatatgtcaattttggcttttgttgcaattgcttttggtgttttagtcatgaagtctttgcccatgcctatgtcctgaatgatattgcctaggttttcttctagggtttttatggtttttggttttgtgtttaagcctttaatccttcttgagttaatttttgtgtaaaatgtaaggaaggggtccagtttcagttttctgcttatggctagccagttttcccagcaccatttattatatagggaatcctttccccattgcttctttttgtcaggtttgtccaagatcagatggttttagatgtgtggtgttatttctgaggcctctgttcttttctattggtctatatctctgttttggtaccagtaccatgctgttttggttactgtagccttgtagtatagtttgaagtcaggtagcatgatgcctctagctttgttctttttgcttaggattgtctggactctgtgggctcttttttggttccatatgaaatttaaagtagttttttctagttctgtgaagaaattcagtggtagcttcatgggaatagcattgaatctgtaaattactttggacagtacggccattttcatgatattgattcttcctatccatgagcatggaatgtttttccatttgtttgtgtcctctcttatttccttgagcaatggtttgtagttctccctgaagaggaccttcacgtcccttgtaagttatattcctaggtatttattttcttagtaggaattgtgaatgggatcactcatgatttggctctttctttgtctagtattggtgtataggaatgcttgtgatttttgcacattgattttatatcctgagactttgttgaagctgcttatcagcttaagcagtttttgggctgagacgatggggttttctaaatatacagtcatgccatctgcaaacagaggtaatttgacttcctcccttactgtttgaatatcctttatttctttctcttgcctgattgccctggccagaacttccaatactatgttgaataggagtggtgagagaaggcatccttgtcttatgctggttttcaaagggaatgcttctagcttttgcccattcaatatgatattggctatgggttagtcataaatagttattattttaagatatgtttcatcaatacctagtttattgagtgtttttagcatgaagtagtgttgaattttatcgaaggccttttctgcttctattgagataatcatgtggcttaataaaagaattttcaacccagaatttaatatctggccaaactaagcttcataagcaaagaagaaataagattcttttcaggcaagcaaatgctgagggaattcatcgccatcaggcttgccttacaaaagatcttgaaggaagcactaaatatggaaaggaaaaaatgttaccagccattacaaaaacacactgaagtacacagaccagtgacattatgaagcaaccacataaacaagtccacaaaataaccagctatcatcatgatgaaaggatcaaattcacacataacaatactaaccttaaatgtaaatggactaaatgccccaattaaaagacagaatgcaagctggataaagagccaagacccatcagtatgctgtcttcaagagacccatctcacatgcagagacacacataggctcaaaataaagggatagaggaaaatttaccaagcaaatggaaaacagaaaaaatcaggggttgcaatcccagtttctgacaaaccagagtttaaaccagcaaagattaaaaaagataaagaagggcattatataatggtaaagggctcaattcaataaaaaaaagctaactatcctaattatatatgcacccaatacagaagcacacaaactcatacagaaatttcttggagacctacaaagagactcaaactcccacacaataatagtaggagactgtaacaccccactgacactacttgagagatcactgagacagaaaattagcaaagatactcaggacccaaactcagctctggatcaagtggacctcatagatatctacagaactttccaccccaaaacaacagaatatacagtctttaaaccatcaaagattaaaaaagacaaagaagggcattaaacaatggtaaaggcttcaattcaataaaactgactatcctaaatatatatgcaccctatacagaagcaccgaaattcataaagcaagttcttggagatctacaaagagactcaaactcccacacaataatagtgggaaactgtaacaccccactgacagtagtagacagatcattgagacagaaaattagcaaaaatattcagggcctgaactcagctctggatcaagtggacctgatagatatctacagaactttccaccccaaaacaacagaatatacattcttctcagtgctgcatggcacttactctaaaattgatcacataatcagaggtaaaatactcctcagcaaatgcaaaaaactgaaatcataacaaacagtctgtcagacccacagcactgtcaaattgagaaattcactcaaaatcacacaactacgtggaaattgaaaaacatgctcctgaatgactcgggtaaataattaaggcagaaatcaagaagttatttgctagccagctgcagtggctcacatctgtaatcccagcattttgggaggctgaggtggaaggatcacttgaggccaggagttcagaccagcctggccaacatggtgaaaactcatctctactaaagatataaaaattagcaatgcatggtggtgcccatctgtaatcccaattacttgggaggctgaggcacgagaatctcttgaacccaggaggcagatgttgcagtgagctgagattgcatcactgcattccagcctgggcaaaagaatgagactgcatctcaaacaaacaaacaaacaaacaaatagttcttcaaaactaatgagaacaaagtgacaacttaccagaatctctgggttgctaaagccatgttaagagggagatttctagcactaaatgcccatatcaaaaagctagaaagatctcaggttaacaacctagcatctcaactagaaactagagaacgaagaacaagcaaaccgcaaagctagcagaagacaagaaataacaaaattcagagctgaactgaaggagatagagacatgaaaacctcttcaaaaaatcagtgaatccaagagctatttttttttaaattaacaaaagagaccactagctagactaataaagaagaaaagagaaaacaatcaaatacacacaatcagaaatgataagggggcatattaccactgaccccacagaaatacaaccattagaaaatactataaacacctctatgcacataaactagaaatctagaagaaatggataaattcctggacacatgcaccctcacaagactgaaccaggaagaaattgaatcgctgaatagaccaataatgagttctgaaattgaggcagtaataaatagcccaccaaccaaaaaaagcccaggaccatttggattcacagctgaattctaccagaggtacaaagaagagctggtgtcatttctacagaaaatattccaaaaaaattgaaaaagagggacttctccctaactcattccgtgaggtcagcatcatcctgataccaaaacctggcagagatgcaacaaaaaaagaaaacttcaggctaatatccttgatgaatgtagatgcaaaaatcctcaataaactactggcaaactgaatccagccagcagcacatcaaaaagcttatccaccacaatcaagtcacctttatccccaggatgcaaggttggttcaacatatgtgagtcaataaatgtgattcatcacataaacagaactaaagacaaaaatctacatgattatctcaatagatacagaaaaagcctttgataaaatccagtatcccttcatgttaaaaactgtcaataaactaggtattaaaggaacataccttaaaataataagagccatttatgacaaatcaatagcatgctgaatgggcaaaagctggaagcattcttgttaaaaactggcacaagacaaggatgccctctgtcaccactcctattcaacatggtactggaagttctgcccagcacagtgaggcaagagaaagaaataaagggcatttaaataggaagagaggaagtcaaatcatctttgtttgcagatgacatgattctatacctagagaaccccatcatctcagctcaaaagctccataaactgataagcaatttcagcagtctcaggatacaaaatcaatttgcaaaaattgctagcatttctacataccaacaacaggtaagcagatagacaaatcatggatgaacttccaatcacaattgctacaaaaagtataaaatatgtaggaatatagctaacaagggaagtgaaagacctcctcaaggagatctataaaccactgctcaaatcagagagtacataaacaaatggagaaacattccatgctcatggataggaagaatcagtattatgaaaatggccatactgcccaaagtaatttgtagatttaatgctattctcattaaactactatttacattcttcacagaattagaaaaaaactttaaaaattcatatggaaccaaaaaagaggctgaataaccaagacaatcctaagcaaagggaacaaagctgggggcatcatgctacctgacttcaaactatactgcaaggctacagtaactaaaacagcatgcgtggtactggtacaagaacagacacgtagatcaatggaacagaatagagaactcaggattaagacttcacacctacaaccatctgatcttggacaaacctgacaaaaagcagcaatggggaaaggactccctatttaataaatggtgctgggacagctggctagccatatgcagaaaattgaaactggacctcttttttataccatctacaaaggttaactcaaccgatggattaagacttaaatgtaaaacccaaaactataaaaacgctagaagaaaatctaggcgataccattcaggacatagccataccattcaggacatagccatgggtaatgatttcgtcaaacactgaaagcaattgcaactaaagcaaaaattcacacatgggatctaattaaaccaagagagcttctgcatagcacaagaaactcatcagagtgaacagacaacctacagaatgggagaaagtttttgcaatctatccatctgacaaaggtctaataccctgagtctacaaggaacttagagttacaagaaaaatcaaacaaccccattaaaaagtgagcaaaggactcttctcaaaagacatacatgcagtgaactaatatgaaaaaagctcaacatcactgatcattagagaaatgcaaatcaaaaccacaatgagataccatctcacgccagtcagaatgactattgttaaaaataaaaaaacaacagatgctggcaaggttgcagagaaaaaggaacacttttacactgttggtgggagtgtaaattagctcaaatattgtggaagacagtgtggcaattcctcaaagacctagaggcagaaataccatttgacccagcaatcctattactgtgtatatacccaaaggaatataaaagatacatgcatgcatatattcattgcagcactattcacagtagcaaagacatggaatcaacctaaaccctatcagtgatagactagataaagaatatgtggtagatatataccatggaatactatgcagccataaaaaggaatgagaccatgtcctttgcagggatatggatggagttgaaagctgttatcctcagcaatgtaatgcaggaacagaaaaccaaacattgcatgttcttacttataagtgggagctaaaaggctaaatgatgagaacacatagacacatgtgggtgaaacaacacatgctggggcctttcagagggcagtgagagagggagagcatcaggatgaatagctaatgatgctgagcttaatacctaggtgatgggatgatctgtgcagcaaaccaccatggcacatgtttacctatgtagcaaacctgcacatcctgtacatgtacccataaacttaaaagttgaagaaaaaaaaaacaaccctagaagaaaacacagtaaatgcctttctggacataggcccttgcaaagatatcatcataactaagatgctaaaagcaaaaattgaccaatggaacctaattaaattaaaatgcttctgcacagaaaaaaaaaaaaaaaccattaacagagcaaacaacctacagaattggagaaaagatctgcaaactatgcatgtgacaaaggtctaatatccagaatctagaaggaacttaaatcaacaagaaaataacaaacaacccccttttaaaaaatgagcaaaggacatgaacagacacttctcaaaagaaaacatgtatgcatccaacaaacatatgaaaaaatgttcaatgtcattaatcattagagaaatgcaaatcaaaaccacaatgagatgccatcttacaccagttagaatggctattattaaaaagtcaaaaaataatagatgctggcaaggttgcagagaaaagggaaagcttatacactgcaggtgggaaagtaagttagttcacccactgtggaaagcagtttggagagtgctcaaagaacttaaaaccatttgacccagcaatcccattactgggtacgttcccaaatcatactactgtaaagatacatacatatgttccccacagaagtattcacaatagcaaagacatggaatcaacctgaatgcccatcaacaatagactggataaagaaaatgtggtacatatataccatggaatactatgcagccataaaaaagaatgagatatgtcttttgcagcaatgtgaatggaactggagaccattaccctaagtggattaatacaggaacagaaaaccacataccacaatgttcttacttataagtgggagctaaacattgagtacacatggacacaaaaaggaaacaatggacactggggactacctgagaatggagggtgggaagagggtagaataaaaaaactacctatcaggtactgtacttattacctgggtaacaaaataatctgtacaccaaaatcctgcaacatgcaatttaaccacataacaaaaccacatgtactttctgaacctaaaataaaagttggaaaaaaaaaaataatacctacttcataggtaatgggaggtttaaatgaattaatatgtaaaaactgttttgaacagctgctgccacatagtcaatgaatgttaattgctattattagtttagttatgctattgtagtaactaagtcttatttatatttgtaattgtctagaaataatacgttgtgtggcatagtagacaatatatttttgcttagtaaacatatgaacaaatgacagagaagtgaatagaggaggaaatcctgtcttaagtgatggatttcatgttagacttcatttatccttgctctcctccttttcagcaagagtgggccaaagctaaaccagttgaattattctagatgtatccctttcagtactggctgatatagttgattttctctgctgtttccttgttttccatttcattgacttttatgctcttatttttaatatttttttcttctgcttcatttaggcttaaattgtttttctttctcagtttcctaaggtgggagattaggttgttgattttaaatttatcttcgaatatatgcacttaatgctgtaagtttccctctaagcactacttttgttgcatcccgtcaatcttgataagttgtatttttgtttttatttagttcaaaatattttaaattttttattgagacttctttaactcaggtgttatttagtaatgtgttgtttatttctcaatatttgggaaattttcagctacttttctgttaatgatttctagtttaatttcattatggtcggagagcattcgttgtatgatttctattcttttaaatttgttaaggtgtgttttgtggcccacgttgtagtatgtcttggtgaatgttcaatatgaacttgagaaaaatgtttgtattcttctgttgttggatcaagtattctataaatgtcaattagatcaagtcaagtgataatgctgttcagttcaactatgtacctattgattttctgcctgctggatctatcacctaccaaaagagaggtgtagaaatatccaacaataggctgagtgtggtggctcatgcctgtaatcccagcactttgggaggccgaggtgggcggactgcttgagcccagatgttcaagaccagcctgggcaacatggcaaaaccctgtctctctctctctctctctctctctctatatatatatatatagaaatatatatatatacaaaatatatatatagaaatatatatacacatatatatatacacatatatatacacacatatatacacatatatatacatatatatatacatatatacacatatatatacatatatatacacacatctatatatacatatacaaaaatatatatatacaaaaattagccaggcatggtggtacacacctgtagtcccagctactcagaaggctgaggtgggaggattgctcaagcctaggaggcagaggttgcagtgagctgagatcctaccattgcagtccagcctggtcagcagagtgagaccttgtctcaaaaagaaaaagaaaaaagcaatattgagcaataataatgggtgttctgtttctccttgcagttctttcaatttttgcttcacatattttaatatgttccattgttttgtgcatacatgtttagaattgtatgttttcttagagaattgactcatatattattgtgtaatacccttcattatccccgataattttccttgttttgaatctgcttttcctgaaattaatataaacactctagcttccttttgattagtgttagcatgctatctttttcttcatctccttacttttaacatagcagagtctttgtatttaaagtgggtttgtgggccagttgctgtggctcatgcctgtaatcccagcattttgggaggccaaagtgtccagattgcttgagctcagaaattcgagaccaacctgggcaacatagcaaaaacccatctatgcaaaaaaaatacaaaaattagctgggcatagtggtgcatacctgtggtctcagctactcaagaggcagaggtgagaggatcacttgagcccaggaggtccaggctgcagtgagccatgattgtaccactacgtgccagcctgggcaacagagtgacactctgtctcaaaaataaataaataaataaaaagtgagtttgtatagacagcatatagttgggtcttgttcttttgtctattctggcaatctctatattttaattgcattatttagacccttcatatttaaagtgattattaatatagttggattaatatctatcacattagtaactatgtttattcattgcatttgttctttcttttttccttctttttctgctttttttattttaaatgaacattttatttcatttcattttgtttcctcttttaatgtatcaattatatttctctttaaaaaatttagaggttatcctagagcttgccataaacattttaaacaaatccgagtttaccttcaaacaatactatactgcttcgcatgtatagtgcggttaacttataacagagtatactcaattcctccctcccatttcttacaacattgctgtcatcactttattcatatgtatggcctaatcacccagtacgttgttactactgttaatttaaacagttttcttttagatcaattaaaaataagagaactgaaagatttgattttaccttatttatttcttctctgaggattctttctttatgtcaatccaggtttcttacctatgttatttccttctccctaaataactatttttaatattttttgtagggcagttctgttggcaatgaaaccacccaggttttgtttgtcctgagaaagtttttatttatccctcacttttgaaggagaatttgtggatttggaattataggttggtggtttttttcttataacactttaaatatttcacttcactctcttcttgcttgaatgatttctgatgagaagtccactgtagttcttatccttattcctctatggatacagttttttatcctctggcatcttttaagattttctctttgtctttcattttctacaatttgtgtatgatttgcctaagcatagattttttggtatttatcctgcttcctggctctgagatttgtctgtcattagttttgaaatactctcaaccatttcacttcaaatattctactccatcctttctttgctttctggtatcccaattatatgtatgttataccattagaaattttcccacagttcttgggatattttattctttttacttttttctctgcatttcagtttgggaattttttgtttattgtaattatgttataccactcagcaaggatatgttttggcttcattttgcttgtaaatcaaagttcataatcttccaagcctccatagtctggtaccactgtgactatataaatattttgccccaagaatagcctacctatccagttggttctaagtatcccagaaatgggcagaagatatgaccaagtgattcacaaagtaataaatacaaaaggttactaaacctataaataaatatccaatccaaatagtagtgaaagaaatgcaaagtggcagtttgtcatttgctatttgtttactcatcaaaaagagggaaaattaaagacaaatttcagtgttagagaggtagcaatcggttgcaaattcacataatctttagctatttatcaatatcctgaaaagtgttcacaccctttggcctagtatttatctttatcaaatttaccctcagaaaataacctgagctatgcatataaagatattcatcatgctttatttacaaaaccaaaaaaaattggaaatatgaatttctaacaatatgggttttaagtaagcctttaagagtatttaacatccttaaaaatcacgtttcttaaaaatattttatgaaggctgggcacagtggctcacacctgtaattccagcactttgggacgccaagatgggcagatcagttgaggtcagtagttcaagaccagcctggccaatatggtgaaaccccatttctactaaaaatataaaaattagccaggcgtggttgtgtatgcctgtaatcctagctactcaggagactgaggcaggtgaattgcttgaactcgggaggcagaggctgcagtgagccaagattgcactccagcctgggcaacagagtgagtctctgtcttaaaaaagattttttagatctgtcttaaaagattttttaaaaggaaatattttatgaattaagaaatatttgtggccaggcacggtggctcatgcctgtaatcccagcactttgggaggccaaggcaggcatatcacctgaggtcaggagttcaagaccagcctggccaacatggggaaaccctgtctctataaaaaaaaaaaaacaaatatttttgatgcacaaagaatgaaaagcagatatgcatataatgctgatcatgtcgggtatacataacaagccatcaaatatttacaggtgttatctctgggttattaagaataatttttattttcttctttatattttgctgcgctaaaaaaattcctacagaattgtaaaatgcatcgttttatagaagaaaagttcttctaaaaatcctacttaactcccagagtcgagctcaaatacctcctcttcccaaatttctttctgactactcttattttttttcggagatacttcttagaagtctgattacttttgtttacattgatctttccattttctctgtttatctttctctacccagcttttgagtctagatgctcttttcattctcttctttcgctctaggcaatctcactcatgcccataacttcaagaactactcatctgagctctaaacacatacatacagctccacagctctactgaggtttcctaaaggcatttcaaactcagtttgtcaaaaacaaaactgctgatcttccttgacaaactgattcttctccattattctggctctcaaggagagatagcacaatctcttcaatctttcccaagatcatgggtcatccttggcaactcactcattatcagtccatctagtccgttaatgggtctgattggttttactttctaaagagctcgtaaatccatctacttttgtataactgcagtatcaccaccttagcccaacctaccagaatctctcataaatgagttaatacctataaagtgcttaggatattgcttggcacaaagaaagtatccaataaatgttagttgttattcttcctattcttatcagtaccacttatctgtgccacttacctatagcctgtaatattgccttcctcacatcaacttttacccacttccagctgttctctacactgaagcctatgtaatctttcaaaaacactatctgattatcccatcttacctgcttctccaggcacataacctttctcattgcaggccagaccctccaaagggaggaattttacagctgggctgctgggggtgacatcacatattggtaggaccacgaagcccgcctgagtctcagaccagcaagtttttattaagggtttcaaaaggggagagtgtgtaaaacagggagtaggtacaaagatcacatgcttcaaagggcaaaaagcagaacaaagatcacatgcttctgagggaacaggacaaaaggcaaaacagaactactgataagggtctatgttcagctgtgcacatattgtcttgataaacatcttaaacaacagaaaacagagttcgagagcagagaaccggtctgaccacaaatttaccagggtggagtttttccccaccgtaataagcctgagggtactgtaggagaccagggcatatctcagtccttatctcaaccgtgtaagacagacactcccagagcagccatttatagacctccccccaggaatgcattcctttcccagggtattaatattaatattccttgctaggaaaagaatttagagatatcttccctacttgcacgtctgtttataggctctctgcaagaagaaaaatatggctctttttgcccaaccccacaggcagtcagaccttatggttgtcttcccttgttccctaaaaatcactgttattctattctttttcaaggtgcactgatttcatatttttcaaacacatgttttacaatcaatttgtacagttaacacaattatcacaatggtcctgaggtgtacatcctcagcttacgaagataacaggattaagagattaagacaggcgtaagaagttataagagtattatttgggaactgatgaatgtccatgaaatcttcccaatttatgttcctctgccacggctcctgcctggtccctctgttcagggtccctgacttcccgcaacattgaactacttaaactattccttcatcttctcatatattcatggttttgccaaccaaagaaacctctagttatacttatcttatgcagagttgcccagccatgtaccatgattcatttagatgtggactaagatattgaaattgtcatcctgcgtgtaggaggagagatgggtggggaaggggagacctgggagaactataggctatttgccttctgcggtgagcaacttccttcccagtatgcaaatctatgataacattttctgtgtgttatgacttgaaaaaggttgagaagcattggtctagaaataatggatattaagcctcagtatcaactccctgatcatgaagcagcagtcacatttaaattttgactaaagagaaaacatttaagtggaaatgccactggggtcaaataattttcttatccctctatagaagatcagatttactctaattttctttttcatttagttctaatattttaggtctgttgtttcccttgaattgtgtttatgaatttttaacatataaatgggtaagtttgcagaatatcaaacaaaagatgctatgtttagtcatccagggggttaacattgaaataccaatattgaaaaagctaattattgcatagagaagagtagcagtgcaatacagtacaagcaaactcatgaggccatggtatgaaggctattttagtattgattaactattcttcctatagccttagtactattaatgtatcactgctgattatgcaaatattggattctgaatatttaatctatttgcaaggatggttcgttgtatgtttccatggattgaaaggaactgaacctgggggcagataatcaagaagtaccatttgagtgcctgccatatgctcagcattgttctgggatttgcctacacagaaatagaacgggacatgagcttcacacccaaagaatttgcaagataattttgacatagatgagacagtagttattccaaactatgtctgggatggaaatgacagcaccaattacaaaactaaatacaaaactgtaagatacttgataggtgagtctgcttgattcacctttttatctgctcagtgcttgggcagtactatgtaataaatattcagtgaggcctggggcagtggctcacccctctaattccaacactttgggagactgaggcaggtggattgcttgaggccaggaattagagaccagtctgagcaacatggcaaaaccccttctctactaaaaatacaaaaattaaccaggggcgctggtgtgtgtctgtggtcccagctactcagaaggctgaggtgggaggattgcttgagtctgggaggcagaggttgcagtgagccaagattgcaccactacactccagcccgggcagcagagcaaaaccctgtccccctacacacacaaaaaaactcagtgaacatttgttgaatgcataaatgaatgcaagtgctaaattatgtgattctatctctaatgcaagaatcaaataagctggaaatcactgagatctgggttagcagagaaatctttaaaggagtttaagactgaattttgagagattggggtaagggtagtataaaccacatttatgtattcattcattattcaaaaaatatttgttggctgggcatggtggctcacacttgtagtcccagctacttgggaggctgaggtgggagactcgtttgaacctaggaggcagaggttgccgtgagccatgatggccccactgcactccagcctgggtgacagagcgagactccatctcaaagaaagggggggaaatatatatatatataaaatcccacatctttggaaggccaaggcaggaggatcgcttgaggctaggagttccagaccaacctgggcaacgtagtgagaccccacctctacatacaaacttaaaaaattagccaggcatggtggcacaagaggctgatgggagaagattgcctgagtgcaggagctcaaggctgtagtaaactatgactgcaccactgcactccatcctggatgacagagcaagaccatgtctcaaaaaaaaaaaaaaaagatttaaatttcactcattttatgtgacaaaattatggaatgccttaaagtcagggtaatttagaagagaaaatatccactgaaagttctgggtttaggttctgtttttgttctctagtgagggaagaaaaccaaaggatttgttttaggaagcttggtttgaaagtggttcatgtgattatcctaagtacatggttgtctcttctgttctgaaaaaagtctagtgatgagtttttcaccaattttcatgagactctgtgaggatattaaattgcctttttaataatggtttcttcttgtgtatctcacctattttttcttgtggcaatatcattccatttctcgagttttagagttgtggaaataaagaacttttcctgtccaataacttttcaaatactatagaaaagaagtagactttcactcacctggtgaaatatcaccaactcccttgaaccttctcacattgtttgtttcctaaattttaaagatcattccttaactattaaactttagtgatacataactagattcacctatgtgggcctgacttgtccctttgtttttacgcttgagaaagagtggtcataataacactgtacctgtaaagattaaaggactagaagctcccaaaataaccgcatttcaagagcagttttgcatatatagaaaagtcaactttgtccaatgcaggttaaagaatttttaatttggtgtggactaaaacatctcacattctctttattcctcaccctatcaccatcattattatttgtgttactttcttgaatcttgtcatccccaataattagaaaaggagttaacagcaataattatccagagagctgtcccttctttcctagaacacctatacatctagctgaggtcagaaaggttcaattgatttgcataaatctgcacatgcagggatgaagagagaagacacattagctgagcactctaagacaactcctgtccatgagatgctatttcctgatggaacttttatgggcccgtattgcctactccacctcctaaccaaggaccgcattctgagttaaaaatctcagtgttcagctgaaattatcaagggtggagaaagggctgggtaaaacttcaggtgtttttgtattttaaaggtcattcctgtaagattactaactcacctcgtctaaattgatgcacattaaaattgttttaactcacaaagcaaaagtagagaatattaagagatccgaaataatccatgctttttgctcctttcttttcttgttttacggtccgaaagaacccacttcaaatagggaagggagtccaattttccaaaagcaattcttcctttttttttctttctgagcagcactcatacagtagcagtggtaaaataaacaacgatgtgttgaattttgtttctctttatctatatgacatttgtgtcatcaccgtagctctaatccatattcaggtcttcatgtttggtgtgcagtaatatgtaaattatctcaccagctgcatggagcagtgtttgtttattctatttcttttggcactgcacagaactgaatttctgccaaaatggggctgcttcagggagcactaatgctctaggaggaagttttgaaaggaaacgcacatcataagtcttcactctgtgaagcagcaaaatcaaaacaaactttttgtttacttaaatatcagtattatgaatgtaaaataatgtgtttgttaaaatataatgagcatgctgcccatctctaagatgctcagtgtacgtgggctttggaaatgaggacataaagctgagaaagctggcgcatttttattcttagaaagaaagtaggtgaaataaaacagacagagacaacagctagaagtttaaggggaaagaaatattttaacatgcgtattaatctctggaaacacatggcatttacatgcatttaaatgtggacagctgtggcgtttaagtgttaaaaaatttcattaatgatgcatagagctatctacttctgttggcaggcctttcagtcttcaatctgacacttccttttttatccagcaagctaatttcccctcttttgtgaggagtaactgttttcacactactgcttacccagcaagcctccttattgtttcatggttaattatcttctccagcttcaccttccccagcaaagggagcaggactgttcctccccagcactaatgaaagctgggttttatgggtacactgtgtaaataaatgcaaggtctgatcaggcaacgtaataaatgagttcctaaagtttatggagtcacacacagctcatctagtggctttactaaataacgaaggaaaatgattaatttggtggggttgggagcagggggcttcaattttagagagaaaaaaataaagcctttgtcagcttaggatggaaactatctgcaggtaaacataagggatctccgtttatccaagtcttccttgtgctcagtaatcgcagccatgacatttgccaggagaatgtcttggagaataggcctttgagaaatattgttgatttggtaaaaggtggaggtcacctggtattttatttccctgattgctcgctatttattaagagaaaaaagcaaccaagctttaggtagtgcaaagtatcctacactctgcgctggaaggaagcaaagcagagatattcacaaatgccaccattgtccagtgcctggagaaataaattcagcaggcatggcccaggtaatcaactccactagcaggtcagtgtcttacatctctgtgcgatcaactcagtcatagtctcttagttgctagctcaaggccccatatcttagagtttgggacttgtagttattttgattattttttgcaaagaattttaggagattaaaatgaccccaaccccctaatgctcgtttttttttttaatttacaaaatgaattcacattttgaaatcctttttctctatattgaaatgtgcatttctttgatttgggaatctttgatttgggttacagtttgaattaaggtcctgacatttaaaactctcaagagcccgtgtaagagcccaggacaagaacttctattccagtcaagatttagttcttaaatttaattggatctcaggatcctaagtgtgtttcccttgaggtcgcaaaaagaaaccctcccaggggagtctatgttttttaacgtgtctagggactctagcataggaatcagagtataaaatctcttggaaacttacttcaaaaatgtgtattgccttctaggaaaattcatcctaaaatttcaagcaacctttctagcatcagtgtaacttgtgaacttcccagtcgtttttatggaggggactcaacagaggtgttctggcaattctgagactttttaatctcctctaaatctaaaagcagttatctttatgagaggctattaaagcacagatacgttaaatgaaataaaatcagatgtagaacaaggattagaccatcttaagaaaatgactcatagctgacccacctattaattagcttaaaccctgggccaatcaaatgataagcatgaggaaagcaagacaagtttccttgacaggcttagttaagatgaaaaagagattggctgggtgcggtggctcacacctgtaatcccagcactttgggaggctgaggtgggcggatcacgaggtcaggagatcgagaccatcctggctaacatggagaaaccccgtctctactaaaaatacaaaaaattagccgggcatggtggtgggcgcctgttgtcccagctactggggaggctgaggcaggagaatggcatgaacccgggaggcgcagcttgcagtgagccgagattgcgccactgcactccagcctgggtgacagagcgagactccgtctcaggaaaaaaaaaaaaaaaaaatagttgaaaaacagactaagataatgtgtgccatttttggtcattcttaatttgctaattcaaactgaccaacattttattttttttctctgaatgacttgtaatcatagtctcattattaaaaaacaacaaaaatcatactctatttatttgagaggagcaaacaagaacagtaatgatataatgttggctcccaatttgtcctcattgagaatgaagacacaagaggctctcaataaataaaatatgttcccatggttaggttacaactgtaactatgggtcagaaggatggggacttgcgtgattggcatctgaagtgaaggcagtcttgtgggactgagccctctcacgtatgggatctgatactaactccagatagatagtgtcaacgttggattaaatagtaagacacccagctcatgtctggagagtggacagttgcttttttacttgagaagccttatatcagaactgtaaagggcacggttcctaaacgtgagtgaactctattatctgatataaggcttttcaggtaaacccacatgttggcaaagctctccttgtaccttcgactacctcaggatcatgccaagaatcttgtgttcttgaaactgagtttgcaagttgggaccttatgtctatctcacaggaaaattcgtatgttagaaaacttcacttgtttacatgactattcaccttctcttttctaccaatatgcattgtaggttttaaaaaatgtaagtttttattaacgtaagatcattttcataaaggagggagaagggtatacttttcccttaggcaaaggtgaggcaaaaattacatccaggggtataaaactcacatgttatgtcaatccctgagcaatgtcaggaaaaaaaatggggccagatattatcattgggagaaaagaatgtatgcaactttgcatgtggttctgtcactgtcattcaaacagatttaccatgtggtagaatgaagaaaatgccaccatttcattgcagttgggatttttacaacttcattgatgttatttttctcttgaactttcttttatttgtttcagttctatgtaatactaaagaggtaagaaagagaaattcttttaattgaaaaactcttcctaaatttttaaaaaattcattttaaacagtcctacatttaggtactttcttgaaactctgggggaaattccagggaaacaccaaatatagtgactgagaaacaaaaaataaaccagttctcctattcaggctcttctcagtgtaataaaaatttcagtgtgttgacatgtaaagcaacagtcaagataatttatttgccagtgaaaagtagattatttttcaagttacttctagtgaaacattcagagttaggtgggaaagtaacttttttctacagtagatgcttaacaactatgaataatgatttgcacaagaattaacttgcttaagaaaaacagagcctgatgcaagggattcatctgttgccacctacctataatactatcaacactgaggttattgcacctgagaattctttagaaattatgacagtatctaattctttgatttattggcacaaatatattgcttctctataaaaagtttctctacacacacttaaaagtttctctgcacacactcagacagcaaatgtgtggggtttttttacaccaagctactgtctgctctctggacatgagctgggtgttctactatttaatccaactttgacagtgtctatctggagttagcatcagatcccacacgtgaaagggctcagtcccacaagactgccttcacttcagatgccaatcacgcaatttcccatccttctgacccacgggctgtaaattcccacaacccttccttaggttattctagccataacttgctagaattgctagaagagctcaaggaaacactttactcacatttaccagtttatttaaagatacaactcaagaaaaaccagacgtaaaagaaatgtgcagggtaagggggagggcaaagcttccacatttctccaggtaccttacccacctagcatctccaggtgttctgcaacctagaagttcatcaaatctctttgttcaagaagagtagttacagttttcatctctaaccctacccccccccccaacccctttcccagaggtccttcggtggagctgaaagttccagccctctaatcacttggtctttctggtgaccacccccaacctgaggctatctcaggaccctgccctaaattttctcattagcataaactctgttgtgatcaaaaggggccattatgaataacaaaaggtattctatcgcttaggaaattccgagggctttaggggctctgtgccagagaactgggacaaaggccaaatatatttcctattataccacagcttcttaatcaaaatagcacttatgtgggcagcccctccagtgaacctgaagttacagtaagaaagggaagaaaagaaatccttatatttttttgtattgctctttcttctcggaattccttcctacaacttcacaatcatcctgtttatagaacattcaaggtctttgcaacttattcttcacacacaaaatcaaattcaaaagtgataggatttttttttttttttttgcagggggcggttgttatgtagagttgagatgggctactgtgctttgagggtagaggtattagaacaattgaagggtttcctgtacattctatgacctctgtggtttctccaattgtgttctccttccaagactggtgctgggacaaacaaggtgttgaacagtacctgacagggccacactcctaatttcaactcaaattttgccagagaagctggactttttcaggctaccttctagcacatcctgtacttgtttcttcatgcactggcctctagcacctgccctctctaaggttacagatgattttctcttcgtttattcagtggctttcccttaattcacataaagttaatcactttaaagtgagcagttctgtggcatttagtagttttaaaatcattttaaagtgagcagttctgtggcattcaccatgttgtgcaaccaccacttcttccaaacattatcatcactccaaaaggaaaccccaagcctgtaaagcagttgcatcccattccttcctccccgcccgcaggccctggaaagtaccagtctcattcatctctgcagatttacctattctggatactttatataaatggaatcatacaatatatgactttattatgtctggcttctttcatgaaacatgtttttgaggctattagcttttacaactgagagtttgcaccagttgaaagtcagggattttccacgtgattttgccacagcacagtttaccctcagaacctttctccagatcccttcaacagttcttgagacaacaggcaagtctttttacttttttccttcagatcactcagtaaatttttcctttctttcttttttattttttggggacagggtctcactgtgtcatccaggctggaatgcagtggtacaatcatagctcactacagccttgaactcctgggctcaagcagtcctcctgcctcagccttacgagtagctgggactacagtcatgtgccaccatgcctgggcaatcagtaatcactttttaagaagctgcttcatgccaggcactattttaagtactggggctctagtggagacaggacagtcagagtacctgtcctcatgaagtttatttatgggaagaaaacccctgcttcccattactggactcccttttgtccctgatcccttttgagaacaaaggcaatttttactgttataaaacttactttaaaacaacatctaatggatttttcattttcaactatttcagaattatctgtgtagtcaagactaggaaatgtgtccgtgtcagtactgattttagtgagatttgtgagatgactttggattttacttgtctgttttgagtttctgatcagctttgttattgaaaaagagcattcactagaacagtttttgatcattagtgtgagatagactttcaaagcgttttctgaactgagacaagttactttaacattgttgtcaatctgatagatagtgagcaggatttgattgctctaatgggtcagttgtgatagaatttcagacaatggacttgccttttttaaaaaaaggttattttcaggaaatagaaagttcttgagctatgggccttgctgaggactgggcaagtgtcttttctcatttggttatctttgtgggataagtccagctaggatatgaaaagacaaatgtatcacctcatttacagtgcagtagaggtgagtaaggggcctaatcaatgtttctttctttgactctttggtcgtaccaaagagattagtcaaccaacctccagtcttaaacactgttaacggttatttaggattcagccatactatcgtctcctcacttcaccagagggaatatatatgctgatggctgccagtcattccacccctactgtgtaccgggctctcccctaggactttacgtacattttagtaatttaaagctcccaacagtctataaggcagatacaatgtactgtaattgtcccaagataaacaaatgatggaactgaggcatatagaagttaaataacttgtccaggatcacacagctaacatatgggagggctgatccaggattcaaacccaaacctgtatgagtacctcctccagttgcaaaatggctgataaacattgaacattattctttttatcctaatttctattttattctatgttttttcttgctgactctgaatccattctctgctcaataagaggcagagtactacaaactcagagttctcttaaaagttatctttccattttcagagatggaagcagctgtttgtcattgctcttatatggtttgtttgtttgtttgtttagagacagggtattgctgtattgtcaagctggtgtgcagtggcatgatcatggctcactgcagtgttgaactcgtggcctcaagcaatccttccacctcagcctccagagtagctaggacaacaggcacatgccaccatgcctggctaattttaaaaaatttttacattgagacagtgtctcactatgtttcccaggctggtctcaaactcctgggttcaagcgatcctcctgcctcagcctctcaaagtgctggaattacaagcacgagccactgtacctgtcctgcttttgtttttgtttttataaaatttctacctaagtctaatttaggaaaataattatgtaactaatgctcagacactttggtttaggttcagggttacagggtgccaagaaaagcagagtatagaatgttggcatttcccctagtttaaattggttcatctatactgaggtatatgttattttctcccacctctccatcaccccctcaaacctgtgtgttctgcttttcaccctggggtaaatatgtacacctttattcaattacagttattgctgcttatgtttttgtcacttttatttatttatatgttattgttgtgttctacttttctccagataaatctctcctgcctggtttttgcatgtggtactgcccaataaactcctggatctagaataaacagggggagcacatattacaaaaccttcttaaaggttctgcacattctgagtaccagaagtttgactgtaacattcagttcatcctagtctttttgagattttttagaaaaaaatctttcaaaagatgcaacttttgaaaggaaattaaaggtatctagaggcggctacatcaattctctattaggttattgttttgtagactgtcgagttcctttatctttactctttagctaataaagtatttctcatctcttatacacacccaccatttaagctaaaattgtaagaaaatcctggaaatgcaatcatgggagacctaactcaattaaagccatacacatgcagagggtattaattgagatgggtattacctgccacagttggaatcttggttcttctttttttgtcatcatcataatcatttctccaccacttttattgctttctctgtatatgttgtgctaatataaataaaatgcttccaagtgtaaaaataataaaataaactagcattatttaattccatttgtttcttgagcagatctgtatagctgtgtgtgtgtgtgtctgtgtctgtgtctgtgtctgtgtgtgtgtgtgtgtgtgtgtgtgtgtgtgtgtgtaattatttatataatgccttggtttgggccaaaattctgtacccatgcagcaagtctatgaatagaagacccttgcatgaattaattcagaattatttctggaattgcaggctgtcttttggaacctcatttattactccctatccatttggtctcattcaaatactcttagattttgtctaaattcatttagatttatcactatatcaaagacaggaacattgtgccttttttaaaaagtaccaaatagctcctctgggaaaacaacaacaacaaaaacaaacgtttgattagcttgagcattattggttgtgttgggctatcatcaaagagagcattcaaccaaataattttcctatcagttacatctttgtatatgcaaatcttttttttcccaaagagaacttttttagttatataaatactctaacatctttcttggaaacttttcccactttcttgccccaggggtatattttatggttgaagttaaatcctgaggaaatggagattttattgaaaatattgacagaatttaatccacaacaggaagggagtgagcgagggcagagtgagtagcacttctttaatatgaaaaaatttaaagtctaaagtgaatgattttctaatgaatcctgtcagatatttcctggaattgccatacaagaaattttcagaaatcacaataaatataagaggtttataagagcagagagttaataaaagaacagtattacatccaaaagtttaatcttttcctatggaaattttccattccaactacagctgtttgtcagtgttccttccccaccacacacacacacagataccaaaatcctcagatgcccaagtctctgatataaaatggtttattatttgcatataacctacagtcatcctctctctttactttaaatcatctctagattagttacagtagttcatacaatgcctacacatcacttgacacagggaaaacttgggttttttttttttgtaaccgtgaaatttttttttacaaatatatttgatctgcagttggttgaattcatgaatttggaacccatggatatggagggccaactatattttactgagcaaaggaattttttcctttaggtgctgctataaattttatagtttcttaggcttgaattcgtaaagccgtaaaggcagcatttggtcagaaaacgactgtgtcatggaagatgagtctgacttgcaggtgccacttgggcttagctcccagcccatccagatggcacaattcccgcttctccatgtgagcccctaggtttgggatccttgtggaaaatctgtgctgctaaatgttaaagtcaaccagagagttacaaaaagagctcctttgaaagactaattcaattatttattagcactctcagagtacagtgtcagccaagatagtatttgaaattaatatactatttgattagactgattgattgttcctacagctgaagattttaacattcattagccgtactaactggtcattagtacttcctttatcagcaagcaaagaataaacagaaattctaataaaaattcatcacagtgaatgtactccgtacctaagccactgtgatgattgctgggtactagattaactgctgtaacattggcagtgggaaagatttctcttagaaaacttaaaaatttcccttaattaatgtttagcttgtaactggactcttaaacttaagtaggctatacagataatctcttacatacccagtataataaagtgctaatgggtattttatacttaatgtgtttgtgtggtaccctttaactattagtttcaggaaggattgagggcttcttaggaaagtttgctaacatgctgcaggtgacgctttttccccactactgaggaatacaagcatcatgggctgtttttcaaccagacagttaaaataattctgacattaatacaaatatgctagcctgttatgctgtgtgatacctctgtctttctgccaagtcgtgaatcccttgtggttttaatagcaaattggaaggtatgatgtgaagaagagaatgaagcaggcagaggaaaccctttatgaattgactcaagaccacactagagcgattctgcatgtattaagaattatagctactggctggatgtggtggttcacacctgtaatcccagcactttgggaggccaaagtgggaggatcacttgaatccaggagttcaagaccagcctgggcaacatagtgacaccctgtctctacaaaaaataaaaattagccaggtacggtggcacgcacctgtagtcccagatacttgggaggctaaggcggaaggattgtttgagcctgggaggttgagactgcagtgagctgtgattacactactgcactccagcctgagcgacagagcaagactgtgtcaaaaaaagaaatacatatatatatatatgtatggccacctaatactgtctgccttctcagcacttcgcaagcactagcttgtttaatactcagaatgatcttgaaaaattgacagtgctatccccattttacaggcaatgagactgttgctcagaaaggttattaagcagcttgtccaaggtcatgcatatggtaagcagcaaagtcagcccttcaaccagtctgcaagttctagtgccatactcatctgcttggctacgctgcataagcataagctgaacttagaagttctgtttgtgtttctgtctgtaggtgagcccatcaagttctgcactatgtatatatatatataatctttcttggctctagcatgaattcagacagctggagagcaagtaaggacagtgaaggaatttgaacagagtccaggagcctagccagctactgtgtcccaaaatatgtcaagctctatctaaacagaggcagagccaagaagtccaaggaaacatcaagggtcccaagtgggcaggcagagagcagcataagggaatctgggctacttcatcctggggtggtcaggaaagtcttcaaataattattctggggctggtgtgggctggagtgagaggttcctgtctatcagaaatgggggaaggactaacagtaagtagtgagccaagttaacaaggaccaaagtgaagtctctgtcacagatagagactggaaagaaaggggctgagagaactttgactaagaaattgccctggagcattcagggtctaggaagatacagctaaggagaatagtcaagtgttgctagtcttatgtctgattgggagcagggccacagtctgaaaagacagatccctgaataggaacacagaggaagggggggtacacagtcatgtgcctctggcccatgaagtgctctacatggtggctacaactctattttaagtccccaggcaaaagctgcttaaaatggagaacccaggaatagaggcaagaaggagtttgccatgtgtggctgcagatagtattctactatggactccagaactgaaatagtatcagtgtgaatgcaccttaggagatgtcataggctgtactatttttaccttcattcacctgatagttttcactctatccaagattcaaaatgtagatgaatcaataggaaatggctaattccataaattacaatttgacaataataatcttacattttagtctatgttattgccttcagtaacaaattactattgatagaaaagcctctttcagtaatttctgggtgttatttcagagaggaatagagttgataattaggccgtctttcaagtccatgcttggggcagttttctttcctgagtcttctgagagattttcaatggataaaattttcatgcttgtgttccctaattcttctccttttctttttctttctctcacacaggagactttgaatgtgattgatcctggcttgatggacctaaatgggatgagtgaggatgccctggaatgggatgaaatggacataagtaacaagttaattagtttgaatgaggaatcaaatgaccttgatcaagaactccaacctgttatcccttccttgaagcttggagagacaagtaatgaggaccctggttatgacgaggaggctgataaccatgggggatctcagtatgcctcaaatattactgccccctctagtccacacatttaccaggtgtacagcctccacaatgttgaactctatgaggacaaccacatgccatttctgaaaaacaatccaaaggtcactggcatgacacagcctaatgttttaactaagagtctcagtaaagactcttcattttcatctaccaaatctttgccagatcttctaggtggttccaatttggtaaagccctgcgcatgtcatggaggagacatgagccagaattcaggcagtgagagtggaattgtcagtgaaggagacacagaaaccactaccaactctgaaatgtgcttgctcaatgcagtggatgggtccccaagtaaccttgaaactgaacatctggacccacaaatgggagatgcagttaacgtgttaaagcaaaaatttacagatgagggggaaagcattaagcttccaaatagctctcagtcgtccatttcaccagtgggttgtgtaaatggaaaagttggagatttaaacagtattaccaaacatacccctgactgtttgggagaagaattacaaggaaaacatgatgtgtttacattttatgattactcatacctccaaggctcaaaactcaaattaccaatgataatgaaacagtcacaaagcgaaaaagcgcatgtggaggatcccctgcttcgtggtttttattttgataaaaaatcatgcaaatctaaacatcagactacagagttacaaccagatgtacctccccatgaaaggattttggcaagtgcatctcatgaaatggatcgcatttcatataaaagtggcaatatagaaaagacattcactggcatgcagaatgccaaacagctctcccttttatctcatagttcatctattgagtccctttctccagggggtgatttatttggattgggcatctttaaaaatggcagtgacagcctccagcgaagcacttctttagaaagttggttgacttcctataaaagcaatgaagatctctttagctgtcacagctctggggatataagcgtgagcagtggctcagttggtgaactaagtaaaagaacattagatctcctgaatcgtttggagaatatccagagcccctcagagcaaaagataaaacgaagtgtttctgatatcactcttcaaagcagttcccaaaagatgtcctttactggccagatgtcattggacatagcatcttctatcaatgaagactcagcggcatctctaacagaacttagcagcagtgacgagctctctctttgctcagaggatattgtgttacacaagaacaagatcccggaatcgaatgcatcgttcaggaagcgtctgactcgttcagtggctgatgaaagcgatgtcaatgtcagcatgattgttaatgtctcttgcacctctgcttgcactgatgatgaagatgacagcgacctgctctccagctctacccttaccttgactgaagaagagctgtgcatcaaagatgaggatgacgactccagtattgcaacagatgatgaaatttatgaagactgcaccttgatgtcagggctagactacataaagaatgaattacagacctggattaggccaaaattgtctttgacaagagataagaaaaggtgcaatgtcagtgatgagatgaagggcagtaaagatataagtagcagtgagatgaccaatccctctgatactctgaatattgagacccttctaaatggctctgtaaaacgtgtctctgaaaataatggaaatggtaagaattcatctcatacccatgagttagggacaaagcgtgaaaataagaaaactattttcaaagttaataaagatccatatgtggctgacatggaaaatggcaatattgaaggtattccagaaaggcaaaagggaaaaccgaatgtgacttcaaaggtatcagaaaatcttggttcacatgggaaagagatttcagagagtgagcattgtaagtgtaaagcacttatggatagtttagatgattcaaatactgctggcaaggaatttgtttcccaagatgttagacatcttccaaagaaatgtccaaatcaccaccattttgaaaatcaaagcactgcctctactcccactgagaagtctttctcagaactggctttagaaaccaggtttaacaacagacaagactctgatgcactgaaatcatctgatgatgcaccgagtatggctggaaaatctgctggttgttgcctagcacttgaacaaaacggaacagaggaaaatgcttctatcagcaacatttcctgttgcaactgtgagccagatgttttccatcaaaaagatgccgaagattgttcagtacacaactttgttaaggaaatcattgacatggcttcgacagccctaaaaagtaaatctcaacctgaaaacgaggtggctgctcctacttcattaactcaaatcaaggagaaagtgttggagcattctcaccggcccatccagctgagaaaaggggacttttattcgtacttatctctctcatctcatgacagtgattgtggggaggtcaccaattacatagaagagaaaagcagcactccattgccactagacaccactgactcgggcttagatgacaaggaagatattgaatgcttttttgaggcctgtgttgagggtgactctgatggagaggagccttgtttctctagtgctcctccaaatgaatctgcagttcccagcgaagctgcaatgccactacaagcaacagcatgttcttctgagttcagtgatagttctctttcagctgatgatgcagatacagtggctctttcaagtccttcctctcaggaaagagctgaggttggaaaggaagtgaatggtttgccccaaacttccagtggctgtgcagaaaacttagagtttactccttcaaagcttgacagtgaaaaggaaagttccggaaaaccaggtgaatctggaatgccagaagaacataatgctgcttcagccaaatctaaagttcaagacctctccttgaaggcaaatcagccaacagacaaggccgcattgcatcccagccccaaaactttaacctgtgaagaaaatcttctaaaccttcatgaaaaacgacatagaaatatgcataggtagaatgtaccccctccccaagcatgaaaatcatctcactgaaaggtacgtatagtcctcatgccgtatatgtatttaaaatattgagttcaggtcagcaaaaccatggcaggagaaaaggctagtcagaatgaccagttacggcagacagttatctgaataagacatttaggtagaagaaatgctctcaacaatgaaagtaactgtgaagcaaaagaaaaaaaaaacagggaaaattgacattcttagtgacattatctttattacataattctggcaagaatacaaaatttgaggaagtagttgaacaatttaaggcctcaaattcttccattgagggagaataaaaagcttatccaaatcgcaattatactccatgatcaaaatgcatgcatagtaacaatgctctccacttcagtttcctgcacagagagctgtccgttctcttcagtgcctgcagatgaacaatgattaggctaaaggccacatctcctgatttggcccttccttttatgcttctgtctaatgtaactatcgtcacatttgcttccccagtggaagactgtgctgtcacaactcctaatcacggccatgtctaaggattcaaacaggaggggaaagttgatgttaaagaagaggctcttatttatccacatacagattgagaacaggctcagaaagcaaatgcagagagaatacatgacaagttaatggcgttttgataaaaacagaatttttgaattttgcctgaaggtgacaggctgatttccatcaaattttttaagaaagtcattccactcttcacatttaataagacagctattgatcgataattccaagatgatgatatgtctctaaaagtgacacaaagattctgttatttcccatttctaagccccagtgatgaatatgctttctcaatcaagtttaaagaaaatttgagctttcaaatgtgagagtcatatttcacccaagtatgagatgcctaatgccacctccaccccccactccagaagcttaatgccgtcacctaaactcgtgctataggaaatgaattacagaagcaatctaccctaatttgttaacttattcaaataacagttattatacttaactatgctaaagattatcttttttgtggcagattgtttattttttgatgagcctaattactgattttctaaaagtaatttacatttattacaaatacatcttttaaaatgtgacagataaatgttgttcccataatgtattatgaaaaaagttactatttaaaaacacattatttaatttgaaagatgaatggcaaacatcattatttttttttcctgcaacacctgtgccctaagcttattaaaatgtgtgattctgtgtagagctgctagaaatggggactaagggggggcatctataccatatataccctaaaaataaactcagtatgcaaaattgaagaaaggcatcccacttactaatatagctcaactaattttctgtgtttcagactctatttacaattggctgcaagtgagaacaaaagtaggagagagagaaatgtattttctgtgaaacatgtccaccctataatcacattctccatcagtatgcagtaaaactgaccattaagggagagtaactgcaattccataagctgcttcaaaacaagtcctattagaaccgattgtactgctggctctgccaacctccgcagaagggctggtagagcctggctgattttgttttctgaaaggggataaaggcttgaaagcaacaccactctgagcatgacatcatgtgactgtgaccctcaagtcaccagtcatgctgagatctggagctccagaagctctggcactggagaagcctttgcgaagcactctcccttttttgatcctctgggaatttcttctctctcttacatagacgtagaattgaaatgaaatgtaaatgatgagcagctccatctttagacttggaggaagtgaatgtgctggtggatctgtgtaaccctcacattttacaagcagggacaatgtcaaactagcagccagcccgtctgccagtcagcagtattttttgttaagccccggtgatgcctggccttatctcgggcaaagggagaaacagccagattttacttctgcagaactcacatcgcccccaagtgacttgttataggcctagagccatttaaatagccatatttactggtcctattcaggatttttttcagtatcatgtggacaaaacatctggatgcctgaaatttttaccagacgttagcattggataactgggtataaatagtcacatattgttaaaatactatcaaccaggacaaattatttaatctcaaaatgttgacatgccttcagtatttaatgtcaagaatacatagtaaaaattgtttgataaatatgaggtttcatgtctacaagagcttaattgttgtcattgttcttactacaagttcagaaaaagaaaaagaaaaagctgtgctttttaaagacatttgaaaaccatcagtggtgatgctctttttatcaggacagtaaaattcaccaaattccatttgcttggtttttttttttttccagaactaagttttcagatgatgaaatgattataatgccacccagaagagatataacttagaatagcagatagagtctgcaacagtaacaaaaatgttttccagattttcaaatgttttttatttactgtgttctaattaaaaacccactgaaactgcttgagaagttttaacatgatctaacagtatgcatttgcactgatttccaggcatactgctgtgcttttcactattttcatttttgtgtcatgtttctataaaaatagaggggtcagttacagcaaatcacatcaaaggaaaggtaactggatagatccagatctttctgcctaatttggaggaagcacataatgtatgtctggagtgcctcctaggacctgcctcagagatgtactttgcgctaatctttttgctgtattctgacagttatttcttcataatcctcatcataagcctctgatctttgatgaatggtttaaccctaaacttcaggctggataaatcccgtggtataaaaatttaactcatcatatgcggccagtgtgtgctttttcttttccttttggtctgctctagtgatttggggttttgttttactatgtgtatgtgtatgagtgtggtgttttggggggtgggttgaggagctgtatttacttacagtgcatatatttcctttagaactttttagctttattgccttttctactttattggtctgtaaatgtgatagttggtggccagtagattttagattttaggcaattacttgtatttgtgcatgctcaagtacgcacataaagagttttaaatgctgctgctcagattttacaaactgagaaagctgtaagagcaaacatttctcatgcacacagcacaattcccattctgttaattggattgacattaggtgcttaatattttccaaagctggtcaactaggtttaagaaactacctttggtgattgtgtatgaattttgcactagacaatacaggtataatcttatcaaacttacctttaaaatcactttaataaaccaatgttttgctggatgtgaagtgtctttaaattatctggcacttctgaataactagccctgctatgctaaatgacaaggatgttactgggcatcacctatcatctatctctctctctctctctctctctcacacacacacacacacacacacacacacacacacacacacactctcacaccccagatctgtgcctcagccaattggcctgcccatttccaagtgggccaagttgaaagaattgattacctagagagaatttaaatgccagcatttagtaagaccagatttgcctcacctagggaatccctattctgtggccagatttcaaatgagtcatgtcctcagcatttgaacaatgcactgggctttcttgtgttactgcattattttactataccaaatttcatcccatctgtttctgtctgtctcccccagttctttatctaatttttcttctttctccaactccccatggctccagccaaaccactttttgttaaggtttttctggctcttaagttgaaagattgtagaaaaacagagagcaagacaaagagcatattcgttcttgaaggacagtaaaacaacctgatatgagaaatcagaactcagtttaagcccagacaagcaaaagcctgctttctttgagagctggtcagggggacttacaatagttgcatcctgcattgcctaaacttggtatttaggtgttcctcacattggaccagttgcttttagccatttagaaacaggcagaatggatcaagtttggaacaaatttatatcatagccatgagatgtacaaatataattgaatccgtctcgtttccacaatgctgtatgtaccttaaatgaaatgcattactatttgagctagaagccccagttgtatctttttataggctgaaacacttaggataatcacaatgttgtgaatatttcaccactatacaatagtggaattgttcgatatcatgcataaaatcactgcaggaagggttaagcctgagagcctatcagctcccagtctgtggaatcattgtacattgtaaatattttgccgcatcacttggcatcagtggcctcacattttcatattggtttgaagctattttgatgttccaactgagtgcacaggcaaaagagtggatgacatccagagaaaaggtcaaacttgatgatttttcttgttttctttgaaaccacgtctttttaaaaaaaaaaaaaaatcaatgtatttttcacatctacgctgagactttttttgtcagtaatgtgaagcttgggctattaaaattatttatattttatgtatctttatatttcagaacattagcaagtagtcccacaattgcagccttcaatggttcctcaaagggcttggttttgctaatgaaaaatacatttctgaaaccttttcttgtcacttttttgtttcttgtagatacgcctggctgcaactcaggggtggcctcatcctcccgccctgggctggcctctggttccatcacgtttgtcactgccgtttattacattgacttctcccaagatgaatcttccttccaaatgtgttttctccacacaagccttgtgatctgaatgtgtgcgctggttctctttaggtgatcgtctttgaagttcagcaaagctgcttgttctcccatggattcctgtcccaagctacctctaccaaccctctctctccagctagacttttctctttgcctcctcccttcccttccactctttaaagttctgcagttcaccaactggtagtccattaaattctcctgtctagaatgacccccccaccagtacttgaccaatttcatgtatcaatctggatttttttttaacggtataatgactgtgtttattgaaagagttttacctaaaaagccaacatttgaattggttgcagcatagagaagaaacactggtccttctttcaaaattaagcaactattaaaagcgccattttatttatttcatttaaaaaataatctatgcagcatttcaagaaacaaccatatggtgttgtatattataaactggtgacattctactattgaattatgtacaacattttcattttttatgcttcttgaggtggtaatgagaaaaaagttttttaaaaaagtgtgccttgctgtatttcttataccatttattaaaaagctgctttcacggtaaaattatgttggtttgaaaggaggaaatagcaaggttaagatgtgtgaataatttctgtatatatgtataaccaagtacaaacattgatgtataatgacagtataaaatgctttcatgtttgtgatgtctagtgatgtggaaaatataagccttaaatccattagattgcatggtaattaaaattggcataataaacacagattattgggggaaaaggaaaattagtgatctcttctactatgttctttaccaaattgttgcatctggttctgaaaaagtatagcatgtagcagcttccaaacatattcatattgcttaagaggcttaacattacctaaactagagactagacgtaaagccttcagttttcaaaatctttctggtcactataaagatcttggaacagcaaatgattaaatgtcagttcccctaaaccaataaacatttatactagattttttatttccacttatcattaatgatttaatgttggatttcaggtaccttgtatgtcttaatttattttaaatatttattttgaatgagtttgatagaaagctagtagaaaagtacagaaaatttgactattatttatagatttcaggtatatttatatgtgtaaaagaaattgacaaagaaatatttcatctggcctttactgactcctgttaaatgcagttttaaatttatatcgtaacacctacttaagtgcctgacacagtaggtattcaataaaaatttactgaattaaaggattaaattaggtgacatggtgacatctatccctttattttgacactaaaacatggacacaactagaaagaggtacaatgcaatataaagtcacaatagataatatatatcaaatttctaaaaggtaaagaatgttgtgggttcatgcagtcacaggaatgacaatcattcaacagatagttcagaaacactttttatctgcaaggcactattctagatccagaagatgcaatgttgaacaaacagacaaagccctgccctcagaaggctgtcctgcattaggaacaagtgaacacgcaaatgacatgaagtatttgttgcagagctgaggaacagagcaaatgtagtgatagaagcgcaatgagagaagcagcagtgggtacaaggaggaagaaaaagggcttgcagagagtggaaagttagtggaatattcatgaaacttcattgcaggggtaatagaagaaaaagtaaattgggaggacttaatggaaggtcttttaaaaagttaacttggagcttctgtatgtaaaatgctaggtaataaggacactttgtacaggctgttttgcacctgattttatttatcattagtgccacgccaagatcatttagacgatgcttatctgtaattctaccactttaataactatttgtatttttatgccccttctgatcttttccatatgtatttctaaatggataaattattctaggcttcttaataggtagtaatttgttcaaaagcggttttagccagacatctagttgcagtgttcaagaggattatgggggaaagagattagagataattgtctagttagggggcagctggagaaaataagctaagtttgcaataacagagtacacaagtatagtggcccaggatgtagtgaaagaacaaatcctagagtctttgaaatttctaagggcattctagacctctgttgggatatggtattattttacatactgacacaacctaaattttctttgggtagtaactaatgtcaagtctacatcgactggtaaaacattcaaagaacaaactgacaatgatgttctacctacttgttacatgctcatggaagaccgtgcagtattgaaagtatttgttaattatctgcttagtattaacactaaatttgtagaatgactttcaggtttgttgaacaatgccttttcaggttggaagaagaaaaatagcctcaatctcccaccccatgtaggcactacctccccaattacccttagaaaatgatcacaccaactctgcctacacacttccagtgatagtggctcattgtctgttaaggcaaactgttccactgttgggcatatctctttgttagaaagttctttcttaggttgctaaaatctgcctagtaccccgctaccctgttctgtcttatggagcagcccagattatctttactccctctttctcatggcaaccctgaagataatcaaggccagttactcatcatctcccaaccactgtttcctcaactgcccttcatatgtcatggttttcagatccattccaacctgactgaatgttaacagacagaattcttcacattaaggaactgtcttcatcatcatacatgtagaaaagaatctgaacatttaagtgcgaagttttctctagaaatatattcaagatatgtttattctattattgtaaatttcaaacaataaataaataagaatccatgacttccttcagtggcccagtccagtgcctaagtcatctggaatcttctccttacatcgaatacaaacctaacctgtttccaagtagggcactccctccgcttatttattcatttattcagccattcagcaaacatttattaaatggctacctatgtgaggcactatatttggcattaggtatataaaggcaactaacacatggtatctgtctccaaaggtttacagcttttcttctgaaagtgccttttgtgtccttgaatagagtgattatgacttttgtctcaattaaatgatgacctcatttagtttctgatgaagtttctctacatttaagaaaatctagtgagcaaaacggtatacaaaaaatcatctggatctgactaccagaaaaagtaaagtggttttaattacagaaagaaaaatatttgttagatttctggtcactgaataaatatgcatcttatacaacacagaacaacctaaatttagggcttctggaaacctgagtttgatgactttgttgtgtttggttcatccggactaggtttcacccattctataattcctagaaacaaactagatgaaaatatcaatgaaatgatccaggtctgtcttacaagtcaatttgctttagcttccaaaagaagttgaaattttttagaattttaaagaaaaactcacttttcaaatgtcatataattcttatattttaaatataaatcgaaccaactaaatttaccgctatatttttttctacatattcttttttcaattttcattttgaaaatattcagacctatgtaaaagttgagagtagaacaaagatacttggtactcatccctcaggttcatttattgttaatatttcaccatatttacttcatctctgtatacacacacacttttttgtatgattaaatcatttgaaattaaattgtagagtatgatacttcatctgcaaatacttcagcatgtgttagctgagaacatgggtattcttctacaagtctacaataccatcttcatgctcaagaaatgtaacattggctggtcatggtggctcacgcctgtaatcccagcactttgggaggccaaggcgtgtggatcacctaaggtcaggagttcgagatcagcctggccaacatggtgaaaccccgtctctactaaaaatacaaaaattagccaggcgtggtagctgtaatcccagctacttgggaggctgaggcaggagaatcgcttgaagccgggaggcagaggttgcagtgagctgagattgcaccactgcactccagcctgggcaagaagagtgaaattttggctcaaaaaaaaaaatgtaatattaatacaataatacctgatagtttatattcaagtttctctaactacccaaattatgtcctcttatagttgtttttgttttaatacagtattcaaacaaagatcacacactgcttttagtttccaagtcttttttttttttttttttttttaaatcttgcatagtttccctgtgctttcactctatttttctttgggcttttataacatcgacagttctgaaaagtccaggccagttttgcagaatgatccacaatcttgatgggtctagttgttttctcattgttaaactcagggtaaacttttttttgtcaagtaaatacataggtgactttgcattcacagccactctttaatgaagattgattgaataactgacattcctgatatgttttaaagttcacagcttactctttcagcccatgcttcatccatctaaggcaagggtcagcaaactgtggcacgtgggccaaattcagctcattgcctgttctggtttgacccgtttgaacaattgacgagcttcaaacaatttttacattttttagtagttaaacaaaagaatacttcatgacatgtgaaaatcatatgaaatttaaattttggtgtccatgtataaagttttattagaacacatccacgcacatttgtttccatagtctatggatgctttgacactatacaaagttacgtacttgcaacaaaagccatatggcctgcaaaacctaaaacatttactatctggatcattacagaaagttttctgatccctggtctatgatattctaaattccgacacattttcttaggatagatttccatctgcaaattcagtgtaagacataaacacctgcaatagttgtgtttttttttctttttacttcctagattttattgcattctcaacttgtttcatattaccttgaaaaataaagtgcacttaaagattgtttcacatccacagtttgtttaaggatttaaatttagttcactattactgcctggctttgattgatttagagggttagtcaattacagactaaataattagttcaatcaaaaccatcagaaaaattgacacaaactcacttccatgcaccaataaactggaatcctttctttaaatgtttttctaaagcaatccgaggaattaaattcaggccatttcacagtcagtttttttcaaattcatttttcaactcaaaggcaaaaccatgatcaaaatattgtatatagtacaccttcagttcccaactgctgaatttaccaaggaattaagtattcaccacaaaccctggtgtggccataggtggacactctaattaaaaagaagatgttcaaaaagaatagtccttcttttcttaaattcacctttgatagcactgccacacttctgggaagggaacattcaaggaaaccgtatagccacttcttttttaaaagcagccacataccttctatataacaatggccctttagtttgagagttgccacatatttgcatttccagagtaaaataataggatgacatgggcaggtcaggcccacaatagtatggtttctttggcaaaggcattttggccaatgccgtaagaccattctggcccttgattaatgggttctcaccaaagcagaaattacgcagagcttatttgtccttgcattttgaagtaaatcattgcctgcataaagcaactcttttgtctcttttccattgcaacacacaggagttggaatgtgttcatacgtgtaagactgtcttagtctgcccagactgcttggactgtgttgtttataaacaacagaatttactgctcaaagttctggagactgggaagttcaagatcaagatgctagcagattcagtgtctgaggagggctcactttctgtttcattgatgcaccttactgcatcctcatctggtggaaggggcagtgaacaagctcccttgggccccttttacgaaagcactaattccattcatgaagacttcacaacttaatcacctcccaaaggctccatctcttaatacgatcacattggggattaggtttcaacataccaattttgggggtacacaaatattgaggtgatagacacttccaggcttttgccaaacattagtaaacaatttccagtgaatactctgccccattctctcctactcaagcagagtatcttaaggcagcagattggagtgacgttactttaagggtaactttgaagccaatctaattcatactcaaaaaagtattccaaaattttggtactctattatgggttacaaaccccttgtgacaccatatttaagagccactgctattgaggcttgcactctcttgcttgaaatgaggtgctcccaaacctgggagatggctcccaaagaacaagagaatcaaccccatcgtgcatttatgtgctgccccagataatccacaggcacaaagaacttgagcttcctggtgtgttcttcagaaaaaaaggaattcaaaaagcaaatgtaaaatgcaacagaacttggcctcaaagtgatgttggaaaaatagccagtcctgatgacttggtcgaggtaacttgctttgcccactgttaactacagagccatatgataatggaacatcaaggttttccagataaacccaaagccttttgtgtctataccttgtaacctgtcatgttcatcaacgttttagactgtaccattgctctttctcccttctttattcattttatatggggacgtttgactaggatcaccagatgtagatttggtaatttttccataccattaagatgtatgataatggattttattaatttaacacaaatgcataaaaatatgatgtaataagaaacaatcctgaaattattaaaacatttctttgtccttacttaaacctaacctgccattttaaaagacacctaactctataaacaaatgggccattacagacgtaaaacaaatattattcagtgaaatttattcaaggacttaaaatgattgaaggcattaggaacataaaaatgcataagatcctcttttaaatcccaatattccctaaccactggtttataaaaaatactctaaggtttatagaattagtttggttccgttagttgatcaagttacttacactaagtcagcaattcaaaacaaataattccctctgtgtgtgtttgtttgcttgcaaatatgtttcattttaaagtgtctttttatatagaaagccaagttggtggaatttatcttgtcattaaaatgatgtgaaaatcaaatcattcttcatatttgtgctcttatccctgccgatctcaaataactaatgatgcttacggcaaggttttataaagtgaaaacgccttaacttttcaggaaacaattctatttttacatatgtaccatttgcctctttcctaaacacttctatcagtgttctaagttccatatattcttttgtaatttaccagtgacatcttcccatgcaaactatatttaaaaatattttttagtaagttaaatcactaatcatttacaggttgaggcattttctttttttttttttttttttttttttgagacggagtctcgctgtcgcccaggttggagtgcagtggcgcgatctcggctcactgcaggctccgcctcccgggttcccgccattctcctgcctcagccttttgagtagctgggactacaggcgcccgccacctcgcccggctaattttctgtatttttagtagagatggggtttcaccgtgttagccaggatggtctcgatctcctgacctcgtgatccgcccacctcggcctcccaaagtgctgggattacaggcgtgagccaccgcgcccagccgaggcattttctataggaatgaaataatgctctagtgggtaaaactttttttaaaaagacaaaacagattctgtttgattcagaatgattggacaacagactattcttatcaaccttagggtgtgattatttaactcatttgtgacttactggcaactcaaacagttttaaacaaaacttaatccttgacggttcagcttcaccatatgattaccaattattgtttagtgttgtagatgagtaaattataggaaatcaggctaaataagtaaacatactctggatattattttttaaatcaatctaataaatcattatcccttgagtgcttgctatatgccaggcactgtgctaagcactttacatactcaatttaatcttcacaatactctgtgattggtgctatccattctatataataaggaaattatctcatttgcaatcgagataaataaggatttgcagtagtcctcccttacccagtctctttttgcatgcagtttcagttacctgcagtcccaaaatattaaatgggaaattccagaaataaacaatttagacattttaaattgcatacagttctgagttgcttaatgacatctcctgcagtccctccttgtcccgtctggaggcgaatcctctctctgtccggtgtcttcactctgtaggtgctgcccatcattagtcacccagtagcatcttggttatcagagcgactgtcttgatatcacagtgcttgagttgaagcaacccttgaacctaaagtgcaagagtagtgatgctggcaattcggatatgccaaagagaagctgtcaagtgcttcctttaaatgaaaagatgaaagttctcaataaggaaagataacaaatagtatgcctaggttgctgcaatctatggtaagagcaaatcttctatccatgaaattgtgaaggaagaaaaagaaatcccagctagttttgctgttacaaactgtaaaagttacagccacagtgtataataacttttgttgcagtatagtgttgtaattgttctatttaattgttgttgttaatttctgtgcctaatttacaaattaaaccttatcataggtatgtatgtgtagggaaaaacatggttgagctataggatttcatactatcccagatttcaggcatccattgggggtcttggaacgtatccttcgaagataagggaggattactatagtgaatggtgctcatttaatatccacatataccttgctaaatttcctgcctatattaaatgcttattaaatatataattcatgccaaaactgaagaaaggactttcattttaaaaaggatttcttataaaaattctataggagaagtgatagctaaattagcgcttgaaaaaggccaaagaaaattgtatactgtatataattatgcctcattatgacctctgcacattttccagaaaagttaggcattaaaaacacacacaacaggaacaccttaaaggtcagagcctgatgaaagaaaaatgcaatacttcattatgaagaatgagattaatgttctagtacgaacatacatttttatcattacattttgctcaagaaatactttaaaacatgcaacttctcattgtgtattttgtttaatatctgaggtggtggagagagagaattctatgaagtataaatttcaatttagtgaaataaaaatgtgggttttgctgtattcctaccaccctttatgtgactcttctttacatgagacttcacccctctccttccaaagacattctggctttaagagtaaatactaaagtctcggtgcacaaaaagtttaattcaaaatttctcattattttcaagagctgctttcctaagatagcacagtttgtgcatcatatttgctacattcaccactggcaggacacctgctataaacatttaaaataacaaatgacaactgtttttttactttttaaaaattattttaggtttataaaatattgtaaaaccaaaaatagtacactttaaccacactcaccttttgttaatatttcaccccatttgctttatcatttatgaactctatctacctgtctgtctatgtatctgtctctctatcagtctatgtatttatctgttttttacttttctgaaccatttgaaggtaagttgcacacatcatggccttttatccctgaatgtttcattgtatatttcctaatgcgtatgtacttatattctcttaaataaccatagtacagttatcaactttataaatttccattgatgcattatttctatcgaatcctttcacattccaattttgtgagttttcctaataatatcttttatagcatttcccccccttcagtacatgatttgggtattaaatttaggtgtcgtatctctttagcctcctttaatctggagccatttttccagcttttctttgtcttgttatgacattgacaattttgaagaatagacccccccgcccccacccccccccacacacacactttttgacaagatttttcttcagtttttgtttgccctttccttgggatgagattgaatttacgcattctcagcagaaatgttgcatgggtggtggtctctcctcagagtatcatatctggagaaatgcaatgtccatctgtcccccgtaggttatgttaattttgatcattttgtggagagatgctttaaaaccatgcaaatatcctgccctcttcaagttttctcctatatttagcatcaatgggtaattcttgtctaatcagtctttaccaagatggttgtgaaattgtttttccaactctagtactctgtccacatttatcacttggccctttgtattacccagtaaaatcccttccttcactcctacttatttacctctttatcatagacagaaacttatgaattccttttccccaattatttataatttattacttaaattattttgggctcaaattgtcccaggtttggccagtgggagcctcttcaatctgggtcttgtatccttgtgacctcttttaaacaatttcttaatttcttacaaagtgctctggtcttgcacctaagtgtcccaactcttgaatcagccatgtctctgaggatccctggttctttttaatagggattggcattagaggccaagattttagtgttaggtgtgtttattgctactagggtatctttgcttcttgatgctttcagccaacaaggttaggaaatacgtgaacttctatacacattaatgtaaacatatatacaattttatatgcacaaaggcatattcatacacacatataaatgtgtatacacacatattttagaaatcaagagctcacatcaatgtctccaattttagtccattctcacaggattctttctttacttccctgattccatatttgtatttcccttctttcactataagaaccatggataacaacatcaacatatatacccatttgctaaatagcataatacatttaaaatagtgtcagaattgcttaaaaaccattataatcaacctacttaaaagagttcaggattcatttacaattatcccatctcctaccctccccttcccaaataccaagtgctattcaatactaagggtgtgtggttaaatactgtgttccaaagttcataagctacatggattggtttctttctccccttcccttccctcccctcccctcccctccctcccctccccctcccctccccctcccctcccctccctcctgtcctcttcctctcctctcctcccctcccccctcctcccctcccctcccctcccttcccttcccttccttctctcttcctttcttccctcatttctttattcccttcaatataattatggcattcatttaaaataattaaagttaagtccatttgttccagtttcctttcagtttaggttatttttttcttccctcccattcttattgttctaattttattttttgaacctgtagaatgctgatatggattgaatatttgtcccctccaaatcttacgttgaaatgtgacctccaacattggaggtgggccggggtgtatccctcatgaacggcttggtgctctcccagcagtaatcccactctgatagttcacatgatatctagttgttaaaaagagcagtggttcatgcttgtaatcctggcacttttggaggccaaagtgggaggattgctggagcccaggagttcaagaccagcacgggtaatgcagtgagaccttgtctctacaaaaaattaaaaaataaaaaattagacactgggtgtggtggcacatgcctgtggtcctagctatttgggaggctgaagggggaggattgcttcagcctaggtggtcaaggctgcagtgatcactctactgtactccagcctgggcaacagattgagatcctgttgaaagaaagaaaaaaaagaaaaataaaagaaagaaagaaagaaagaaagaaagaaagaaagaaagaagaaagagaaagagagacaaaaggaaggaaggaaggaaggggaagggaaatgaagggaagggaaggaaggaaggagaaaaagagaaagaaagagagagagggagggagggaagaaggaaggaaggaaggaaaaaaggaaggaaggaagacagcctggcatctcccttgcctcctctttcaccatgggacacacctgcttctgctttgcctactgccatgagtgaaagcttcctgaagcctccactggaagtggatgctggagtcatgcttcttgtgcagccagcagaacggtgagtcaaataaacctcttttctttataaattacccagcctcagggtaattccttcatagcaacacaaatggactaacacatgtgctttccaacttaaaactatacaaaaagctgcactcaaacaaccatcactgccttccctatctcttccatcccatttcctcccagcccttgtaaatacacaaattcattgtcttctggctgattcttcttcggtttctttctgtaataataaggagatatatgtatatttttgtattttccttctttctagcctcaaaagtatcatactaaatgtattttttgtctttgagtttaaaatttaatatcctttagaaatcactccacattagttcatagatatctttctcagtcttttataattatgtgacacacactgatatcacaacctttttgaggtccttaaaaaatatgaaaggagattggatttcattacatgcctgtattatgtgaaaggattaatgacatgagaaaaactt

SEQ ID NO: 309 - DNA, 10818 bp, Homo sapiens
catcatgcagcaggtcaaacaaggcatctcctagtattgcatcctacagatgtgctgtaaacatcaaaagaagacggtgggatcaggagatgctgttttggaaagaagtgaggtttagacttctccatgttaaccatgagcgtgacactttcccccctgaggtcacaggacctggatcccatggctactgatgcttcacccatggccatcaacatgacacccactgtggagcagggtgagggagaagaggcaatgaaggacatggactctgaccagcagtatgaaaagccacccccactacacacaggggctgactggaagattgtcctccacttacctgaaattgagacctggctccggatgacctcagagagggtccgagacctaacctattcagtccagcaggattcggacagcaagcatgtggatgtacatctagttcaactaaaggacatttgtgaagatatttctgatcatgttgagcaaatccatgccctccttgaaacagagttctccctaaagctgctgtcttactctgtcaacgtgatagtggacatccacgcagtgcagctcctctggcaccagcttcgagtctcagtgctggttctgcgggagcgcattctgcaaggtctgcaggacgccaatggcaactacactaggcagacggacattctgcaagctttctctgaagagacaaaagagggccggcttgattctctaacagaagtggatgactcaggacaattaaccatcaaatgttctcaaaattacttgtctctggattgtggcattactgcattcgaactgtctgactacagtccaagtgaggatttgctcagtgggctaggtgacatgacctctagccaagtcaaaaccaaaccctttgactcttggagctacagtgagatggaaaaggagtttcctgagcttatccgaagtgttggtttacttacggtagctgctgactctatctctaccaatggcagtgaagcagttactgaggaggtatctcaagtatctctctcagtagacgacaaaggtggatgtgaggaagacaatgcttctgcagtcgaagagcaaccaggcttaacactgggggtgtcatcatcttcaggagaagctctgacaaatgctgctcaaccctcctctgagactgtgcagcaagaatccagttcctcctcccatcatgatgcaaagaatcagcagcctgttccttgtgaaaatgcaacccccaaacgaaccatcagagattgctttaattataacgaggactctcccacacagcctacattgccaaaaagaggactttttcttaaagaggaaacttttaagaatgatctgaaaggcaatggtggaaagaggcaaatggttgatctaaagcctgagatgagcagaagcaccccttcgctagtagatcctcctgacagatccaaactttgcctggtattgcagtcttcttaccccaacagcccttctgctgccagccagtcttatgagtgtttacacaaggtggggaatgggaaccttgaaaacacagtcaaatttcacattaaagaaatttcttccagcctgggaaggcttaacgactgctataaagagaaatctcgacttaaaaagccacacaagacctcagaagaggtgcctccatgccgaacacctaaacgggggactggttcaggcaaacaagctaaaaatacaaagagctcagcagtgccaaatggagagctttcttatacttccaaggccatagaggggccacaaacaaattctgcttccacatcctcacttgagccttgtaatcagagaagttggaatgccaaattgcaattgcagtcagaaacatccagttcaccagcttttactcagagcagtgaatcctctgttggctcagacaacatcatgtctccggtgccacttctttcaaaacacaaaagcaaaaaaggtcaagcctcctctccaagtcacgtcactaggaatggtgaggttgtggaggcctggtatggctctgatgaatacctagcactgccctctcaccttaagcagacagaagtattggctttgaagttggaaaacctaacaaagcttctgcctcagaaacccagaggagaaaccatccagaatattgatgactgggaactgtctgaaatgaattcagattctgaaatctatccaacctatcatgtcaaaaagaagcatacaaggctaggcagggtgtctccaagctcatctagtgacatagcctcttcactaggggagagcattgaatctgggcccctgagtgacattctttctgatgaggagtccagtatgcctctcgctggcatgaaaaagtatgctgatgagaagtcagaaagagcttcatcctctgagaaaaatgagagccattctgccactaaatcagctttaattcagaaactgatgcaagatattcagcaccaagacaactatgaagccatatgggaaaaaatagaggggtttgtaaacaaactggatgaattcattcaatggttaaatgaagccatggaaactacagagaattggactccccctaaagcagagatggatgaccttaaactgtatctggagacacacttgagttttaagttgaatgtagacagtcattgtgctctcaaggaagctgtggaggaggaaggacaccaacttcttgagcttattgcatctcacaaagcagaaggactgaaggacatgctgcggatgattgcaagtcaatggaaggagctgcagaggcaaatcaaacggcagcacagctggattctcagggctctggataccatcaaagccgagatactggctactgatgtgtctgtggaggatgaggaagggactggaagccccaaggctgaggttcaactatgctacctggaagcacaaagagatgctgttgagcagatgtccctcaagctgtacagcgagcagtataccagcagcagcaagcgaaaggaagagtttgctgatatgtcaaaagttcattcagtgggaagcaatgggcttctggactttgattcagaatatcaggagctctgggattggctgattgacatggagtcccttgtgatggacagccacgacctgatgatgtcagaggagcagcagcagcatctttacaagcgatacagtgtggaaatgtccatcagacacctgaaaaagacggagctgcttagtaaggttgaagctttgaagaaaggtggcgttttactaccaaatgatctccttgaaaaagtggattcaattaatgaaaaatgggaactgcttgggaaaaccctaggagagaagatccaggacacaatggcagggcacagtgggtcgagtccacgtgacctgctctctcctgaaagtggaagcctggtaaggcagctggaggtcaggatcaaagaactgaaaggatggctaagagatacagagcttttcatcttcaattcctgtctgagacaagaaaaggaaggaacaatgaatactgagaaacaactgcaatactttaagtccctctgtcgtgaaatcaagcaacgacgtcgaggagttgcctccattctgcgactatgccagcatcttttggatgaccgggagacttgcaatctgaatgcagaccaccagcccatgcagctgatcattgtaaatcttgaaagaaggtgggaagccattgtcatgcaagccgtccagtggcaaacacgtctacaaaagaagatgggaaaggaatctgagactttgaatgtgattgatcctggcttgatggacctaaatgggatgagtgaggatgccctggaatgggatgaaatggacataagtaacaagttaattagtttgaatgaggaatcaaatgaccttgatcaagaactccaacctgttatcccttccttgaagcttggagagacaagtaatgaggaccctggttatgacgaggaggctgataaccatgggggatctcagtatgcctcaaatattactgccccctctagtccacacatttaccaggtgtacagcctccacaatgttgaactctatgaggacaaccacatgccatttctgaaaaacaatccaaaggtcactggcatgacacagcctaatgttttaactaagagtctcagtaaagactcttcattttcatctaccaaatctttgccagatcttctaggtggttccaatttggtaaagccctgcgcatgtcatggaggagacatgagccagaattcaggcagtgagagtggaattgtcagtgaaggagacacagaaaccactaccaactctgaaatgtgcttgctcaatgcagtggatgggtccccaagtaaccttgaaactgaacatctggacccacaaatgggagatgcagttaacgtgttaaagcaaaaatttacagatgagggggaaagcattaagcttccaaatagctctcagtcgtccatttcaccagtgggttgtgtaaatggaaaagttggagatttaaacagtattaccaaacatacccctgactgtttgggagaagaattacaaggaaaacatgatgtgtttacattttatgattactcatacctccaaggctcaaaactcaaattaccaatgataatgaaacagtcacaaagcgaaaaagcgcatgtggaggatcccctgcttcgtggtttttattttgataaaaaatcatgcaaatctaaacatcagactacagagttacaaccagatgtacctccccatgaaaggattttggcaagtgcatctcatgaaatggatcgcatttcatataaaagtggcaatatagaaaagacattcactggcatgcagaatgccaaacagctctcccttttatctcatagttcatctattgagtccctttctccagggggtgatttatttggattgggcatctttaaaaatggcagtgacagcctccagcgaagcacttctttagaaagttggttgacttcctataaaagcaatgaagatctctttagctgtcacagctctggggatataagcgtgagcagtggctcagttggtgaactaagtaaaagaacattagatctcctgaatcgtttggagaatatccagagcccctcagagcaaaagataaaacgaagtgtttctgatatcactcttcaaagcagttcccaaaagatgtcctttactggccagatgtcattggacatagcatcttctatcaatgaagactcagcggcatctctaacagaacttagcagcagtgacgagctctctctttgctcagaggatattgtgttacacaagaacaagatcccggaatcgaatgcatcgttcaggaagcgtctgactcgttcagtggctgatgaaagcgatgtcaatgtcagcatgattgttaatgtctcttgcacctctgcttgcactgatgatgaagatgacagcgacctgctctccagctctacccttaccttgactgaagaagagctgtgcatcaaagatgaggatgacgactccagtattgcaacagatgatgaaatttatgaagactgcaccttgatgtcagggctagactacataaagaatgaattacagacctggattaggccaaaattgtctttgacaagagataagaaaaggtgcaatgtcagtgatgagatgaagggcagtaaagatataagtagcagtgagatgaccaatccctctgatactctgaatattgagacccttctaaatggctctgtaaaacgtgtctctgaaaataatggaaatggtaagaattcatctcatacccatgagttagggacaaagcgtgaaaataagaaaactattttcaaagttaataaagatccatatgtggctgacatggaaaatggcaatattgaaggtattccagaaaggcaaaagggaaaaccgaatgtgacttcaaaggtatcagaaaatcttggttcacatgggaaagagatttcagagagtgagcattgtaagtgtaaagcacttatggatagtttagatgattcaaatactgctggcaaggaatttgtttcccaagatgttagacatcttccaaagaaatgtccaaatcaccaccattttgaaaatcaaagcactgcctctactcccactgagaagtctttctcagaactggctttagaaaccaggtttaacaacagacaagactctgatgcactgaaatcatctgatgatgcaccgagtatggctggaaaatctgctggttgttgcctagcacttgaacaaaacggaacagaggaaaatgcttctatcagcaacatttcctgttgcaactgtgagccagatgttttccatcaaaaagatgccgaagattgttcagtacacaactttgttaaggaaatcattgacatggcttcgacagccctaaaaagtaaatctcaacctgaaaacgaggtggctgctcctacttcattaactcaaatcaaggagaaagtgttggagcattctcaccggcccatccagctgagaaaaggggacttttattcgtacttatctctctcatctcatgacagtgattgtggggaggtcaccaattacatagaagagaaaagcagcactccattgccactagacaccactgactcgggcttagatgacaaggaagatattgaatgcttttttgaggcctgtgttgagggtgactctgatggagaggagccttgtttctctagtgctcctccaaatgaatctgcagttcccagcgaagctgcaatgccactacaagcaacagcatgttcttctgagttcagtgatagttctctttcagctgatgatgcagatacagtggctctttcaagtccttcctctcaggaaagagctgaggttggaaaggaagtgaatggtttgccccaaacttccagtggctgtgcagaaaacttagagtttactccttcaaagcttgacagtgaaaaggaaagttccggaaaaccaggtgaatctggaatgccagaagaacataatgctgcttcagccaaatctaaagttcaagacctctccttgaaggcaaatcagccaacagacaaggccgcattgcatcccagccccaaaactttaacctgtgaagaaaatcttctaaaccttcatgaaaaacgacatagaaatatgcataggtagaatgtaccccctccccaagcatgaaaatcatctcactgaaagatacgcctggctgcaactcaggggtggcctcatcctcccgccctgggctggcctctggttccatcacgtttgtcactgccgtttattacattgacttctcccaagatgaatcttccttccaaatgtgttttctccacacaagccttgtgatctgaatgtgtgcgctggttctctttaggtgatcgtctttgaagttcagcaaagctgcttgttctcccatggattcctgtcccaagctacctctaccaaccctctctctccagctagacttttctctttgcctcctcccttcccttccactctttaaagttctgcagttcaccaactggtagtccattaaattctcctgtctagaatgacccccccaccagtacttgaccaatttcatgtatcaatctggatttttttttaacggtataatgactgtgtttattgaaagagttttacctaaaaagccaacatttgaattggttgcagcatagagaagaaacactggtccttctttcaaaattaagcaactattaaaagcgccattttatttatttcatttaaaaaataatctatgcagcatttcaagaaacaaccatatggtgttgtatattataaactggtgacattctactattgaattatgtacaacattttcattttttatgcttcttgaggtggtaatgagaaaaaagttttttaaaaaagtgtgccttgctgtatttcttataccatttattaaaaagctgctttcacggtaaaattatgttggtttgaaaggaggaaatagcaaggttaagatgtgtgaataatttctgtatatatgtataaccaagtacaaacattgatgtataatgacagtataaaatgctttcatgtttgtgatgtctagtgatgtggaaaatataagccttaaatccattagattgcatggtaattaaaattggcataataaacacagattattgggggaaaaggaaaattagtgatctcttctactatgttctttaccaaattgttgcatctggttctgaaaaagtatagcatgtagcagcttccaaacatattcatattgcttaagaggcttaacattacctaaactagagactagacgtaaagccttcagttttcaaaatctttctggtcactataaagatcttggaacagcaaatgattaaatgtcagttcccctaaaccaataaacatttatactagattttttatttccacttatcattaatgatttaatgttggatttcaggtaccttgtatgtcttaatttattttaaatatttattttgaatgagtttgatagaaagctagtagaaaagtacagaaaatttgactattatttatagatttcaggtatatttatatgtgtaaaagaaattgacaaagaaatatttcatctggcctttactgactcctgttaaatgcagttttaaatttatatcgtaacacctacttaagtgcctgacacagtaggtattcaataaaaatttactgaattaaaggattaaattaggtgacatggtgacatctatccctttattttgacactaaaacatggacacaactagaaagaggtacaatgcaatataaagtcacaatagataatatatatcaaatttctaaaaggtaaagaatgttgtgggttcatgcagtcacaggaatgacaatcattcaacagatagttcagaaacactttttatctgcaaggcactattctagatccagaagatgcaatgttgaacaaacagacaaagccctgccctcagaaggctgtcctgcattaggaacaagtgaacacgcaaatgacatgaagtatttgttgcagagctgaggaacagagcaaatgtagtgatagaagcgcaatgagagaagcagcagtgggtacaaggaggaagaaaaagggcttgcagagagtggaaagttagtggaatattcatgaaacttcattgcaggggtaatagaagaaaaagtaaattgggaggacttaatggaaggtcttttaaaaagttaacttggagcttctgtatgtaaaatgctaggtaataaggacactttgtacaggctgttttgcacctgattttatttatcattagtgccacgccaagatcatttagacgatgcttatctgtaattctaccactttaataactatttgtatttttatgccccttctgatcttttccatatgtatttctaaatggataaattattctaggcttcttaataggtagtaatttgttcaaaagcggttttagccagacatctagttgcagtgttcaagaggattatgggggaaagagattagagataattgtctagttagggggcagctggagaaaataagctaagtttgcaataacagagtacacaagtatagtggcccaggatgtagtgaaagaacaaatcctagagtctttgaaatttctaagggcattctagacctctgttgggatatggtattattttacatactgacacaacctaaattttctttgggtagtaactaatgtcaagtctacatcgactggtaaaacattcaaagaacaaactgacaatgatgttctacctacttgttacatgctcatggaagaccgtgcagtattgaaagtatttgttaattatctgcttagtattaacactaaatttgtagaatgactttcaggtttgttgaacaatgccttttcaggttggaagaagaaaaatagcctcaatctcccaccccatgtaggcactacctccccaattacccttagaaaatgatcacaccaactctgcctacacacttccagtgatagtggctcattgtctgttaaggcaaactgttccactgttgggcatatctctttgttagaaagttctttcttaggttgctaaaatctgcctagtaccccgctaccctgttctgtcttatggagcagcccagattatctttactccctctttctcatggcaaccctgaagataatcaaggccagttactcatcatctcccaaccactgtttcctcaactgcccttcatatgtcatggttttcagatccattccaacctgactgaatgttaacagacagaattcttcacattaaggaactgtcttcatcatcatacatgtagaaaagaatctgaacatttaagtgcgaagttttctctagaaatatattcaagatatgtttattctattattgtaaatttcaaacaataaataaataagaatccatgacttccttcagtggcccagtccagtgcctaagtcatctggaatcttctccttacatcgaatacaaacctaacctgtttccaagtagggcactccctccgcttatttattcatttattcagccattcagcaaacatttattaaatggctacctatgtgaggcactatatttggcattaggtatataaaggcaactaacacatggtatctgtctccaaaggtttacagcttttcttctgaaagtgccttttgtgtccttgaatagagtgattatgacttttgtctcaattaaatgatgacctcatttagtttctgatgaagtttctctacatttaagaaaatctagtgagcaaaacggtatacaaaaaatcatctggatctgactaccagaaaaagtaaagtggttttaattacagaaagaaaaatatttgttagatttctggtcactgaataaatatgcatcttatacaac

SEQ ID NO: 310 - protein, 2304 aa, Homo sapiens
MLTMSVTLSPLRSQDLDPMATDDMAINMTPTVEQGEGEEAMKDMDSDQQYEKPPPLHTGADWKIVLHLPEIETWLRMTSVRDLTYSVQQDSDSKHVDVHLVQLKDICEDISDHVEQIHALLETEFSLKLLSYSVNVIVDIHAVQLLWHQLRVSVLVLRERILQGLQDANGNYTRQTDILQAFSEETKEGRLDSLTEVDDSGQLTIKCSQNYLSLDCGITAFELSDYSPSEDLLSGLGDMTSSQVKTKPFDSWSYSEMEKEFPELIRSVGLLTVAADSISTNGSEAVTEEVSQVSLSVDDKGGCEEDNASAVEEQPGLTLGVSSSSGEALTNAAQPSSETVQQESSSSSHHDAKNQQPVPCENATPKRTIRDCFNYNEDSPTQPTLPKRGLFLKEETFKNDLKGNGGKRQMVDLKPEMSRSTPSLVDPPDRSKLCLVLQSSYPNSPSAASQSYECLHKVGNGNLENTVKFHIKEISSSLGRLNDCYKEKSRLKKPHKTSEEVPPCRTPKRGTGSGKQAKNTKSSAVPNGELSYTSKAIEGPQTNSASTSSLEPCNQRSWNAKLQLQSETSSSPAFTQSSESSVGSDNIMSPVPLLSKHKSKKGQASSPSHVTRNGEVVEAWYGSDEYLALPSHLKQTEVLALKLENLTKLLPQKPRGETIQNIDDWELSEMNSDSEIYPTYHVKKKHTRLGRVSPSSSSDIASSLGESIESGPLSDILSDEESSMPLAGMKKYADEKSASSSEKNESHSATKSALIQKLMQDIQHQDNYEAIWEKIEGFVNKLDEFIQWLNEAMTENWTPPKAEMDDLKLYLETHLSFKLNVDSHCALKEAVEEEGHQLLELIASHKAEGLKDMLRMIASQWKELQRQIKRQHSWILRALDTIKAEILATDVSVEDEEGTGSPKAEVQLCYLEAQRDAVEQMSLKKEQYTSSSKRKEEFADMSKVHSVGSNGLLDFDSEYQELWDWLIDMESLVMDSHDLMMSEEQQQHLYKRYSVEMSIRHLKKTELLSKVEALKKGGVLLPNDLLEKVDSINEKWELLGKTLGEKIQDTMAGHSGSSPRDLLSPESGSLVRQLEVRIKELKGWLRDTELFIFNSCLRQEKEGTMNTEKQLQYFKSLCREIKQRRRGVASILRLCQHLLDDRETCNLNADHQPMQLIIVNLERRWEAIVMQAVQWQTRLQKKMGKESETLNVIDPGLMDLNGMSEDALEWDEMDISNKLISLNEESNDLDQELQPVIPSLKLGETSNEDPGYDEEADNHGGSQYNITAPSSPHIYQVYSLHNVELYEDNHMPFLKNNPKVTGMTQPNVLTKSLSKDSSFSSTKSLPDLLGGSNLVKPCACHGGDMSQNSGSESGIVSEGDTETTTNSEMCLLNAVDGSPSNLETEHLDPQMGDAVNVLKQKFTDEGESIKLPNSSQSSISPVGCVNGKVGDLNSITKHTPDCLGEELQGKHDVFTFYDYSYLQGSKLKLPMIMKQSQSEKAHVEDPLLRGFYFDKKSCKSKHQTTELQPDVPFRILASASHEMDRISYKSGNIEKTFTGMQNAKQLSLLSHSSSIESLSPGGDLFGLGIFKNGSDSLQRSTSLESWLTSYKSNEDLFSCHSSGDISVSSGSVGELSKRTLDLLNRLENIQSPSEQKIKRSVSDITLQSSSQKMSFTGQMSLDIASSINEDSAASLTELSSSDELSLCSEDIVLHKNKIPESNASFRKRLTRSVADESDVNVSMIVNVSCTSACTDDEDDSDLLSSSTLTLTEEELCIKDEDDDSSIATDDEIYEDCTLMSGLDYIKNELQTWIRPKLSLTRDKKRCNVSDEMKGSKDISSSEMTNPSDTLNIETLLNGSVKRVSENNGNGKNSSHTHELGTKRENKKTIFKVNKDPYVADMENGNIEGIPERQKGKPNVTSKVSENLGSHGKEISESEHCKCKALMDSLDDSNTAGKEFVSQDVRHLPKKCPNHHHFENQSTASTPTEKSFSELALETRFNNRQDSDALKSSDDAPSMAGKSAGCCLALEQNGTEENASISNISCCNCEPDVFHQKDAEDCSVHNFVKEIIDMASTALKSKSQPENEVAAPTSLTQIKEKVLEHSHRPIQLRKGDFYSYLSLSSHDSDCGEVTNYIEEKSSTPLPLDTTDSGLDDKEDIECFFEACVEGDSDGEEPCFSSAPPNESAVPSEAAMPLQATACSSEFSDSSLSADDADTVSSPSSQERAEVGKEVNGLPQTSSGCAENLEFTPSKLDSEKESSGKPGESGMPEEHNAASAKSKVQDLSLKANQPTDKAALHPSPKTLTCEENLLNLHEKRHRNMHR

SEQ ID NO: 311 - DNA, 76138 bp, Mus musculus
  misc_feature (1)...(76138): n = A,T,C or G
tctctttgtctctgtctctgtctgtctgtctctttgtctctgtctctctctgtctgtctctgtctctgtctgtctctctcccccactttagagaggcagcaaaacagctcctgacaacctcctcccatttacctatttactttggacagggacatagcccagtctggaccccatacaaggacactggcagagggaactcacttgaactgtttcccacacaccatgattattcccagaaggaagagcctccatttcttttgctcaaagatgttgtccctacgttatgtttccccaagatagcctttcttgctcgataaattaattaattaaaagctctacgggatacgggcttcccaacagtccctgcagtaaatctctaggcttgctactaacagcagaaatgtatctcccccctaccccaccccacccccacttctggaatccagaagtcccaagtcaagtgttagcagtatcatgctccctctggtggctcttggtgacttcagtcttttccctgccttctgcaggtaaatggccatctggtcacccttgacttgtgactgtcccctccaatccctgatttttgacctttcttccttctgcctgctgcccaaggccttttttttctagacaccagtcattcgattcagacaggacccatactaatgtaatattgtattgtttccaactggttcatgtttaatcatcttatttccatggtgatgtatgcctagaatttgggaagccagagtcagaaggattgcccaagtccaaggccagcttcatctacatgatgtctgaatttactaagccatgtttatataggaagaatttgccttttaaaaaaagttttccatataaaataacattctgaggttccattctgaattttggggggagacactattcagctcaatatagagaacaatgcttttcaggaaacatttgcccctgtttatgctctccccgatggactcatgcaattccatcttcctttcctcaaccagtgtcttagtcagggttccctaaagaaacgtacaagcagacagagacagagacagagacagagacagaggcagaggcagaggcagaggcacaggcacaggcacaggtacagggagacacacacatacacacacactggcaacaagataaacttaaacttgccagaaaaattgaagatgaacaggcaaaacgcaaaagcttccttcttccttttatctatctgccaccaggaggggctgcacacatttaggatgatggctctcccctcttcaaaaaaatgagatcacaactagccctcatagaagtgttttggttcctttcagatccagccacattgtcaaccaaatcaaccatcctctctagcacaatgagcatggtgctgtccctagactgtcgactatctgctcagcctgagtctagaagctggtaaaagagaatcagttgcagaaaacaaatatttggaaaggaagtcattcccctcaacagaagagcagttccaagagggaagagaactgtgtggttcactgatgtgtgctctgactcaaagacaacaaaggcaggatagcaagtgttcttcagcagacagatcaagtactctgggaacgactctgaattcaagtctttgaaatcgttagtcttggttaaaaccataaaatcaccattgttccacattctgtgctgctgagatctgatataaaacgttgccaaagctcctgcaaatactgcagtagtgtttctgtggtgtaactcctgaacgctgccattgtaatgggtaaggaaacggatgtggctgtgttccaatgaaaacccactctacaaaaccatggagcaagctggacttggaccaacgccatcttttgccaactctttctctaaacaaatgctatcccgtacaagtccttttctcttctctctttgccatcatcctttactgtccccggccaccagaacatcaggaagaatgtcactttttcttgtcaaggatgtatggagactacacctgcatctgcatggagaatacagtttggtatttgttgaccgggggggggggggattagcccacatgatctgtagagtatgtgcctctgaaaatgcatggagcctgaacaaagcaatgcagaagatatgtgaaggaagaggcagccataggaccacacactgaagactgacagggccacagtgtgcaactccttcctgagagaaatacacatatacactctactctatgaaagctacagtggggtcattacccagcaaagctgggccacccagaattctgggggcctaacttttgctccagtgtgtctagaagacaggacaataagccaaagatttaatcttgtacctgaaagtttaatgttttccttgtttagtcttgggtacaaatggtgcttatgaattattcttctttcctatgcctccctctcagaatggaaagaaggttttcctgtgcctgtccccattgttttatttgagaatcaaattgcttgacttattttacagatctacagccaaccaggaatttgccttgagattcgcttatgtttgttttccatgatatgaagacccttgaccttggctctgaggtgatgcttgagtttgggactgtcggtatggaggtccattcgtgaaaatgaaaacatggagagaactaggggtgggatgtaatggccagaatgtttgtgtctccccgagttcttatgctggaattctaactccatggcaattaagaggaagggctttggggaggttagatcatgaggaaagaacactcataaatgagattactgctcggaaaggatggccagtggagttcggttaatccttgccctgatgagaaaacagtaagaagtttgaagttcttcatcttgccgagtggggattagatactcgtagtaagtcatggttgttaattggagctttataaatcccagccttcatagagcatttagtttgcttaacatggaggaaacctgagatattttagagagaaaaattacctgtaaatatgacatagtttaaataaagtaataagcatatagcttggtaagcatacagtcaatggttcttactgtgtgacagctactaagctagatgctgggcttacaaccaccaatgagggagggatggtccgtgccctggcagagctcaggaccttatggtggaggcagacaggatgcaaatctgtagcaaaggtcagagtgatggtgtgaatacaaataagaagaggaaatgccccgacacagaaggcaagagaatatgctccctgagttgccttcaaggtattttctttagaatgtatgtaattataaattcttcattgtcttactctatatatgtgtagacatacgacctttctcgtgacctgggggacatctcttttaaatgtaatcctcaagggagatggctcccttctcttcttgtttccttggtaccaccggggcctaattactcaacggcacctctgtctccatctgccttctgtcaggaagctagcttgtttttcctttagctcaagccatttaggttaatgcaggtggttcaagcgagttaccacgagaatttaggataagctttatgctcatcctaaaggtgtgaccaaggatgcttgccaagctctctcaatcgagagccagttgtttagttttggagtatgtgagccatgaattgagtcttctcagctatacaatgtcaccctgcacttgtaatctcttacgtggcttgcctgtaagatctgtcgatgttagtacgatacttttacactaatatgacttctttcaactctgtgaaaaggattttggaggactggccagagatttttgttttctcttaaacttccccaacaagaagaatacgattccccaagtacaattttagaaaggaagtctgggacaaacattctgggaagttatcacatagtatttggtaaataaagtgtgcctgccttagcctagatgttccattcctgctatttatcccagagaaattatccttcagaaaaccattattggttgatccctgtggtggtgtttaatggaatcaagctgggaggccattattaggaatgtaacaagaacaaaaggtaacaatggctggtgtatgttatactctagaatgcagaatacagaaccagttaaatagatgtatatagtaaaacataggtgtatgtcaagatagcatgagatttgaagctctgaataagtttatatcaaaataccatgtatataaataaaaatatggacatggaacccatgtaaaagaaaaatgtttgaaactcataagaggcattcagttgtactgcatcaacttagggactttatacctcaacagcagtgtgctggcaaacccagagacctgagttcaatccccaggattctcacaatagaagaggacaactgacgcttgaaagttgtcctctgtcttccacatgcattccacacataggcatacacatgtatgcattccacatgcatgcatacatgtgataaataaatattaaaatacaacatgcagtatgagagaaaaaaatccttgccagctctgctgccaacagaggagctgtatccgtgacatgtcaagcacttaaattttgctaggcagtagtggctcacccctttaatcccagcactcaggaagagggggcaggtggacctttgggagtttgagaccagtctggtctacagagcaggtaccaggacagccagggctacacagtgaaaccttgtcttaaaaagcagaaacaagcaagcaaagaaacaaacaaagagaacttaaaatttaacaccagaagaataagtaacccagtcaacacatatgcaaatgaactaaagacatttctcaaagttcaggcagacagcagacatttgacaaaaatcttagacattttaaccatcagacaaatgcaaatcaaagctacattgacttttattttgctccagttagatagagtggctattatcaagaatgtaaagtaagtaaaggctagcgaggattcaggcgggcaggaaccctcatattaatagtagaatgtaaattggagcagcctcatggaaatcagtgggaagattccttaaagggctagaaaagatctaccgtgtgacccagctctaccagtcctgggtattaaggcaccatacaataggtctgctcagccatgtttgttaagtctctattcacagtagccagttcacagaataagcctaggtattcagtgactaaataagaaaaatatacaacacacacacacacacacacacacacacacgcacacacacacacacactgggaaactgatcattcataagggtaaaaagccattgacaggaaaatgaatggaactccatgccattatattcagtgaaataaacaggactcattcaagcaagcattgcatgttttctctcataagaaatgagaatctgtaaaatggatggggggaaaggagcaacgagcaagtatacggagggctttcgaggaaaaagggggaccagaggatgaatacaatcaaaatacgtaacgtgtgtatgaaaacatcacaggaaaacccactttctatatggttagcatgcattaacatgaataagaatccttggtttttgtcagtggctaggatgaggttaggatctaggcaatagctggggaaggaatgaaaatggagaagggctttgtgtgagctgttggtaatatgctgaggcccaagaatatgatgggggctttatgcctaagttctaagtgcagaaaagatggaggtggggttctccctcacgagaaccagctgtctctcctgtggagtaagcctccctctctggcttaaatccattgtccttgggctggtgcctagagcaaaatgcaaaccgaaagggaagggtgaagtcagctgagacagaagtccctttttctgttcattaattatgtaccagcaaatcatagccaaagcctaactcttttaggtggaaaccgtagatgtaggattatgtcgacctaattaaaattttgcccagcacagcttctaagttttaattgtatcctaatgtattcatctcctagaattggaatagtcattgctagccattaataagcgggcctttaaagatgactttgtaagaagcacataattaccccttccactgcttgagtaagttttgaattgtgttccatttgtgggtttttgtgacatgtaaaattcaagcacgaggcagtgaacttttacacacagtctaatgaaatcattagctgggaaggcgtcatctgtacaaagataaaaacatgaaattcaaattagcgcttaaagttcccagacttttcattcttccgacttgccattcttcttttcctaatgatgggtttcttggataaataaatttaatagtcaatccaaaagactttaattaatgaatggttgcatcattcaagcttttcttttcttttgatttttttctttttattgaaaatagattttttttccttgaatagcatacactgattatggttttgttctccccacctcccctcccgtctggatccaccctctttatgtgtctaaatagtaaacgaacagtcttcttaaggataacataagatgtgagctaaaacaagaactaacacatctgaatagggcaaaacaaactaacagaaggaaaagaacccaagagaaagcacagatacagatgcagagacccccactcgttcacacattaaggaatcccataaaaacactaaactacaagccataatgtggatgagaagaaccggtagagcaaaataacaacaataatagcaatagtaaaataataataataattaataatattaaaagcaaaatggggggggggaggtagaaaaggccctgacacagcattctgagacaaggaacttcccaagatgtcactgagttcattttctgttgatcatctaccgctgggcgcgcagcctaccttgaagagtagtttgtttccacagcgagactcccttgaagaaaactaaattctcactggcaaatgataactattagagattgctttggggttagagacgggaacatatgtccacttctctcagctctgctagtgagttcacttccatttacagacacataaaaaaatgtatcatctgtcaacctcaaatgatgaataatcaatgagattagtgaaagctggtcgcacctttccgctttaagcaacatctggaaaattgaaacaaacagtcttaacagattactttggacaaaggatttaatttggcaaaccaccaaaggtttttcctctgagcctgtaaaggatgctaacacaagtcctgctgccaaagtcaatgagcttttcctagagaaaaagagcactcttcccgtcatgggtgggtatgagtctccagtctgctttcttatacaatccataagggggaactgcccacaatgccctgggccctcccacatcaatcgttcataagaagatgctcaatagaaaaactgcttgctgtgcaaatgtgaggactggacttcaaggctcagaacccaaataaaaacttggttaggtcgtgagtgcttgcctgtaatcccagctggggagggaggaaagagtagatgtctgaaccccactggtcagacagacaggcagacagacagacagactaccgtaatagcaggagcactggcttcagcgagaccctgtctcaggaaacaagatggaaggctcctgaagaatcgttagagttggcctcatcgtatgcgagctctcacataatctgtttttatataaaaagtacagagtgcatattaacactacctcttgcaggggaaatcacaacagattcgtatacttcaaaactaaatagtgtattctgataacctctgtactcccatccccgaacactgcattcttcctgttctggtttgtttctaatactatgataaggatcatgaccaaaaagcaatttagatagcaaagggtttatttcatcttatgactcgatcagcaaagaagagtcaggctggaaaatcagaaaaaaaaaaaggggggggggtggagggaacctgtgggcagggcaggggctgaagcagatccatggagaaactctgtctactggctccctctccctccatggctttctgtcttcttatacaatccagaaacacctgcccaaaggtggaattaccgacagtggcctgggtcctcccacatcaattgttaataagaagatgcaatacaggcttgccttcaggccaatctgatggaggcatttgctcaattaaggtttggatcaaatcgacaaaacaagcaaacaaaaaagatgattcaaacaaaaaactaaaccagcaaaccccaaagtgagaattttaatctaactgatctatgatggaaatttctttaaagtttacaaattgaaactatcctcctatttaatctttatattctaaacaaaggcttcttcaagcataggttatcttgttcaactagattttcagcgagatagtaaaaataaaaccggaatcagatttcaaacagacagacaaaacaaaaaaacaagcaagccaaaaacaaacaaacaaacaaaaaacaaacaaacctggcatcgcttttaccataagccacaaatagtttaatcggcttacttttgatctgttgctgacaggaaggaacagtgttcagtgaaatgaaaatagagagggagaattaattcacttcttcagtgaatgtgtttacagacagcaaactcatcggatgcatccaactcttaagttattaaatagaaatatttagccgggcgtggtgacacatgcttttaatcccagcacttgggaggcagagacaggcgaatttctgagttcgaggccagcttggtctacaaagtgagttccaggacagccagggctacacagagaaactcaaaaaaacaaacaaacaaacaaacaaaaatataaacaaaaaataagaaagaaagaaaaacgaaatatttataatgtttagattttcttgagaaagcaattgaaagctaggctgagtgaagcagcagatgctagtttgcaagaggacccgaaggtcataaatactaacacatccccactgaattataaaaatgagtgcagtgctgtcaagagttttgtcaatttgatacaaaactagacacaacgacagaatctcaactgaggaactgcccctatcagattgtcctgagagcatatctttttttttttttttttttttttgattaatgactgataggagagagcccagcccactgtggacagtgcctctcctgagcaggtcgtcctggcttgtataagagagccacctgaaccccatagtatttctccactgctcctagctgggctgactcccctgctgaaggactgtgatctgatcatataaagccaaataaaccctcacctcaagttgcgtccggtcatggtgtttatttcttgcaatagacagcaaacaacgacatgcccggtccaaaataacctaatgcaagcctcccaagcaattataaattgtcctggtagccagattttcaacgtaacaaacaaaacataaccttatttaactcagtgcaccccaaaatagtttaacatgtgatcgatacaaaaatcattaacgaagtcgtttccattgcatctctgcataccaagcgtttaagttttggtctattttcctatatacgtgagttcagactaccgcttttaaagggcacatacgcggctgtggctagtggctaactctagtagacgttgtggttgatttggtttgttttataagttcattgctttctcagccagtctccccctgtcctcttaacttgtattctatcttgtaaattattgcctcctgagaattttggcaaattaagacactcgaaagcctgcctgagaactcctaaaagaccagtgggggtcgattgcttggagacgttcctgggcgcgcggtctggcgcttgcccttgggggctcaccgggctcttggtggcctcagctgcgcagcagctgggaccgaggccatcagcggcggaaggggaaccgtcttatgacctcactgctccacgccatgctggggatcaagaccagttagtactgctgacttcgaggctccaggtgtcaaaaactttaactgtgaaaatgccaggaccaggtccccaccgcctagcccacaaactgtcactgtcctcggaaggaaacaaagtgaacacccaagactaagaactaggcagcgaccggctgccaccgctccgcgggagtcttaacaaaggtgggaggggaggtcttccggaagggggcgggggagggtcttccctgcttaagttaattggttgtagtttgctaccacgtgatgcaggcaaggatgggcggctgatttccccgtcctcgccatccccttcctgacccagaggtcaagggaggcggagagagggtttcctagacaaccgcagtgggcggtcagtacacagcaggcccggggctggtgtcagctgcaggaagggatttgggaggtcggagtgcactctgacctgcctaggacagccctggaatccatcctctctctggaataaggtactgagtatcggtcttctggttgcctctaggtgtccctcccctgtaggaaggactagggagtcacatggaggaaatctcccagcagcacacaggtcaggggacctatgtgatggtgcagtgggggttatagtaatattgtgatggtagttataataataaaaaataatagtgatacttcagagaaggatcctaggaaaaaggaaaaaatgatgtgccctaggctcgggcaactactggactgaaagactcaagggatactgatcatctagaaataggagggcctttatgtgaaccaccagggagaactgttgggttctggctcctttatactcaagggagaaaacagttggaccacctagggcttctgttgggcagaaaggtgatagtttcttagattaaatgctcactcagctttgctggcagacagttctttacggaccagttagtactgtgttacaaattgccatgcagaacagtgtttacagtcatgttgggtaggatgtgtgtggtatgacagttcattggaaccatttgataagttatgtcgtgtcagccgtagttcctgtcctcggtgaacatgttaggaggaaggacctgcaagtatcacaatacaatgtgacagacagtagccatgcagaggacatgtgctaaccttacccagtcacatgaaagagaatgtttacaataagaccaaagaggatgcaagtcttcgaagaagactcaaggcactctttaaggatatatggagtatagagtcaaggacagaagatatttcaaggagaggaagaagtatgtgctgaagtacagccatgctagctatcataggactagagttgtagccggtactggaatgttgagtggctgttttggttgaccaggggcttaagagattggcatgagtctgaaaatggtgattataaacaatttccaagaggagtagcataaacaaatatacccccgcaagagtctagctgctcccatggattagagaatggggtaggtagtgagacaagaggggccacgatggcagagagtggagaggaagcataagaattgtgtgtgtgtgtgtgtgtgtgtgtgtgtgtgtgtgtgtgtgtgtgtgttgggatggagaagggatgggtggtggtgtcctttagcacaagaaggcattcattaaggggaaacaacattggttggaaatacgagctcagcttgggacaggcatactgtatttgagatgcctgtgacatgttcacgtgggcttttgagtttattgcataggaaagaggacacgaaagatgagtggcttttacaaagaaggaagctgttagtgcaaaataacaagtagaggactagggagacagtttagacggtgaagcgctttccttgcaagcaagaggacctgcgttccatcccagaacccatgtaaataaaacatggcgtgtaatccccgtgcttgggaggcaagccaattcctggagctccttggtcagcgaagctagcccaccaggtgagttcccatcaagatgagagacaccgtctcaaaaggaaatcgaggtggatggcacctgtgggatggcccctgagattatcctctgacctccacacttagattcacacagcagcgtttattcttgcatgtgcatacacagagtgggagggaaggagagggaggggtaggggatagagagaaaccaaggagaaaacttgagaataatcagtatcgctcaatgctatcagcattgctcaaagtcacatcaaggtcaagttgaggcggaaacgggtccactgtctttggcaatctggagttattgactgttgttggacttatttaaccagaagtagacgctgtgatggcttgaagggttttctttcacattacactgggttgaggactgcatggagtaaattattgttgctgatgattgtctagaaagttctttgtgaaagtgtgaaacgtagctattcagggtttttttttttttaatgcaatatagaaaggacttttctaaatagggaaacctgtgcttacacacagaggaaaggagaccctatgggaagaaagatggactggcagagcagtctctaacagaggtagacacggtggacccgtgcacagaaaagctgattcatttcagtcaaaacgaagtctttatttattcattgtatgtgatacgtgtgcacatgtgtgtgggggcatgctcactcaaggatgtatggatatatataagagactgctaatatggagtgtcttcctcaattcctctcttaccaattcagccaaattgctggacccggcaagccttccccatcttgcacacccaaacccaacaactccttgagctctttctgtctccactcgcaggcctggattgcaggtgtccagcgtttccatgggtgctgcgaacctaaactgaaatcctcactcttgcacagcaaacacaagcaagcacttcatccattaagccaactccctcagcccccaaatgaacatttctactgagccaaaagtcctaagggggtggggcgggcgatgtgtgtttaaggagaaaggaaattgaagggagtatatcctaagacagccctgttacctgtgaaggtgaggacaggacaatctgacaagagatggcggaggaggcagggagggatgataagggagaggggagaaatgagggcggaagggggcaggcttgagaacggtggtgcatgttaggataatctcatggatcccaggattttcatcttccagcctcttctcataggaaagggagcagaggagacacagaaacgcttgcctctgtagctggggaatagcttcttacagctcagatgtcgttgtgcaaatttgggggtttccattggattcttctttgtccgttaacttctgagctagaataaggttattttgcctaaatgggtcattgatgttgacagagtatcgtgaagttgagagagaagcttcatgtctctgtacccagaaatgtagtcttcttgactaaatgaagagatgtgctttgtttttacaaagtcctcagaaggtgaactcccttcctctaatactttactgtagtgcactcttcagtcggaagagtcccagctggacttttaaaattcttttttatatttaatttgcagtgtgtgtgtgtgtgtgtgtgtgtgtgtgtgtgtgtgtgtgtagtgtggatatgtgcaaggtgtacaggtacttacagacaaagaggaatgggatttgcagagcaggggtagctcttagcccactgatgtaggaactaggaatggagctccgggcctctggaagaacagcaagtgctcttaacctctgaatgaatctcaagccccacaacagagatctttaacaacaaatcttaaatatgtcataaaatgaatataaaaaactaagaaacttaaaaggaggagaaggaggaaaaggaggagaaggaagtggaaggggaggaggaagaagaggaggaagaggaagaagagggagagaaggaattgtattggcaactatagaagcacagaaggaaggctttattttgggcttgtggtcccagcgggttagaagcctatattagtcagggttctctagaagaagagaactgtgtgtgtgttgattagaatggctaccaagctgtggcagtggtctggctagttcaagaatggctgtctcctaaatggagacatgactggatgtctcagctggtttttggttggaatcctatggatatcgggttctaatacctgcaaagtagtgcctcagatgcagaataaatggcattgaccatgcgagtaaggaaaagcagacaaaaaccaaaagcttccttcttacatgcgaccagaaagtatggcctagatttagggtgggtcttcccacctcagataatccaatcaggggaaataaagccctttacaggaatgcccagatatttaggttttagttgactccaaatgtagtcatcacaaagctagtcgccaccatggtgaggaggtgtggtcataggtaggcatggtggcagagttagctaaaggataatgtggcttttgaaacatttactttatttattattattatcattattattttgaaaagcctgcccccccctccgctattcccatgacacacttcttccagccagacaacgtcacagccaccaacttggaaccaagtgttatctcagattccagagattagaggggacatttcttggaagcatggtgacacagctcctggagaagagagagggtgaagagacagatcaggaagtccaaaatcagtagtgaatgtctgtaatcattgaggaggaaaccgtgtagttctttccagaattggtatcttgggcataaattaagattaccagggtgcttatttgatgtctttggaggtcttgaggattggctctgacctttgcatctagtgggccctgctcaatagccttcctttcagttccccagacattaaagcaatggaaggccattcttctgataagtacaggggctacaaaccgttcctttacttggtctcccttctgagtcagcctagggaagggatactatggcctgtaggtacataagggccatcaatggaacatctaaatgctttcaagtgttttctagctaattctcttactgctagtgttctgctaattaagggcaaagttttccaagtagctttctgagctcccggaaaagtggcagacttcctttgtcagcagggcttctccttctctaaccttgcctagggagttcaacccccaaccccgtgtacacacacacacacacacacacacacacacaccatccatctctacctgcaaatgccacccggacttggttagattacaggttcagcttcctttctcccaataagaacccaatcagcaaggacctgagtttcctggaatgtaccccatgctaatgaggtacctcagcaccttagccttcagccaatgacctttgcccatcctggatattcctaccccattaacttcaaactatatagcccttaaatcatcccaagtaaagttgatctgtctccctgaaactggccccattatgtcattattacctagccatttgaactcacgggtcatctgaaaccctgctggtgagactctgcttcctaggtcatcatgggctggtggacaatgagcccaggcagaagggagacccccagggtaactcccatatcactgttgtattcttgttgtaaagatgccagtgggaagtagagaaggaatgagcagcagaggtctagccctacagtactgccctgactgcagatcctatctgtctgcatgttcttcagtgtggtccatcacacccttctgccttcatgtcctgcacatatcccaagcatatcctcagcctgtgttctgactgtgattccctctgcctggatgcatgtgagccagattccttcatggctcaccttatgtatttaattctttacttagatcccaccatatcaacccgggttcctttcccctccttgccgtctgctctggtacctcctaggtctttgatacataggttagtgactggggaaatggctaaactgagtcaagacatcagtgcgaataaggtaattttctgattacattttgctctgtggaattagctgggtagggttttctcctctcctccttggctcaatgccttggtccatttcatgttgctataataaaatgcccagagctgaatagaatcagtagacatttgttttctatagttctgtatgccgggagttccaagatcaaggcactgggatcaggtgtgtggtgtgatcttcatgtggcaggtggaagaggaaaagaggaaataaccccctccatcaggctgctattggacaccaggtcctattcttgggggaaggaaccttcatggcctctgagcatggtatccccaatggaggagttagagaaaggactgaaggggctgaaggggtttgcaaccccataggaagaacaacaatatcaaccaaccagagctcccagggtctaaacagccaaccaaggagtacacacagagggacccatggctccagccgcatatgtagcaaaagatggccttgttgggcatcaatgagagaagaggcccttggtcctgtgaagaaggctcgatgccccagtgtaggggaatttgagggtggggaggtgggagtgggtgggggcacaccatcactgaagcagggggaaggggattggataggggatttcgggggggggattgggannnnnnnnnnnnnnnnnnnnnnnnnnnnnnnnnnnnnnnnnnnnnnnnnnnnnnnnnnnnnnnnnnnnnnnnnnnnnnnnnnnnnnnnnnnnnnnnnnnnnnnnnnnnnnnnnnnnnnnnnnnnnnnnnnnnnnnnnnnnnnnnnnnnnnnnnnnnnnnnnnnnnnnnnnnnnnnnnnnnnnnnaggcctgagtgctaagctgaggtgtactttgctgtaagccctgaaaccgttcctttccccaaaaggtgctgctctgagtttgaaaacagcattactttttttttttttaattagcttagtaaaacttatcttttcagagtcttgaattttggcatgcccatcctccccccatcccacctttttttttttttttttttttttttttttttttttttggacatgggttttctcccaatctgatgcctggttcattttgcaagaactccatcagtctttttagaggtcaacttttccctggggcaggggtgcatttctttcttctcatctggtggtaggctgtctagctgtaatcaggggcctgtcaatgccactgttgctagcacgttaaggtgatgcaccaatcggcctgacgtgactccaggactgaactccgtcttttgtcttctttaatagatatattagtgtgaccattgtttttaatggaagatgattgaaagtgaaaacctaaatcgaggtgaaatcattaaagaactggtgagtccaagccctttgttcagtaatatttgcaagagtattgagtagagcattctgactctccctcctggagctgtgaggattgggagcattctcactctccttcctggagctgtgaggattggtgggaaggagattcctcctattggatgactggaggcacaggcatcagtagcgagatcctggtgtctgtgccaggggaagtttatagtttgtgttgtcaaaagacagtttttcaaaaactagttaaaacagataataattcaaattctttcttttcaaacagtgtctgtgcaatggcttaacttatgagatcgttggacaggaaggatcagatacttcaaaactggagatgtttttctcagggtatccccgaatagttggattatcattgtttcataatttatcaagtcttacaattgttgctcaagatataagggaaatttcagggttggagacttgcttacagcttaaagaactttggattgctgaatgctgcatagaggtaagattaaacagacaatcttacaaggtacatctaagcctgagttcttgactttggaaaaacaattcattaaaatgtatgcagtgtgtatggatcaaaactgataagtgggcaaagataaaaacttatacaaagtgaaaacagaataaggaatcaaaacataatttatttttggtaaacatatcaagttatgtcgtagccagtattgcttacagcagaactgattcactgtggcactaagtggttagacatgtcgtttagaaagaaatactacaaaatgtgtcatgggtaatagaaatgtgcatacctttgaactcagaaactcctaccctaagaatattacactcaagaagtaattcaacaacagaaaacagttaaaagttttagttgtaccactttcagaataaataaaatcatcaaatgtgaatagtctgcacgtaggggaattttaaagaaagctattatgaccttcatagagtcataattttgtctttttaatttatgtaaatattaaatgtgtaagatggtcttaagcaaaaaaaccctgcagtatccataatatcatatgcatatgattatattaatagcaattagatgtagttggttaacatttaaagaatacatacaaaattgaatatagctctatttaaatggagaaattatatgtttattttaatttagagttattttttctgggtatttatgttacaataaagtggtacttataagaaaaaaagacttagaaacttactttattgataagtcaaatattttgaaataactaacactcttcaatctccttttcaacagaaaattgaaggccttcaaggatgtagaaatttggaaaaattatatttatattacaataaaatttccaaaatagaaaatttagagaagttaataaaattggaagttctgtggctgaaccacaatatgataaaaaatattgaggtgagataatcttgataatttgcatgtaaagtcagtttactgctatggcattaaaaccacagtgtctatggtacaacatgaagggtcaaaatagttatgaatagcatcattattgtggtcaaaaagaactaccttggggctagagagatggctcagaggttaaatgcactggctgctcttccagaggacctgggttccagtccccaacacccacatagcaactcttcaactatctgtaactccagtcctaggaaatccaacaccctgttctgttctcggtggtgcacagcatgcacacaggcaaaacacacacaaacacacacacacacacacacacacacacacacacacacacacacacacgtcagagttgatgttttaaaagcacatgttgtctacgcttccagggcttgcagactttgaagaatctaaaagacctcaaccttgcaggaaacttagtcagcagcattggtatgtactgttccctttagaatttgagctaatgcatttttaaaatgtgtgcttaaatttgcctcttttagacgttatgccattgaaaagccattttacttttgcatatatttttaccttagatcatagttctttctattgagttatgaagatcttttaaaaattactggttctttgagagtttctttttttttttatcctcatagtattcatttttttcttttcttttccatttttattaggtatttagctcatttacatttccaannnnnnnnnnnnnnnnnnnnacccactccccctttcttacagtgtgttttgatcatatttatacccacccatctcttcccagatccacctccacttccctacctatttttaaatctatggttcagatgtttaactctcagacactagtcatgattgctaattatgcagtgggattgttaatcctattgaaatgcaggaataagggccatctgtaacttacaagtttgccagggtatataacaaaggtagaacaagaaatctaattatttttgtgatgctgaggattgaactcttggccttgggtatgcaagacaagccccctgccactgagctatgccctcactcctaacatgtccttaatcttgtttttaaatgaaaggtcgatgtcttgatcccaatgaacaactggaaaaactaaacctttctggaaatcaaattacttccttcaaggtatgttcaactaaatggttggtttctgtttatcaacctgagttaccaactgtatagaccagaaaatataccaaacaatcctccttcaaggagtaattgcattgagttcattactttgtgcttcctggtctagggcagtggttcccatcctgtgcattatgatcccttttggaggttacatatcagatatttacatttttcacagtagcgagatggaagttaagaagtagcaacaaaataattttatggtagggggggtcaacacaacatgaggaactgtaaagggtctcagcattaggaaggttgagaaccactgctctagggagtttgagtagcatctgttcagatagccataggacttcatccttttagaaccaaaaaataacttagctatttagctggtaggatgctccttcctctgaactttgtcctagtctttctggctacatttatcttgctgggggttcatcctcttcgagcatctgaaaagggggactgccccttctggggctcttcttcactctctctacataatcccatcctgtctttggactgtgaatgcacctgctctaattactgctcggctgggccctctgctcaccctgttgtctcttctgagctgcacacatctcttaaggaactccaaccgatgcccctcccaagccctccttccttgcaggtgtctctgactctctaaatagtcttgccactcatctagttaattaggcaaaaaatccttacagtcttttttacccctattattccttcacatcccaccttcagtctgtgagcaaatcttgttgttgcccattcagaatatgcgcagagcctggatcactctcagcctggttggcaacactatccttaccagtctgcattactgagaaagcagaaaaaataaacaaataaacagaacaacttctcagaatcctccctatttgtgtctgtgtgtatgtgtgtgtgtgtgtgtgtgtgtgtgtctgtacgtacaccatggcacgcatgtggagacagaggacactttgcaaaagtcacttcacccattccactcaggctgtcacagcaggcggcacccttacgtcaccttgctaaccctcttttccttttcactgtcttcagtctgctctctgtgcgccaaagcttgctggagccattttaaatatgctataataaatctctcttgtcaaactccctttgctctctcaccttgctcacaatatcattctgacaatgtgagactgaaggcacacagtcaagcacagcttatgaaaatatgagagaaaaaggagtaagaaataattttatatcggtcaatgtaaagacatgctctgactcagagaaaaacagaagggtatttcaaggtggtggaataaatactttaagaaaaagtttgagtaaaattttacctgattagtgcaactgcgaaggaactaatcaataggaaaggctagcagcattttaacaggcactggaagaggctcttctgggcagtggcagtggccattccaagagagagagatgagtattcatgaggacatggagatcagaagtcacaggtctattgagtaatgtcagcattacatggtgtgcccaagagcacagggagttgggactaccaggctaatcaaatcttcaatgtggcgtgtttgatagatgacacgaagctgtcactgcttttcagtaaggggctattatgatatgatcacagatgtccctcaggaacagtaacctggaattagtgtttcttggttaggagcagctgggacacgcagaacatccatagccgtgtagcctgccatttagcaaaggttggtcttctcttctggcatctcacatgtcctttccctagagagaagcacctcagccgcctaggtcactgtagcacgcgtactcaggagtgcgttagagtgtgacactggattgtgatgttaggggttaggacccttcctctcaaggcgagcgttcctaactgattgatcattgtcactcgtgtttaggaccttactaacttgaccaagctcactcacttaaaggacttgtgtctgaacgacccccagtataagtccaaccccgtgtgtcagctgtgtaactattccacccacgtgctctaccacttgccgtctctccaacgactcgacacgtttgacgtatcagcaaagcaaatcaaggagctggcggatgtaagtgcggtcgcagtcaggtatctgtgactcgagtttgcatagttaatggctttcttctggctgggtcctcatgtggctgttaagacacagtcagttcttgtctcctgtttgtcccttccgtagcaggatgcttcacctgaaaggacacagataataacattaattcaggaactcggtggtcagacaaaaacaatgggaaactggtgttggaaatagattttttgatacctgattctttaaattgtgttagaacaaattaaatgtagtattttaaaactctttccccccccccacatggaaaaaaatcctaggttaaatttgaatttcatataattaccaaagtatgtcttgatataactaaatgaatacaagcaagtttggtgaataccttgttgcttatttgaaatgtaacttagcattgtctattttgtctggcaaaataactacttactcctcaatatatgatgttgtcttagatttaagaattcatttgaaatccttttacctctcagtgtattgaattttccacttaccccaaataacaaaaacatcattttccaatgtttttctttcttttttcttcctttcatacacacacaatatatatatatatatatatatatatatatatatatatatatatatttatatttatatgatggatgtcaagtgttttgctctgatgttcttcaacctgcttttccaaaaggaatctcttcttggaccaagaactgatccttctgtgtagactggctggttggttcttttttgactaatctaattctcaggcattatttaacttgtataatccataatgggctacttaatcaatgtgttattatttgtgggttaataactgaatactattaggtttaaggttggagataattgcattagaattataatttaatgatatcatcagtctaaaaggagttcacttagagcattgtttcacagattgggggagaggacaaatttttttgtcaggcttttaaaaaatgaattatactcaatttggcatttacttttaactcttttaaatgttttccctaaattaataacgtaggaataatgtggtttcatatttgttccagtcttatgtctttttagctaagtatactattttataagttaaattgtatctgtaatttctttattggagtcttggaaatagacattcatatgccacatactcacatattaaaaataaagatgctctttgggatgttatgtcatatcataaattaaatacaaaatcctgtgggcaccgttgtgtctgctgtcagcatcagcatttctgatggagctagcaaacttccaaatgtataaagaacgtgttatgtttatacaataccactgataactatgccttagctatagttctattgctgtgatccaaaattcttagggaggaaagagtttattgctgcttactccttgagatttatctcccagaaaagtcagggcaggagcctggaggcaggagctgatgcagaggccatggaggagcactgcttgctggcttgctcctcctgctttcttatagcacccaggaccacagcccacagtgagctgggccctcccttttccatcatcaatccagaaaacactccagcagctaatatggctgaatattttctaaattgaagtgctctcttccaaaatgactctagcttgtgtcaagttgacataaaactagccaacacagctacctgtaatttgttttatctaaccctttaccttcagtccacagcaatgaaaaaaataatgtattataacatgcgaataaaaactgttcagagacatctgaatgaagaacttgaaaaactaaatgacagaaaatgcaagttacagaagctacccgaagaacggataaaattattcaactttgcaaagaaaacggtaagatttaatcatgtagaatttcagtggccacagtgtaggaaaattatccgacaaactagtaaatccttaactccactgcccgttcactcccatcctgtgtgcatgtgtgcatgcatgtgattaacactgacacttgagtcaggtttactctaaaaatactttagttccagataattaactgagttgcattctatttataattttttttaaaagatatgggtgtgagacctctgttccaatctccagtgcccatgtaaagcaggcttggtagcctgtgtttgtggtcacagtgctcttaaagtgagactgggaagcagagacaggacttaagcagcatagaacagaggctctgtcgcagacaaggcggactatgaggaccaacattgagattgtcctccacacatgtcctgtggcttgcatatagctgtgagtgcacgtgcacatacacacacacagtcacacatacatgcatacacacacacactcaaacacactcacacatacatacactcacatacacactaacccacatttacacactcacatactcaaacacacacactcatacatacacacatactcacacatacatacatacacactcacatactctctctcacacacacacatacataagcacacatatacacacacacacactcacatatatacacacacaggtatacacacatacaggtatacaatggggaacttcaaatcaaactctgttttagtagtgtgtgtgcttttttatgcagaataattagattccttttattaaaagtagatcttgaaaagttaagaatcatttacttgaaaaacagagccttgtaagtgtaaagttttctgtaacttctcaaaaacatgaagacacaatggatttaacacatggtgtttgtcttagttagggttttactactgtgaaaagacaccatgaccaaggcaagtcttataaaggacaacatttaattggggctggcttacaggttcagaggttcagtccattatcatcaaggtgggagcatggcagcatcccggcaggcgaggcacagtcagagctgagagttctatgtcttcatccaaaggctgctagtggaagactgacttccaggcaactagggtgaggatcttatgcccacagtgacacacctattccaaccaggccacaccttcagatggtgccactccctggtccaaggatatacaaaccatcacagtgttagaaacccatcaagtcatttaggagtggggaagctgggtgcttcgtttgccctttagtgcaagtggggataaaaattaaatgataaaatatcaagaataaatatgtagatggattgatttaattgatctcaacctgccacatactagacattgcaaagaaaaaagatgtaagttcaattgcaaaacaaaaaggtaagatgcttttgtactaaaagttgttattcataaaaggtaagcacacgggctaggaagatagctccgtaggtaaagtgcttcctgcacagcataaggacctggtttcagtcccaagagtccagatagaagggtagccatggtaatgtgtgcctctcatcttaaagctggggaagtcaagaccagtggaccttggtgttcactggtcagccagctgaggctacttagcagtctctaggctactgaggtaccctagctaaaaaatgatgtggacagtgcctgagggacgacacctgtgtttggcttctggcctccacatgctcacacacacaagcacatgtcctccacatacacattaagggaaaaaagtctaaagacattaaactatcctcaagaaacaggatgcatgcccaaagagattctgtccttagtacagtgcgtccatgaggaagataaggttaaaatgagatatgcaaacaggaaaatgggaggaagcatataagtcatcactttacaaatgaatacaacacagtgactaacaagcagtcctttatgaatcttcaaatgcagtgtgaaaccacctttgctgtaaacctttctaagtatagcacacaacggcattaggtggcgcagatgaccataatccactctgcctcactcctgagagtgagccgtggtcacacagcttcagagagctcctagccattagcccagcaagtctactcgtgtactttattcatcaccacctcattgacagtagcagcatgaggtgctacctaaatctttaccaagaaaacaagctggtggttttgcagtaggctacttacgaggttgtcactaggaagtaaagctggagagctgggcacatggggcggcctcttgcagaggactcaagccggctctcagcacccatacctggtgacccgcaaccacttggaactctggcttcaggagatccagtgccttccttggccttcatagggacctccattcattatgcgtaccacatatccatgtgtttaaaggtataaaaaaataaaataaaatttttaaggaattgaagtttgaaatatatttaatggccctttctacaaatgagcatatttttggtttataatcagaatgagattcttgaagtacaatgttaattacatttaaattatttgatttaaaaaatcatagaaagaccaaaatgtcaaaatccattttataatgtgtcattttcaagtatataggttgagaatctcttacctagaatgctttacaaccaaatggatttcagagtttagagtctttcacattttggaatatttatataaactctgcccttttttttccagagctgaggactgaacccaaggccttgagcttgctaggcaagtgctctaccactgagctaaatccccaaccccttacatgaactctgaatgtcttgtatctgaatatctaaaatatgtcaaaagtttcaaatttgggtgtacttcaaatttcaaccatattaccaacaagcaagtaaaggaatatatatcatataaactgcacacattgtttaaatatataatttggttatagcaaccagttaaagctatataagtgaagaaatatcactaactagtaaatttctttttataaatgctgtgcattatagtttatcttttaatcctacaagagattttccctggcctcagactttaaaggagtgacccaaaggctaagtaatcaagataaataatatttaaagcaatattttaaatgccaattaatgccaaaagtctaatatagacagcaaaccccaaaacattaaaatctgatgcagtgtatagtttttgagctggtcagatactgaagcaaaaggaaaaagttgtctcccctttatgtgttttctgtggttgtatctctccacacatagttcttaaaaatagttattatgctaaaaattgcattatctgaagtataaggttttattcacatgcagcccaccattggtggtaatttcactttggctttaataagcacactcaacatttcatgacctgtttcttcaatgtgtttgttttctgtgaagagacggccatgcttgctgtttctaacctgtcgctcattcaatagacactagctgaatttgcaccaaggtcaaagccgcctatttggcttttataaagcttgagctacctggatgtctactttgaccatttaaaccaactaaaatgaatatctgaggctttgccttaggtgtgttttatttttaatttgctctttggtgcattgatttccacagttagaacgggaactggctgaactcaagatctctagcaaagggcagagcgatacaacgccggaggccgagaaaccccggaatagtgaggttgtcacacaggaatcagttctgcagcagaagatactgaccaagctgagcgctctggatgacagagttacattctggaacaagaaactgcatgagtatgtttgccgaactatctggtcattcagattgataacgggatcaaataaaatcagcatgttggaggccgagagttgagctcagttcctttgataaatgggagaaagcagaacatgaaccatgttggcacacccggttcctagggcccccacccactcaaagctgggctccggctgaagccattttcagttaagcacagtgggcttcctctgatcagcatggcgtcacatctcagcctctggctgcaaactaaaagcaattgagtgctccttagttcagaaatgcagcacgcagaccagaccagcaagcacactacagtccttgcttgttggggacactgggtaaatgggttactagggtctttgtaatgatcttaacaggattgtaatgtccatgccagatgaccctcccactcgctagctctttagatggaagtactagtagtactggtgtggtgctgagaatacgtgggtgtaagaagacaaaacgacctgtctaggatttggcatccgtgctcttagatccggaaaagtctcagcttttcatactctgcatgagggtaacaaaatcagagcttttcactgctagaaacagaatatcttgttctggatctaactgctaacactcacgttactccgccactgaaagcaagaggtaactgattctcaaatccatgctacgtgcatgttctacggcacatgaacgaacagctgtgtgccaatgctgtgagtctcacatccgatgaacccctgcatgtgtgttttgtctctggtaggattgaagcgatttatcggactgaagtaaaacagaagaagaagactcacggcttactgaccccgtttctgctaactgagctggagactgtgggcaatatccattttgaagaaggcactcaggctgatgactggtaaacctgagctttgagtagggctccaaaagtagttgtatatttgatcctgagccaggtgatcaacttgcaaagtgtctcattttcaaaatagtttttagcaaaatatccatctgttgaaaatttgctgtcatacatcttctacctgtacctttgtctcattgccttatcgacatgagacaagccctggacacctcaacggggtcactcaacacccattctttttcttagccagtcagcagaaaaagtatatggggagtttgtaaatattttaagaaaaaagtttatgtcccactgctgtcctcgcgatgtttatacagttgctgggcagatagtcctggattctgaacactggctgaaagccagaacagagcagaaaccaactgcacaactggccacagcaggttgccaccgtggaggcctcctggccatcctgctggcctgtagtcaaaggggaagccgtgtgggagctaagccgtcagtgggaacaaggccattgggtggtgggagaaggggcacaaagccagacttcaggctgccgggttccctgtatcacagccagtgggaaacgatctggacaagatgagaatgaaactcggttcattccaactttgttagccagacctgttctaactcctgagtctgacaccaggtggtttactgtcagcatctttaaacagaaccgtttgttactgtttccttgtgtaatacaagctcagatccacaaggaggcacaattacatcaacctactccaatgtgcatgtcatttcttgcaagaaagtgggttctgaagagagactgcatgtattagactaagggcctacggaaggagctgccaagatctgggtcatacatatgacatagaggtcatttgggctatctgtcacctcctgcactgataaagcctttggtggtaagtcaggtgctctaagctaggagttcagatagtgggctcagaaatcacccgtcacagaagccctcacacctatgttacataaatggtcacagggtaaatgaatctcataaagaatcatttgcttccttgttaaatggtctctctttcggtcttaatctccattctgtgcaattttaagacaagactgtaattttattagaacagccagatgagggcagcagagagcagaccagtcatcgaaaggacccgtgatctagagtttctcaaagctgccacatcctcctctggttctcagatcacttttctccctggaagatctctgaggcttcaagaaggtgccctctgcactccttacccaaggcttctctgctaagtctttattctttagcatttgtcatatttatggctttacatattattgaatatctaccccctttggaatataagccttaggagagagagggtggacaccacccttctcactatgtgccctaacttaggtagttcttgggatagagtcagagacaatgatattcccaaagaggacagggccagtgctgatgatgagccagggtatgattcagcatgcatttgagatgtggtacaggcgtgctagcgggtgaagaggagtggagacagccactcctgccatttttaactactggttggggccaggtgctgagtacttagctttgaaagtccctttgcatatttactcgagtgttttagaaaccagtggatattcaaactgggtactacagctacatttgggtagaaatgattatttgtgtatgaatacatacatgcatatatatatatatactatatatatatacatacatgcatgcgtacatacatatatcatgcatggatacaaacatacatacatacatatgtacatgatagataaaatcacctagggacagtggaaataagagagctataattctggttcctggtgaaaagcaagctttccaagtctattggagactggggaatagttcagtgacaaaggacttctctgattgcagaaggttcttggttcaatccttaacaccataaaaaaaagtaaaataaatgaaaatttaaaaagaaattatttcaaggaaccggagggggggctggacagaaagaaaagaaaagttgaagtcatagcctgaaggaaagtggccaggaatatgtggtcacactgaagctaatcaaatattcttaagaaggaaggactattcagtcaacatcgtttttaggtagaagaggtagataatagataataaaaagaacattttactgtgtttcaaattttagcatcttctgttgatcaaatatgcccagtggaacaaaaacacagctactgtgatctgatgaagtatgtttagccaaaaatatcacaaactaggatcttcaaggtctatttcatacccttcagcgtgttgaaggcaatccactgttctgctttttgtgtgtgtgtcctgtctccccacgtaggtttaactcctgctgtgaactaatcctgtcgcgtttctgcacctgggacttcagagcgtacggcatcacgggggtgaaggtgaagcgggtcattaaagtcaacaaccgtattctgaggctgaagtttgaagagaaattccaaaagtgtttggatcttgaagacacacaagatccggagtaagagtcagttctgttacaagtaacggcaaaggctgcctttgtttcgttctgagtggggagagagagtatgaacattcctgttttcaaagttcgccatatgaaagatgcaccctgctagtaaatgtttcctggtcctgcgtctcccatggccgagatgacttcatgatttgtctagggtgagcctctttctgagcgtggggtgggggccctggaggtcctaatgacactggaaacaggagactctcaccagggtgcacagttaacgtattgatggttaagcttttgtggcattacctctcaccctctttctgccgctcttcttcctgaggagttaccggaagatgctggagtgccttttctacgtctttgatcccgaagtgactgtaaagaagaagcatctgctacagatacttgaaaggggattcaaagacagcgacacaagcaaggtagctcgcgctctcacccagaatccagcgtgcctccccgtccctgcaccactgtttaccacaaacttctgttcctggttcccaggaagcatggtggcatggtggccgacagacagagtcttaggcgtgaaaaggacagcacaggcagtcctccacggctctgtctgcctgccttgacttgattcttcttcttggagtcttttattggtgactttgaaatttccttctttaattggctccaaactcaacatgaacctccagcactcctataaagaacgagttgaaagcaccccattcccgcgctttggccgtgctttctagctgccgtccagcttcctatttccgttttctgccaccatttctttcctctctgcttctccgccctcaccttactgctaattctgtgtcattgctgggaccctgagctccaacacatctagcccactttcctgcagcctcctgatgtagaccagtgctggagagtactgcttcccaggccacgtcacacagtgacccacataaatgagaacactgctgtgttcgaacctgacgctgctctaccccaatcacttcccctcggcctgcttgctttctctgtgttttgccgatgactttgaactcctgacccttccacttcgacttcccaccaacagtggaggagggttcctctttctccacatcctcgccagcatctgctgtcacctgagtttttgatctttgccattctgactggtgtgaggtggaatctcaaggttgttttgatttgcatttccctgatgactaaggatattgaacatttctttaggtacttctcggccattcgagtttcctcaggtgagaattctttgtttagctctatcccccatttttaatagggttattggttctctggagtctaacttcttgagttctttgtatatattggatattagccctctattggatataggattgataaagatcttttctcagactgtggcttgccgttgtgtcctgatgacagtgtcctttgccttacagaagcttttcaattttatgaggtcccatttgtctatagttgatcttagagcataagccattcgtgttctgttcaggaaatctttctttgtcgacatattcaaggctctttcccactttgtcttctactagattgagtgtagctggctaaatgtggaggttcttgacccacttggacttgagctttgtacaagaagataaaaatggatcaatttgcatccttctacatgctgactgccgcttgagccagccccatttgttgactatgctcttttttccactggatggttttaacttctttgtcaaagatcaggtgacgataggtgtatgggtttaattctgggtcttcaattctattctactgatctacctgcctgtctctgtgccaatatcatgtagttttcatcactattgctctgtagtagagcttgaggtcaggaatggtgattttccccagaagttctcttgttgttgagaatagtttttactatcctgagtttgttgttgttgttgttccaaatgaatttgagaatttccctttctatctctgtgaagaattgaagggggcatcttattcttgaactgtctctatactgcgggtttaagagcaagggtggacaaccctggctaatcttccaaagtgttaagcattggcttcagtaaatagcaagcacttgagaatcattattacaaaactcttgtgttgaaatgcagccatttgtaaacctttctctactgtgcttaagggcaaagactacatttacagactaggttctcaacaaaaattaggtgaatgagtagacagtggccataaccattatctatgtctatgccttagtgtattttctcatcttaaaatagttttcctttacacttctatttggattccctcctatcctagagcctgagccaccatcccattaccaccttctgctcatttcagttaaggaggatatcttttggacatagcttgagatgtcttatggctttaattattgttcatagttctgacctctctctgtcccccaagtgcggtgcacagagactgtaactaagcaagcaaccttgaccactgcacggtggaaaggtcatttgctgaagtgtggacttggtagtcacaggatccagttttccttttttaagaagaatttctttgggtaactttaggtttcgattaggaaataatttcctaattgaatttcagaaaagacataattctaaataatatggctgttaatcaaaaactagtgatcaatttaaaactctgaggctgtgacaaggacaaaaagatctgagctcagattgtgacattgcccatctctccccccgtccttggaacatctcataatctctcatagctctgggctccttacgaggaacagtgattctgtctgctctttgtatgacactgatgcagtttggaagaagtgaagttagtcacaacaaaactaagatgtctgtgcacaattggaaatgttttcttcctggaaaataatgttgactgcatagcatacacccaaaatgagtgggaccctcttctgatgtggacctcaccccaacagggccttcctttggagttagcgagagatcccccagtccttgttggaagctgttgaacccggcaccgcactgatgttgcttatgactttggctggttttccctgaagagcaaattttgttccttatcacttttgtatagacacattcgcatgtgacttttgaatatttaaatgactttgcataatgaagctgcacccggagagtatctctttgcagattacattggccaacacagaaacgtaaaataataagctacctgcatccaagtagaaatgctgtctattttacatgaaaaaaagtagccctaagatttttttttctcctttgcagccctctctcaaaaaggaagccgtcactcttgtgaacagcctcagtatgtgtgagtgtccccggatagagttcctccagcagaaatacaaggaggagaagaaaggcccctcagagagtgaactctacagacatggtaacagacagtgcttctgacgttgtgaggccctcggctcctccatctcttctggatcgttttccttcttggttttatcaatccaagagacactgtctgaattgttgtgtgacatactcaccaatagagtggcacgcctctgtcggttcagctgcactgtcagttggactctgtatttcttgtctaccaaccctaggaagaagagaacctatgttgttccgatagttcacccaacttgcacatgcgtttcagagtctgcttctgtctttatgttacatcataagagtaaactcagaagtacacttgtgtatttctttacacacactagcttcatgagaaagagaaaagaattggcttgtatgtgaaataatcaatagaacagtcaggaagattggctgtatttgttctgagtcaccacaatctaaggtgatgaggaaacctggcaggagtgggaaagcatgtggattagacattggtctgtagaaggcaaactgtgtggtaatttattcagttagtaaataccattcttgcaacttaaatacatggcagtccaagaaccaacctgtaaaacaggctgggagaaaaggccagctcctgtgccttctcttgcctcccctcctactcttcattcttcggaatgtactcattaacaatgtgctaattaaatgcttattgtgtcttaggcactgtctggttttgcataaaccagtttccctaacatagtgcctacaaatatcaataatcacaaaattaaatataaagttatagttactatgataagtataaatatgaatgaagtatcgatgcatacaataaagagaacaaccaatcaggctagggattaagagagcttattctatgatctctcagtcaccaaattaactgaacatcagctaggcagagctttggtttgtcctcagccaggaacacctgctgcggtaggaggtgcagcatggtggcagagtgcctggcaggcctggtgcctccggctagcagcactcaagcacttactggttctttgagaatagcatgccaggatccaggccacagttctgctgggatggttcatggcaagctgtcaactgtgcatggcttcaggtagtgaaatatcagaaacacgatctggttgctaaatcaaggcctctttacttgaaaataactgatacttttcagatcattcttttccatcccagttattagaaaaacctcatatttaccatctacttagtccttctaaaatgcatttctaaaacaggctagcctgactcacattttatatcttgcatagagtgaaaataaagtatcaggcctggagagatggcttatgtgtgtaagagcactcactggcagctcttgcagaggaccagagtcagttccagcacccacactgggtggttcataactaccttgtaactccagtttcaagggatccaataaactcttttaaactccacaggcaatgctttcctgtgcataaacccatgcgtgtgcacacgcacgtgtgtgcgcgcgcacactcacacacaaataaaacattgaaaattcatttatttatatataatgtatatgtaatgataagaatttttccaactttattgactcataggaatctttagtattcaggagattacaaagacctcaagaatctgtgagagaagaactgtctgtccttctgttccatagatttatatttagtacctgttagatctcaggtgaaagaaacagaaaatgtctcagccggtacctgagttcaattcctggaacctacataataagagagtacatgcacacagagacacatacagagagacacacagacacacagagtcacacacactcactcacagagacacaaacacacacacagagagagagagagagagagagagagagagagagagagagagagagagagagagagagaccagacacacacacagcagaggcattgctaaattattgtgttcttttctagtgtctttatagctttgtttatgtttctttttccattctatagcccagtgatgtgcagttcagtatgtaaacttgggctaaatcatgtaaggatcctgcctctggctcttaagcgctgggattataagtgtcattacagagcattaggattaataaacgttacattggaaatttgttaaggtcatatttattaaaattatcttttttcatatttaggcaccatcctcattgcgaaggtttttcttggccagagtattcaggctcgtgaccaggagcccatcaataaagccaactatcccatggttaactcggtgtttgttcctcagagacatgtgctaagtatgtctgccaaagagaaagacgggcgacttcatcactctcagtacaaaccattcctacctaatacaacagtctataacttatagcatggtctaatctgaacctaacaaggcctataaacttttctctgaaaacctacttctggatattaataattttctgttattcatattaataatatgtgttgaaatttatttcaataatttatgtgtgataggtatgtgtgtatgtgtgtgtatactcacctatacattaaaatctcagtatctgttctagagtacatacaatacacacacacagagtgggaggggggacagacacacgtatagataaaaaaaaacttcttgcattcttaagtcctttatgtcaaatggcatgatgtctgcatgccacctacacagccttcctgggtacatgacacaatctccataatacctaacacagtatagatgaaatgcagcaaaccatggctacccttattgttccaggaatcctgacaaatgtacagctcactacaaatacttttctaaatccaaatacttctgccctgcagtttttgaatcagtggttgcagaagtcatggggatgggggatttcatgtgtgagtgtgtgcaaacgattagttttcaaaggattaaaaatgaacctctaataaagatcttaagagtgctgagtttatcaaaattccacggtcacttagtccttggtaaaatgaagctttcagaggagaaggataagctaaacatcgatcctgctctgtggggaaagggcgggagcgaggacttcataacagccgcaatttggtaattgtggggagttgttgggaaggatttgttgtcacttcttcatctacactggagcttaaacgtttactgtattttgagtgtttgtcgtgccagactttgctttttaactctagattctatcataggacaaagaacttgcgactgtggctaccggcagtacaaatggtttgtcttcgaccatgacctcgttttgccagagtacatcgttgaatttgagtacactacagtggtatgcattttttttgtttacaatttttaaaaatatgaattccttagcctggagtagaataatttgaaacccaggattgttaagcagagtttgtattacgtatgcttatcaattctttgtgtgcatgtgtgtgtacacacaatggctgttctgtgaaggactgaattttcaaaccttgtcatcatgacatctgcatgtttttattacgtgagcacattataggtttcttctatagctgtagtctcactgggaaacatccgatacctatggatgcctatagaaataagcctaggaagctacctccccttagcctcccgccccttccgattaccaatgaaccccctaacagttatgtgggtttgctttcagtccttttctattgacacacacacaccgtcttagctaggagaagccagctctatgtatcgcttttcataatacattgttaacatatctcatttcattgcacatagatgtataatttttttctttctgaggctgtatactattcagaaaaactaatttaggttctcctgtgctgatagcatttataggttgtatgtagttttaactattgaaatcgtgtttgaacgttattatacatgtgtctttatgtggctgtagatgctcctatgcaagagagagctacagagaacacctgtgtgtccacagatgcacacagtttaagtttcagctctgccccttacccttcacagagctttggccattttacacatttccagcagagtgggacatggggtttttgttgttagttagttagcttgtttgttttgttttgttttgtttcgttttgtttgcatccttgcctgtatgatacactatcaaactttttctgttctcttaagcaaaaaaaaagcagaatatttgagatatccctaaaactcttcagagcattacaaatcacgtgttggattcaggagtaacttcttttttaaaaaaaattatttattcattttacatgagtatactgtagctgtcttcagaaacacacgccagaagagggcatcagatcccattagatggttgttagtcatcatgtggttgctgggaattgaactcaggacctttggaagagcagttggtgctcttaaccactgagccacctctccagccctcatgggtagcttctacaagatggttattttcatgctgatttttaaaattatatattgtgaatattagtactttattttgtattgcaaattttctgttgtctttttattttaattgtaacaaaagttgccatttaatgtgtgatttataaactttgtctttctcaatctttcccagtgtggactctgaattttatatcttttttttcaaaagtcttataataaatattttggggtttttttctcagtgcttatttagcttatgttaaaacttttggctttttaagtatatgtacaaattagtttacattatgtgaattaatccatttgtttcttaaatatgaatggatactacctaatcattgtattttgaaggactatcttactcattaaattattttaacatttaaaaaaatctatgtataaataaataactgttctgctccactgattgacttaacttcagaatctatttcgttttggttaaatacaaccttgataatgtgttttaatatgtgagaggataaattctcttgctccaccttttaaaaacttttttaaaaattcttgaacatttttattcctaaaaaaaaaaacattatgatcagctcatcagtttctagtaagaacacttttttttttaattcttgaatattttttctcaaactctaaaatcagtttatcagttctgtttttcaaattcctactaagatgtgattgaaattgtatggaatctgaagcttcatttggaatggattagtggggtgtgtgtgtgtgtgtgtgtgtgtgtgtgtgtgtgtttgtgtgtttgtgtgatatgtgtgtttagtttatgcacgtgaatgtgtgtacatgtgtaggctaacacaggacatcgttgggtgtcttcttcttgtccatcttattgttctgagacagtatctctcactggaccagaaacacacttgccactaggctaggctggctagcttaagctcctgggacacccctgcccagcctcccagtgctgggtttgctggcacaggaagccatgctcagcttttcacacaggtgcgagggactctacctcaggttcttgtgcttatgcagcaagtgctcttaccaatgaactatttctctacccctgatttaaatattttgaatcatttgtcttcttgtctagaaacatgatggcccatttcattcatttgaatatgtgtctagactctaccatgcagaggtctttaatactttgtattaaatataattctaggcatatttttttaactgttctcatgagcttcttcctgcaagtacacagaaactcagacaaatggtaagcagacgttcatttagcttccgtgacagagcagcctagaggagggcggtctggacaggttactgacgccagccagacgtcatgcttgccgcttgccacttcatgagtgatggtgcttcaaatctgatgctttagttttgtctttacttctgggaagctttcttctcttagttcctttgataatttcttcttttcagttctctgctgagtcttctgaaacccactctggagaagtagctctgaaataataactaaaagatgtgaaaatgactttctccttttttctcatgttcacctcttaattctttgctatgggatagttcctcagtactggcttccaggatgatagtttaatcatcctgctgctatattcatttggcttcttaatacttattaaatattttattttagtatttgtttttacattatagtatttattcttttctataatgtcttgttatagattctgtattctcctagatttaaaaaatattcactggttaattattttcttttcttctagggttagctctgtttgctcatgtagctcttagtcactcacacattcaaagttcttgctataatcacatgtgaacccagggcctatcaggagtggcctcttcttctgtttatttactctaaacatcacatttctctgggtcagttcttaaaacgtttcacctgcatgtgtttttcctaaaagccacagttctgctcttacattccacacatcaatgccttctgctttatgtctgataatttcttaacccttgtttctgttctatgccctaaattagtttaaatgtattccttgccagttttaagaaaccttcataggtgagaatagacacatgcatgcctagctcacagtcttaatctatgcttatatattgattaaagtaattttactattctagatattattgtataactacaaaactcaattgttttctatacaacctatttggttttatgtaacaaataatcaactgaattttcaacatttgaaatatttttaggtcaaagttcactctttattttctacatcaaacaacgttattctagaggaaggcaaaaagtattctgaaggattagtattctcacaggatttgaaatttgatgatgaagttctgaagatggaacccaggattaagccccgcccaaaactcattagtttggatgagaagactataatttcccttgctaagactaatatttacagccatattgtggtgagtattataagaaaaaatttggaaggcaatcctgaatttggaatttgaatctagtatgtggagtctaaagttattacacaatgttgttaggaatcatataatttgattgcaaagtctccagtcctcttgttgtatgaagactggaccagtgttctctagtagtaatcaataaagtacgtaaattaaattttcttaagttacttctttgttgttttatttaacccaaatatgtaaaatatttcaacatgcagtcttaattttgaagtgtattttctaccaatatcatgtattaattcagtctagcattgtgttgggagttcagtagctccttgaagtgaagtggctttccagtaagcaagtgattttattctgaatgataagtaatctctctttaaatgatataggtaaaagcaaaaagtttgaatcagtttctaggattaagcaacgagtatatgacaggtttatctttacagatgtatcagcagaatgtgagttaccaattaaagtgatatcgtacactaaatcaactctacgtgaaatagtaacctctctgcatgtctgactttgagacttatcatgttcaagtgcgttgctaccatgatttccagactaccatcacctctgacctactgtactgtcatagctccctaaccaggacttctgtactctgcagtagcagttctgaaaactccagaaagtgtgcactttgtagcctgctccagaaagtgtagcacatttacaaggaacagaatcttacttctcaaaaccttaacttgggtatcttgtaggagaacttagtggcagtcaggctggcagtgtgaagatccagcaagagctgttgcagtggaccacagaggagttagtcagttcgaggcactggtgtgaatgaaggattgcacagcgggcatgggaaatatttctagaaccaaatatatatggaaagaaggaaagggatgttcaacaaaataatggatctcttaagccacagacttaaggagaagatgatgagttccattcagatctattaaatatgatgcatttgtacaatctatcagtgaattttggaatagtgtgcacaacctagcctttcatggcagtttcagccaattttgaatacaattagaaacttagttggttctccttgtgaggagcccagttgcatgcacaccattaagatgattgtagtgtgtgactatggttgacagtagatagctgaaatcattgcacagtaccacttgtgaggactgtcatcagctaggtgtactgttttcttgtaccattatttacttcatagtctacccacagatacatcttgtctttcacttgatacaaatcaaaacagtgagctttgcagtcggagaaccatgtaggcatcacgagcagttctaagtacaaaactgaaatgtttgtcttgtgtgtttgaggatgagatgaacaggaacatctgggccgatgtgagatgtaggtatgaccttagatgcccactcaccttcctctttgacattctgttaccgctgcctcccaccccccgtttcaagacccgcagatattcttccttggtccaatggctcagtcaaggggcacacgttcacctctttcccatgtggttttctgcctctgttgttcgctggctaaccagagaagcagatcctcccagtaaacaccctaaccaatgtatttattcactaaataagaatttcttgctaattattaacaaatttagaccaaataggaagttatattaatcacataccaagcccagctatgttactacaaactattattaactttcaacatctcatagcatatttacttactgtattagcattctctgaatgttattcataacaatcatgttctcacttttgcgttattgtagatgatttaattattctacccttgatcttagccaaaaggctaagaagcattgataattttttttaaatatgttggctactaacgcctacaccatgtcacaaaaagcaatgaatgtattttgtttttcaattcacactttatttcgcttccagaatctgaatctacacgggaatagcttgagtaaactgagagatcttgccaagctaactgggcttcggaagctgaacattagcttcaatgagtttacttgcttagatgatgtgtaccacttggtaagagctgctcttttgaaatgtaaatgccaagtcaaaagcatagaagcaggatggcagcctgggccttggggggatagagaggaaatgttggtcaaaggaaagaaatgttcaactatgagatgaatgtgtcctgggggtctcatgtacagcacagagtagtcactgtgtcagttagaaggccttacttattatctattttattatttactataaaacaacattaagatgcactaaaataagcaatgcaaatgtatgagttggggaaatcttaggagagtgtgcttacaaggcagcctatgctactgagagccaaagccccttgtgcagcctcctctgccctttccccagctcctctccctgcactctcccctggtcctgctctcagtcaagtgcacacactaacatagtcgcttggctttgccattttaagaaaggtgcactttattgctagcagcaatcatgggcctataccaggaggcctactagctttagaaaactttgcatctcttaaaaagaaaaagaaaagaaaattatagaataaaattcaatttttgtagctaaggatataatctgtaattgaagccatttcaacaatataactaggtattaggcataaagacatgtatttttgtggataattgcaagttgtcttgcaagtctgtttgcctgccctcttgtgcaaacaagtccctgcagctctgtgttcagagagatgaggaaacctgtgctatagtctctgtagtctctaaggattggctttgtgtgtgtgtgtgtgacagtgctcctccattatcaaagccataatctaattgcataactcatctagaatccttgtgttcccctaagtttacaagagccaagcctgacctgagaattgctgccatgacccagtgtgttacccttagggcagtgggattcttgtgtaggttttctgtatatgttataagaaagcatgtgacatatttagagaagtgggggaaagcacttggtatgcacaaaccctgagttagcattgcgcctgtttgtatgcaccacagtacaaccttgagtatttggacgccagccataaccatgtgataaccctagagggattcagaggcctgatgaaactgaagcatttggacttgagctggaaccagctgaagaagactggggaagagatcaatgtgctgtgcaaacacaccaccagccttctcacccttgacattcagcacaacccctggcagaaggtatgcagcagacagcactagaaaagcagacactctgtgcagaaccagtctctgcctcgctggtcagtccaagccagaaagaggcaaaccacacctgttccttgtgcttccttcaaaatcctggataagtgggtttagactggtgatctagtgacacaaatgtcactataagaaaagctgtgctgtcatgtttgtatgataccttgtaacctgtgacagtctgaatgcattactgctctaagaacgattaaagtcattgtcatttgcaaacttccagagaattcatgtcagtggctagaatgcttttataatgacacacaggagccaaaaataatctgatttaataagggaaacacactgttaagaagggaacagcattctacaatgtgctctaaactctggataataacatataggctcactttgcaatttctattatttattctcttaaaaatgtagaaatcatgtctcttcataaacctaaattataaaattatttccttctgttatagaaagaaatttgaatgttatttttattattgttcatgttatacctttaaggctatctcccagtattttaaatgagcccaaatttatcattttaagactcttctttcattgcttctaaaatgtacatagagccaggcactgcactggagaggcagaagcagaagggtcatgagttcaaggccagcataggttctgtagtaagaccacatcacaagaataaataactgacatttgtgagattatgtttagtattttaaagaatgagtaaatgactggatctattaagtgggccatattactaaatttataacactgaatttaagataggtaaagcaatattgttctgttctgtttgttttgttgccaaagcagatttttctaatggtcaccctctccctgtcaagttggacttcaatgtcaggagatccatgcggagtccaggacggagctccctggcttactgcccactcaacaagcatgagtctccctgtggctcccatcatcctttcaccagccactttccaagagcagtgggcttgcatcctgaaaatggaacagatttatccttacataatttaattccaactattatttaaagaattaaatcaagtccttagttttagaagctaagtagttttcaaagagagatagacagctttcaattatatggaaaagaaggaagtgttactttcccgtgccgtaatacatgtgatgtctaatgaaaattaactttttgatattttttcccaagccagccacattgaggctgagtgttattggcagactaaagactcttacacacttagacggcctcgtcatttctgaagaagaaaccagagcagctctgaaattcattagtggaacgaagattactcaggttggcatcactaggttactattcctgagttaggtgcacatacaaatgatacttttctggtttattttcttttattaagcttgatactctctcctagcatattaattttcctataccaatgtgcctcccataccctacccccataaacgagagtgggctttatggactatcttggaacaggcccaaatgccagcctttccccctaatatctctagggtaattactttctaatcccatgaacttcctgagtcctttctagaggctgcatggtgataaatagtatttgtgtatgcagtaaccttaggaggctttgagagagcatttagtacactgtgcagtatcagtattatgtgtaacctgttagcctgcagggacagaaatacctgcgttatacagatagagaatcctgcactttgggtgctggggtgtaggttattacaagcactgtatcagcttgggttggccctggttttgatccccaacattcagctctatctcgatctaatttctttccattttttcctttattctcctctcttacatatgacagcagcttcccctccctctccttcctccagttcccctaaccccagctcccctcagccccagatcctaggatacttgaatgttccttaaacaacataacagttggttttggatctaatcaaaatgaagggaagaatacttttttttgataaaaatacaattaatgtattgaggaagacttagagatttgccccaatagaaatcaaagactactaaaagttttaagacacttagcatctcagaacaaagacccagcagaggcccagacctctgggaaagcttgatagacaatggaaccacctttgcagtccgaagcagctactcagtacaaagcactggggccaatgcgttaaaacttcactgcagcgaactggacagatggctcagtggttaagagtacagactgctcctccacaggatctgggttcaagtcccagcaccaacatggcagctcacaaatgtctgtaactccagttcagcaccgcaacacacacacacacacacacacacacacacacacacacacacacacacgtgtatgcaagaaaaacaccaatgcacataaaaagaaataaatcttaaaaaaaaacttcacttcaaaagacaaaaaccaagaatgttttagaacaaaatatccatgtgatttatccttgtgactatggatttagcaattcttcataaggaatcagaccacaggcatatcatgaaagctggggtttgtccatataaaattggcgcagcctttccttcaaggatacgataaggaaagaaaaaggaaaggtaagtagcgagccagggaagaaaatctacaacacaaatgtcaaactatagtctctctcaatatcccagatgtgtacagaaaaagacaacggagggaaaacaaacaaaacaaaacatggaaggagtttgaaaagcatttcactgaaaaggatttcggaacagccaactaatttataaaacaatgctttatcatattaacattcaaaaaacaaagttccaaacacaataatctgccaattaatacagactgacaaaaagtttaagttacagccagaacataaaacagtaattataattattacaattgctttggaaattttatttgacttcctacctctctcttcactccctcctcctcctcccttccctgacccaacaaactcctgtaaatttatattctctgaagaagccctgtgtatacacaggagccgtgcacacgggcccaagggtttccacagtggcggtgttcaatagccttggactcaacaacagtgttcatgctcagcagagtcattaagaggatactatacaaggcttagggatgtagctcagttagtacccaagtgtttgtgcatcatgcaaaagaccttgagttcagttctcagcaccccacaaaccaggcatggtgtgcacgtctgtatcgccagcatttgggaggtgacagcagttgactcagaagtttgtcatcctaaactacatagaaagttcaaggacagtctgctacatgagaccttgtctagaaaagggaaggaggcgggagagagaaaatgtcacacagagggaatgtgtacaccactgactacaaatgaactccagctcagtgctgcagcatagatgaattttatagtgctgagaaggagcaagtaactgcaatacagtttggtttccaaaaagtccaaacaacgtcgagcttaatgatgcattgtgtatgagcacaagcaggactagagagaagaaaggagtggatggtagacagacatgtaagagggatcccatctaaggggagggtgggaagacgctcgggatgggaccataggagcttgtaggactgttctagatcataaggtggtctcatgggagcattagatggatgtttagagtataagcatccttgaaattgtgtgtaggaaaacaagacaaactgaaaattaaaatttagctggatatggaggatattttaagagaaagaaaatgtttgaaaatcatttattgggctattcatcttccatggggaacaagccttcttagtcgtgtataaataaacatcgttatgctatcccttttattcatcgtattttttaattgtattttattagctaactctcttacagcattccagttctaaagaggaaaggcctcggatgctcagtacatggccctctgccaaaatcctgacccagatttccaagctgggaccccactttcacctgaccgggaactggtactcaaaggtaatgacgcgttcattacaactgacgccaggttacattgaccgctctagtcatcatgggtgtgacacggagagagaaaacggaaaagggagactaaagatgtcctttcccagcaaaggccaagtgtaccatacagtgtttctaactgtagccataataatatactctagcccctcagcactcattgttcctgagaagttaaaaccttgtgccctttgaccctatttccctgccctcccatctccatccccagaaactaccagtcgtccctctgcctctgtgagtttagctgcttagattccatatctaattgaaatcacagtgtttaatttatgatgcatagctatcaaataatatactctaaatagctgtcattttaaatggtaaattatgcttcaacaaagttgggaaaacatacaaagcaatttatcatttttaaagtaacataccattttcttttttaaaaaacatgaaatgataagacagtttctagatgttctagaaagatgttacagggactcctcttcaactatagttattatggaattggagatttagaataaaggtctatacgttggagatgtagagtaaaggatacaaactgaagggtaaactttatactgagtttagtcaactctgctgagagccagagatcaagccagcaccctgatggcaagggagtagaaatttttgcaagagaatctgggaattatccaggcctcagccagaaacaggtcacagccccaacagctccttgctatataaggtcacctgaccacatcagagtcctttcaagtgcaggcttgaaagataccaacaaagctaatagaaccctcaaaaatgggaaatagtggtgacatttttcttgcataataggctgttactgggctgcagtgcaggctcaatagtagtgccaagtcatagaatcagtgctgctttaaagctgttccaagtggggctgagatggccagattttcatatccaccactaacaatgagacaggctaggaatgagtgttccctgaagcagagtggctctgcagctgaggctgtccccaaagggatagacagctttttaccaggagctgtcccagtaattgcagtgacacccaactggcccaccattgtgcccacagcatcacaaatgcccctgttagagtcttgtcacgctttaactttgttgtaatctaagacttttttatatcattagttcctgaaggaagtctagcatttgcgtatcacatttgattgttttgttagctttttaaatctaataattttgaatttgtttgcaagattcagaagtaacatgtaatataaattattgtatagataactgccttaaatttagatggacaacatctctttgaaatcacaaatctagaaaaattggagaatttgaaatgggcatcgttcagcaataataacctctccaaaatggaaggccttgagtcctgtgtcaacctggaggagctcacattagacggcaactgcatctcaaagatagaaggtaagatgccatagctcccatggctcaagcaaccaaaggggaagatgtccagcgatgccctgggagggagccttctgcatacctacggatcagactgatgatgcgctgctaagcacaatgagccccagcagctgtcaaccccgcaggcctctctcctttctcatgccggggattaccatcaatcactataccccgtgtgtagtaatgtagaaatgagattgtcattagcatttgtagcactgaagaagtgtatggatgaggctttctttgggaaagagccaacaatctgcttcatttagcaagatgtggagttaaggtgatatttagaaatgtgaagaccttaacagaagtgaaaattatactcactggaaattagaaaattaaaaaaaatctaattttgttgaatataggctttttatagtaggatctgattttttttaatttcctcagtttctgttgttatatctccctattcatttctgattttgttaatttggatactgtctctgtgtcctctggttagtctggctaagggtttctctgtcttgttgattttctcaaagaaccagctcctggttttgttgattctttgtatagttctttttgtttctgcttggttgatttcagccctgagtttgattatttcctgccatctactcttcttgggtgaatttgctttcttttgttctagagctttcaggtgtgctgtcaagctgctagtgtaagctctctcctgtttctctttggaggcactcagagctatgagtttttctcttagcactgctttcattgtgtcccataaatttggttatgttgtaccttctttttcattaaattctaaagtttttaacttctttctatatttcttccttgaccatgttatcattgcgtggggtgttgttcagcttccatgtgtatgtgggctttctgttgtttttgttgctattgaagaccagccttactccatagtgatctgatagagtgagtgggattatttcagacttctgttgaggccagttttgtgaccaattatacggtcaattttggagaaggtaccatgaggtcctgagaagaaggtatattctactacaaacgcctatattcaacaaaactggaaaatctgggtgaaatggacaattttctatacagataccaaataccaaagttaaatcaggatcagataaaccatctaaacagtttcgtaacacctaaagaaatagaagcagtcattaaaagtctcccaacccccgtcccccaaaaaataattaattaaaataaataaataaaagccaaggatgagatgggtttggtgcagaattccattcaaagaagacctaataccaatactcttcaaactattccacaaaatagaaacagaagggacactacccccaattcattctatgaagccacagttacgctgcatattctcccttggagatggaatggtttgtgtctaatcaggaacttgtcacaatttcctttcatagagggcttcataagagattttttttctacttctattatgtttaatgttccaaataaatttttaaaaactggttgagtgcatattacttttagcttcagatgttatcatgtatgtttaagaggcatttaactactataaattattttgatgactttaaaaatgtcaatactgagatgtatattttaaaataaattttattagtttaattttttaaaaagtacaatgttcatcattttataaaattttgcccttaacaaatggtaaaattttatgtataccaaaaaaaaaaaaaaaaagaaagaaaagaaaagaaaggaaaggaaagaaagtgaaaatgaaaaaatcctgtagacatcttctatgtctccacttccaaaccaaccaatcttctttactaaggtctcagtcataacaacatgagtgcattttgactgtttaaagtttaacatcagaacattgattctatgccagagaatgaagtgaagtctcctcccctcagcagctatcctagattcttcagacagcatggggttctgcttactgcatctaaaagcccagcctttacacagcaatgctctgaaacacactaaattacatgttctacagctgtcctggattctgtcccaactcttacttggtgcctttaatggaaagaaattgaaagaaaccttctctagcctgtctcatagtctcccttcctagaaacaattatacttaattctgtagcctcttcgaggtgggctttcacacgtccctgttatggatgaggaaatggagttgttgtaccacttacctgtggctctgggtcacacatttgatgataactaattccaaagttctttgagccatctgtgtggtgactcagtaaccctggcactcagctgtctgagacagctttaaaaagaaaaagacaaatgccccctctttcacctgctctctcatgcctgaacgcttccccactgtaaacaaacattagggctagattctgctgggaatagccagcttttgaacttcattctaaaaacaactttaggcatatattgtgacaaatgggggaaaatggttgtcattactacggctgattccataatttacagtgtggtatactctggtttctaatctttagtgttttaaagtgagatctagtagctattatattttttatttttatttttgaaggagaaattgttacctataaaatgcctttctttatacctgggttccaggtataaatgaaggttggtattgtattccctctgaactcttggggtttggttgagtcatcaaagttgaagctctccagacataactattgaggatgttgctttgggtgaccacctgcttctgaccccatgtttattaaatgaatgagtacaaaggtaaaaaaaaatgcctttctttaacacctaagaaaaaatgaatctacttagaaatccaaaatcaaaatttgacgcatgagtggaacttgctccacatgactctgtccttctgaagcacacacacacaaaaatgatttacacaaggagcatcggtacagtggctagcttattctgtttgaaattaacctgccgtctggtctgagtctctccttggctttgctgattttctaggcatcaccaggctgacaaagttaagccgcctcagcatgaacaacaaccttctcacgggcctggagaagcacacgtttgataacctgcttcaccttcactccctctctctggagaacaacaggatcacatctctgagcgcgttacagaagaccttcactctgatcgagttgtacataagcaacaactacatagctgtgaaccaggagatctacaacttaaaggtgaccgcctgggctgtggtgttctgcgtgcaatagcatttactgtgcttgctatgggagccttgctcactgcacagagtgtgttgaaactataaggaagaaaatcaaataacaaggtttattgaaatatatttgcattcatttatgtaaatgtacaaatgacagccatctgatacaagtatgggataactttttatcagcatacttaatggtgcaaagtaatttgtttcattatgacatttacacggcacatacagttgctttgatcatatccctacccctttactgccccagcctcctgttcctcctcctcctcctcttcccacccacaatattccccttctaccttcatggcctttctctccactagctccgtgtatgagtgaaattctctccactggctccaagcctgagcgaaagcacatagtatttgtttttctgagactaccttattttccacgaacactcattctatgatagatataattatatatatgatataattgaaatattaaaattcaaggttgtctaacctctgggaatataacttgatggggtatgatttgcatatgtacataagttgaatgtattctcattgtctagggtttatgcaacttggtcattctagacatgtatggaaacattattatatggaaccaagaaaactaccggttctttgtaatatttcatcttccagaactgaaagccttggatggagtctcaattgtaagttgtttttatgaatcataacatttgatccacagtgcatatatttgtataatccaggtcataagcattttgaatattgatttttctctagtattatactgaaccccaccatgcttattaaaatctacttctccaaagctcttttttgttctggattttacaactcttttacctagccaattcttaatggtcttaacttgaggcagagaggaaagatggtgtttaccttttcatacgaggaggagaaggatttggtgtctccagactgaggagtgagctcagcaggtcaggagcccatagcacaatcgcgaggcactgagctttgcatcttatccctagatactatgtgagatgggaagcagaaacaaaagaatcctcagaggctttgggcaggtagcctgctatacttagctctgaacaacaagataaaaaggcaagaccagtgcctaagatcattccctgacctccatatacacacacctgtaccacagacactcaaaacaaaaaagagccttttcagtaaagagcagcaactggaggcgaagcttagtgttgagtcatttcctggtgtgtgaaggtctgggttgaatctctaataaacgctgcagctgacaaggcacaattccatgaggcagagtagaaggccacaccagagcaccgtcatcctcttaggcttcagaactgtttctaagttcctggggaaatacagtgttggcaattatggaagatatttgaacccacaaagatagtatagcaagattacttttaaaattgtaaatagaaaacccaaggtgttcatgagggactcccaggctccgtgtaacaggataagtgcccaaaaatcctatgcagggtgcagtttcccagtgtaatattatctagctctcatcaaataaaaatgtacatcaaattttctagaaaatggaaagacaactcctggtggtttaatactctgagacactctggagagattactaatcgcacgcttttcaataaaacctcccattccaataaatgcaaattcttcagaagtgtgcattttgcgctcattcagtcactaagggtggatttcttcttctttttttattagatattgtctttatttacatttcgaatgttatcccctttcctagtttcccctccgaaaatctcctatccctttcccattccccctgctccccaacccacccattcctgctttctggccctggcattcccctatactgggaaatagaaccttcacaggaccaagggcctctcctcccattgatgactgactaggccatcctctgctacatatgcagctagagccacaagtctcaccatatgttttctttgattggcggtttagtcccagggaactctgaaggtactggttagttcatattgttgttcctcctatggggctgcaaaccccttcagctccttgggtactttttctagctccttcactggggaccctgtgcttgtccaatggatgactgtgagcatccacttctgtatttgtcaggcattggcagaacctctcaggagacagctatgtcaggctcctgtcagcaaaatcttgttggcatctgcaatagtgtctggatctggtggtaaaggtggattcttgtgcatagtcttacataactcgtattgcatgcattctatatatgttgaagctcttgtccttcttattaactgccctcatttgaaaggtgtcatgagaaaatacatttagaaaatacataaatgtagggggaaaaggtcttgttctgttcactaactgtaaatattatgtatttcctttttcattttagcatcgcaaaagctcagggccaattttatgatacaataatagaaattctataggacattacattctccctgtctctaaccctagtttttaatctgttctaatttatgttgttcttgttgagtttgtttgtctgtctgtctgtttgtttgtttgtctgtctgtttgcttttgagacagggtttctccatgttctctgtgtaacccccctgactatcctggaactccttctatagactaggcttacatctaactcacagttctgcctgcctctgcctgctgaatgctggaattaaaggtgtgtgccaccactgcctggcttaacttaccttgtccttagtcttgatcttcttcatcatgtattatttgtgcttttattgttttcttacatgcttcctgtaagctgctctaagttctttgtggaatggggttacaaatctgtgaattaataatggggtatgaagaccaggctgaagaattagacttcaaattaaagagaacaagaatatgtcgaatagttttcaggagtgtaattacatatctagaactgtgtattaagaattctcatctaatagcagtatttatggcagcaaagaagattactaaaatataccaggaacaaataatgagaaactggaccagaaggaggtgactttaaaaatagaaagatggctgggcagtgatgatgcatgcctttaatcctagcactccagcagatcctagcagaggcaggcagatctctgtgagtttgaggccagcctagtctatatagtaagttccaagacagccagggctatgtagagcagccccatatcaaaaaacaaacataaaaacaaaacaaatgaataaataaataaaagcagaaaactgagacttatgaaaagcaatggggcctcttcagtcacaccacccaaaatgtgtctgtgctcatctaagcttgtaagctaagcagggttcggccgagttggtattgcacaggagaaattctgggagaaactgacagaatttatcagccatacacagcaaacatgaaaagatacctactgctggggtccaggaatccccccacaaaccactcagaccctggtctcagtcaaacaagaacattgaacacccacaccaagactgatctatcagggcatagcatagactcaggagctaagactgagaccttgaatgtttctcagggccagtttataaaggcaaacactgcaatgagctcatacgtagcttcagggtggcgcaagctattttggctagctaaacaaaatagttgtaactgaccttgaatttgattggtcctaagtggagcctgtgattgtgaaattgcccaaaaaaatagcaaagctgagaacataacaggatatgtggtcagtctgaccttccagaaagaattttctatgtcagcattacaacaacaatatgaaatggctggcaggcatgaaacgaaaatgactacagttatgctagggagtcaggtgttaatgtctacagagtttgcaactacaatacaagtgttaaagaggggcttgggcttactacctctttggattcttggccttcataaacgaaactcactaggaagcttaaggtcaattttactaatgtttaagaggaaacagcagggcaagcaagttatagatcttggcagccattgggaaaggtatatgaaaggaaggaagagagaaagtcttgccttgagttgggtcagcagcctgtcacatggcagcaagtaggtacaagacaaaggaagtagcttcagagggtagtaagaagacccatgatgctagagaaaacatgtttaggctttggtaaaagaaaaagagaaagttatactgttctggtggctagaccttaaaagatcagcacagtgatggatccatgggtgaccacactgggggagataggctgaagaaaaagcacattatctcactaaggggaaaattattcctcccagtgcttcagcacagctttgaatgaataaaccttcctgagaggtgaggccttgagaaggtaattgacaggttctggtgaattagcccttttccgccccttcattctttttaattggtattttatttatttacatttcaaatgtcctctcctttcccggtttctcctctgcaaaccccttatctcatccccacctcctgcttctatgagggagctcacccacccactcccaccgaggaaacaatagtatgtcaggtctctacattcaagccagaggctgagtccatgcttttgactaggaggaaatagatttcccttaatgagcaccaacagatccctgatagttatagtcaccaagactactgtaacaataaacaggccccaataaaatagaagagaggcaacttccagggaggagactttcagacgaattacatctcatgacacatttgattatctgactggaaatatcaagcaggcggttgaaatcatagactaaatttggatatagaaatttaatccacattctttttaagagtcagaaacagcttgaaaagagctgacagttaaactgaaagcatttgtaaggctgtctaaaaaaaaagagagagagagagagtacagaatgcaaggaagtctgggtaaggctttggggtgaggggttatcccagcacccagtttcctgaggaaggcagtgaagtgatatggagtcagccatcagggctaaagatgcctctgcctgtgagttatatggccaaaagccactggcttctgggtactaactcctgtatagcagcagagaaaaagaaacttaattactttggttcttttctgtttgactcagatccctcactggctaggtgagaggcttggagttccttaactcttagtgagccagaaagaagagaaaagaaaaaagaaaagaaaagaaaaaaaaaagaaaagaaaagaaaagaaaagaagaggaaaggaaaggaaaggaaaggaaaaaggaaaggaaaggaaaaaggaaaaaggaaaggaaaaaggaaaaaggaaaggaggaagggaagggaagggaagggaagggaagggaagagggaagggaannnnnnnnnnnnnnnnnnnnnnnnnnnnnnnnnnnnnnnnnnnnnnnnnnnnnnnnnnnnnnnnnnnnnnnnnnnnnnnnnnnnnnnnnnnnnnnnnnnnnnnnnnnnnnnnnnnnagggagaaggggagaagggaaaaagggaaaaaggaaaagggaaaaaggaaaagggaaaaaggaaaagggaaaaaggaaaaagggaaaaaggaaaaagggaaaaaggaaaaagggaaaaagggaaaaagggaaaagggaaaagggaaaaagggaaaagggaaaaggaaaaagggaaaagggaaaagggaaaaggaaaaagggaaaaggaaaaaggaaaaggaaaaaggaaaaggaaaaaggaaaaggaaaaggaaaaaggaaaaggaaaaggaaaaggaaaaaggaaaaggaaaaaggaaaaggaaaaaggaaaggaaaggaaaggaagaaagaatggaaaggaaggaagaaagaatggaaagaaagaaaaaggcacacttagagacacatgcatactagatgaagctaaagaaggctgcaccaccattttcttgttgttcttagtttttatcttttgccaggataattggtcacgtgattttctaagaatttttacattctatgagttcatactaagtttaaggcaatattttgtatcatagataagatttaaggaattacagcagagttgtttacatgcctttccattaaaactattacctgactaaatattcactatctgttactagatccataagttcattataagtttaaagcaatgtttttatgtcatacgttagcagggttttgtcaagagataaattatctgccttgtatctcattattttgaagtcttgtatggataaactagtccatcatttattttctgtccttgcacctataataaattgcccattttcagtttattactttagttaccagataatggtctcatacctaacctagaaagaatgttttccttcatcataaatttgctccaagcctgctttcttttcctaatgcaattagcctgtgacacatgagggtttatgtagctctatttgcagcttttattctgtgtggggcttgaaagtgtttgtatgaatttaggaattctataaaatcattaggaattatgacaccactttgcctatacagcattactacatgaaagtacatcttcatattaactctgcaggaaatctgcccaatagtgcgagctaatgcccaggaaacattagcttatgtaatagctaatggcaggacacgcatctcagcaataagacgcaatcctggaaggaagtctctaaggaccctgcaatctcagagctcgcccatctcagcgatgcaaaatggtggccgtctccagaaaagtcacttgcttgccatagcctttcctagatggcttctgacaggctttaatgctttgcctaggaaacctaaaatgagaaagggaaggaagaaaagcagtgaggagtgggagcagagggaagtcaagggcagcacttgcccggagtcttcctagctgcgaatagaccaggaatggcacaggccaaagcactgtgcacacaaggactgagagatggcgcaggactagtttcaagtgggacagttctttattcttacattgttagctaagtgaagatcaagcctgtgaagagctaaagagctctctaggcaggtgcgacttcattttattccatcttcctacatagttttaaaaatgtaaaaatgcaaaactcattttgcatgaagagtatatatcttcatttcaaatatgaagtctttatgagtttagaaatataagaagggagggttagtaagtgttgatcaaatgacttaccagttttatctaacacaaactgaaaaattactgcccttggaataactacctggctatattatttttcaagattaaaatcctttcataacatatatctcttccttgctggtagttgatatttttgtttgatccaagtacattcataattgctaaagtgtttttgtgagacctgattgtcagtaattactcatgtctgtgccatttcagaggatctatttattgtctcttcacactgaactttttcttggttttcaacatgatgagaaagacttttctacttctccctggacagttttgggtctgccgcagagcagaggctacctgtctcagcagccctcctgcaaccccaaacaaccctccctgaccatgcgctgtcaactctctccaacctatgtggctctgtgtcttcgagacctggcatctgaggagctgaaagagtggggcagactgcagtctgatgttatacacagcctgacttcagcgtcagtgtgcttttatacacgaatgtaacataggaagcagtgatccaaggaagagcatttgagttcagaagcacgtgatcagaaaaccatgtaactaagcatcagtaagcacataccaagtactaacagagcagccctttcccagaacttcctcaagacagtttaaacacaattgcctggcacatactatagagtatatcttagaaagcatgaaagcaaggcagaaggccgtattcagatccgggatatactgaccagattgggttctatagctatgttctgacatccaacaagaatagacatgtcttataaagcgaatgcaaatatttatcacaggaggcaagaattcatgttcaaaaacaacccagggaacaaaatgcacttaaggtaaaaggccctctgccattttcccctggggcctctctcacagttccccaaggcattgctcacatgcgccattctgctgactgtgctccagtatgcaccagtgagaaaacactgggccccagtttgctgctgccagcctcaagtgtctgtagtctcttaaggccaaggccagggtaggagctgatgctttctaacacgcctccattgattgtgtgtggctaggacagacatcttgttatgtcaccgtgggcctccacagatccctcgttgtgctacagataagtggcaacacccccactcccaccaccaccaccaccattgatctccaggaacaaacactttatgagagttggtttggtttgggattgttactttccagggaagccctgaaaataatggaaataatggaaggaatgtaagttcagtctctccttcaacaggaaaacgctaagaaaagtcttgctgtaggctggcgatacggaatagcccattctgcacttggtggtggggccaaagtttgtttctgttgcttagatagaacagtcctattattatctcaaaggttaacagttattgtctagctaggtttcctctttgcttctccgctgactggagacagttggatcatggtgagctttttgtttctggttcccagcacccagtctgacttaaatgatgcaaaaataaaatcaagagtatcagccctcaggtcacaaagtccttaaagcccggggactgtcttgtgttgtttgacctatccaacgtgcaaggggctgggaatagctgtttctacaggaaagaataaagagaagtgtgtctgtttaatctgcatctataacgggaggtgtggtcatttgccagagaggtcatccctttcatatgtcctcacaggagacatcagagacagagactgcaaaagatttgtttggtggacggcttacctctgacatgattgccgaacgacaaggacactcaaactttatccaaatgcaagagctaaactggacttcatcagccatcaggtacatctgcttccttgtgtgcatgtgccactgtgaccacatgtggagttgtgtgcacgtgtcactgtaaccacacatacagttattgccaagttttctgatttccttccctaacatacccaataattgtgctagtctatttctgaaactccttgaaatgatgcagtaattcttattatcgggaactgtggttaaaaactactgcgagcttttgtttttcacctggttttgtttctcccgtttcttttacagctagtcatattaggtttacatttggtgtggtgttgttcttttacggaacagcaaaagtgtagttacatcttaagaaaatcataaatgtcaaagttagaaaagaaagaaagaaagaaagagagagagagagaaagaaaggaagaagcaaagaaaaaggaaaaagaaagaaagggaaagaaagaagaaaagaaaggaaaagaaaagggaaaggaaagaaaagaaaagaaacaaacgaaacgaaatggaacgaagaggtgtttacacctttaattgcaccgcattcattgtaatgggcttctcagatgcatgctaggatgtaagtgtggagttatcatgtccaggctccagagttgtctggctcatcaatgtccagagcctctctgatgatcccacaggccaataccattcccaactgagtgttgagatcagtgctgtgaagggttttcccagagcccaaaaagtctggtgtcaagccgggcgtggtgggcgtggtggcacacgcctttaatcccagcactcactcgggaggcagaggcaggcagatttctgagttcgaggccagcctggtctacagagtgagtttcaggacagccagggctatacagagaaaccctgtctcaaaaaaacaaaaacaacaacaaaaaaaatccagtgtcaaagccctccccattccctgctcctgcccactcctttcattccttgtcgctttgggaacagcctgcttcacgtgtgccatggaagcttatgacctgcttgttttatgacttactgtatcaagttttctgtgagttcatgaacttgtatgttcattggtaaataaattggagatgtttattgtataagtgtcatctacagtaattgtttgatggttatagatatgggttttttttttaaagcaatcagatcctatatcattttcttcatgcctgtacaaaaaacaaatgttttagctaaacattcgtctcctgtatttgacattgcatataatttgtctagtgagactttttaacggctttgggagtcctgtgtagaggaactctgttccattgaaataatgactgtatttgcatctaatttgcatctaatttgcatctaattcaggaccgtggatctgattcctgtcgaccacttcaggaatgtgagcaacgtgaatctccagaacaacaacctcacctcgttcagcggcctcatctacctgcccaacgtgaaggcacgtggctgcagagccatatttgccctcaaagacatcagcacaagttttaatcttcacttacattaaaatgtatttccttattaaggtgtcgaaattattccctaaattatattttattttgcttttcactaatcgagaaaatcttagtcttgcctgccaaatttttttagtcagtgaatcttacgtcctttgctgacatgcagatcttactcttcaggaggagacagggtgagaggcactgtctctagtgagcagataggaagtgaaattgagaatgaggtggctctcaaagcagtctctttgccttggctcaccaatgaaaggcatctaaacacagaaacaaacaacttgctaagtccttatttcctctctatgaggcctagacaaattaggactgcagattgagaacactggatagctgactaatgacttggatgttttatttgcagtgattctccaagatgtaagatcattaaaacacgtttgaagctaaatttaaatactttggaataattttatctttcacagtagcatattattactaattatgttctctatcccaagtatcagtcacaccatttgaagagttcctaggacgtttgattaatgagatgttctttctgtaggtcttatgcctcaactacaatcacattgaatcaattatgcctagactaaagcctcagacccacttaagcagcagacagctgctctaccagaaagtgccctcaagtggctacggacagcaaggaacctcaaaactaaataggtactttaaaaaaaaaatcttttatttttcacacttaaaaacaaccagagaagtaacacataatagcacacatatttggctgataataagaattatttaacgaacagtatgccaaaaataaatttcgcaaataaaaatctgaactatgtctttgtcattgttccccacccaattcttatattaatggaaaagatataatttgtgaagaagacatatctatcctgccttcctataaatttatgaaagaaagaatggctagatggatagacagacagacagagaaagatgtgtgtgtgcatcactaagtcaaaatattttcatgttcatgttctcaatgaagagcacttctgttatctttattgagggacagtttgcatatagcaaggttaccagtttcagtgtagtatttaatgatttctgaccatcgtatccagtcctataactcggtgctatgcctcatctaaagccacagtgtgaagtgactggccccttgagccacccccacttttctttgcaatcccttttccctacatccaggtctttggcaattgcccctgatctgctttcttcccttcagttttgcctctttctagacttgtgtaagattggaattacatagtaagtactctttccatttctattagcatttattaactgtacaaaataatgggtttcatcatggcattttacatgtgtatgtgacatgctttggttatcttcagtccccttctatcataccccgctgcccctcccacagtgctctccctccacctccaagctcctactttcattctgtgtctggcttctttcacttagcttactttctgagacccaatcccttgttgttgcaagggccagtaattaatttcactgcactgttgtgactgtgtcaatatatagaatgtgaaaacatactttggatattcagagttctttgaattctttgtaaattttatggcagtttattttctcctaatgagcttttgattgaggttgtattgaatctatccattgatttgaaagaattgacatcttaatattcagacacaaacacaaaataatttttcacttgctgacacccccccattggtttcgttaaattatgtgtagctaactatatattttgtgcgtttttggaatgtattttaaagtattctgaaattatattctcttacactgatataaaaaaggtagaagaattgctttcttaattttatttttgtgtttttattaatggcattgaaatttcagaccacatttattattttatcttgtgacttagatgaattaatttatcagtaaaattatttttttagtagatcagtcagaatttaatacattcaggcatacatccccttagaataaagataactccaattatctccttctaatgcaatacaagttttctttttcttgctgattcacttttcattgtgactctctgtactttattctcttccatataagcatttttaagagataaaaattattatcattattattataaaagcactactcagctatcataaatcaaaagctcatataattttttatcttattttactttatactaaatatacctctgactgccttttatgataaaattgcttttaaatcaagattatgacttcaaacttacctgtgtgtttcagagattcagtaggcagtgagaacttgcctccaataatgcaaagtttagaggttctgcatttgggatacaatggaatttgtaacttagtccagctacaacttaacagactgagaaacttaaagttcctctttctccagggtgagtagacatgctgcttgtaagtcctgtaaactggctgggttgtcatcttgctttgacaagcatgtgcaaacatcgttgattgttggcaacaaaaatttaatagtcacaattttttctttcattgtaaattattaaataacatcttaaggagtaattgattatatatactcattgtacctggtattattatgtaaggacattttcatacacatgtattatgttgtgtgtattctctatctcccttgtctcctccttctgtccccataagtcagtccctttgctgtctttgtttcacttataggaactctgttttcctgagactaccttagtttgcttaatgttattatctccagtagcatgtgtttcttgcaaagaatataatcttgttcttctttatgactgagaaatccattgcatgtttacccatcacattttcttagccatttctctgctgttgggcactttgggggtagtgaagaaaaagtaattgaggctcagtgtggctaaataataacccaaatttgcactggtgtgtaatggtaatcaggtaatctaaagcatatgtatttttgatccaaaataatatatattaatcacatattaatatacattatatactattatataatatatatattgttatattatgtgtcaatataagaatatattaatatatactaataatggcctggtccacagtggtagtaatagggaggtgtaaaggaaggaactattaggacacaggaacaagttagacagagcaaagggaaaggaaaggtagtccaagattagtaactggattaacagattgacaagagtggttgctaaggctacgtaaagttgtttgggaaaaggctgctcactagaggttagggaaagatcagtttgtgctacggttgagacataaaagtaaatgtcatttttagctttaaaaatcattaaatgaaggtgggtagataaacttaaattctggaagttggggctcacgcatcatgtcgtaactttaggaaatgagatcagtcaggtggaagggctggacaacctgatcgtcctccaggagctggtcgtcgaccataaccgcatccgggcctttaatgacaccgcgttttccaagccaagttccctgctgatgcttcatctagaggaaaacaggctgcgagaactaagcaaactgcagtctttggtcaaactggagaaactcttcctaggatataacaaaatccaggtaacattatttgagggtgctgtcgtttttgaggtctatgtatttgaaatcctctgatctcaacataaagcccccaaataaaccaattagaatgttatgtttatagctctttatcggcatgtcacaggcatgcactctattagggtactggatagagcctctctctacaggtatgagagttgatacagcctgttagagcttgtgtttggatcagcatcttggctaatgttgcttctgctctctgtacttctaaggcagtttcaaaggcagactaaactgtacactcccctagcccctgcaagaacaagtcctatgttcatctcgtctatgtttatattagcatagcccaaggtacatggtagacactagatgcttgacaaatattcgtctgaggtgctatttgagatacagttcataaagccttttctggaataatatgagatttctttccaaggttagaaggaaatcatgaataatgtctcttttaacggagcaagtaggaaaaatcttattgtaaaaaatagtgtacacctgattaatccagattcaaacaccaaacaccaatctaaggaaagccagaccacattggcagtgatcttaccaaaactttattcagaagaaatacaagtttggaaaaattggtattctatgggaaatatttctggcaacagcaggtgaccttaacaaatgagattcagagctgggggcagcaggtctgtggtagagcacgtgcctagtatgcccaaagaccaagcttaaacaagctcgtaaaaacaaatgagacctccacacagccatccatgacctcagctggtatcaggttttgcttatcagtccagtaattaatacttgaggccttggacattctattggtttcttagttatttcttcccataccacagaagctatctagctcagaataagagatgtggtctccaaaaataggttttatagagtggtctcagagtaggggagtgtttcatgaaacattctcatttacgcatagcttctgtaccatcttattagaagccttgtcattccgtagattccaggttaatttgactgtaaacagtttttgtccagagatctgttaagagaatgtcatgggtaaggaccctcctggaaatggcattgctttctgccaggatacccagttagcagcatacttaaaggagctaaccacaggtaaccagcttttcctctggatgcccttgctcacctgttgacacatattcctcataagggatggaggagctagtatctcagcttagtatgccagccccctcctcagcaacttgaacagaaccatgcttagtgtggtttactaccaaaatttaatacagctatctagtaaactgtgtgacaaatcagaagattatgcacacatcattgaaggaatggctgaggtttcttggttgttgaattattttagccttctatttttatcattgaaatggtattctccattgagtttaggtggattgtttcagatctgaacttacacttatgactgatgatattgtatgttagtgtgaccatatacagttaactggagggaaaatcaactctggggagtgagcatgggttggaaatttagttgaattcttctaaaaaaaacattttctttctaaacctggctgtccgtccaaagtttctttgagggagagatttttgttctctggattcataccgacttgggcaatctgatatcagtattatttctacaagtgagcactaaaaatacaatctctgggttagctaagaatgatagaacaagagaaagccctattaaaagcagtagtccttcagataaaggtagatgcggtccctcactgacctgcaggccatgctgcagagctttcaacttccccaatgtgcccgtaatgtcaactgagaagaatgtgacctattgccttgtttctaagaatcatcacaacacaaaagaagaccagcttcctggtcccgtttgagccctgtggctaggtgatccttctgcctgacatccagattctctgtgtacatttaaacatccgaacatacaatgaaggcaaaacacatacccactaaataaaaataaatctttttgaaatttgcaaaaactacaacattgcaaacttacactgatgttaagtgggtagtgataaatagtcctatgcagtatgacggacaaacatttaaccagagaaatcgttttttatctgtctgtctttcacagatagtgtatcagagtatagccaataatgcattcttctgttattagggttactaagccctaggaagacttaaacctcttccagaaaaagtttgcagttaccttgcaagttctgctcatttcccatgttgcagtgtgatctttgcgagtcagatattaggagtctagtccttattcacattcacatcagaggatccaagtataacctacctgaaacctaaaacctgcataaaacaacttcagaatagttaattttaggaggcgtcagctaaccaaatataattcattaccttttatataggatatcacagaactggaaaaacttgatgttattccttctctcagagagcttactgtctatggcaatccagtgagtatttatttacctttataacttactaatttcctaataatcatatgcaatttatcttaaatgatattagaaagtgatttgatctatttcaacatacatagctagctgaccaagcataaattgggcttagtgttgtctccacataactgtactgcagaccagctctgcctaatgtatgtgtgcatatcccattctgtgctgcagccctttggcttacctgctgttgctgtgctagtaatatcacagcatgttaatgtataaggttttacattgtcttaattcttattagagtgagtgtttctccttacccccctcttgcatctcttgcatccttttctttcttcactgtcttttccattcttggcaccttatacttttcctgggagctttaggaagcaaattaagttggagaagaatcttgttgatgctttaattaaaatgtacttatcttaagttaccttgggagacatctccacttttctcattggagtcttgcccatttaacatgtaagcaaactgggaaacatggcaaagaagagatggccctctggtcagtgtgctgagtgctcagggaagcccagcctaagaactgacagcaggagatgtaagactgaaaaggccacaaggtaggcaggtccgggatccccgagagcatgccaagggtcttgctccttatctaagctctcaatgcattgctgtcacagaaagctcgggctattctttccaacctccactgaatcgattgtgtcgcccctctgtggctgggatcaagttttgcttttgcattttactcctgataaatcttgctcacgccttgttcacagtgtgtcttcagggcaccatacatttctttaccagggatgttgtctgcgttctctttcaccaatacctactctttatcactttcttctcctagtttaatgaaatttttcaaagaaattcttcacttcatatctcttaatcttaattatttaaccttaatattacttttcaatgcatttctggatcagcaagttctaggttacattgtactgcgctaacaatgtcctgaaagcttttataggctgtgcctttactggtcttcatatctgaaagccttgtactctccagaagagtaaatttgtaaatagctgaggactgcacacgtttgtattctttttaaatctatggtgtgtttccagctataccctcatcgttttcctccagtgttggagcctttcaatcagaggaagcaagctctctgctctttggtatttatgaaaagtattttgtaacttagaatgtggccagcaatttgtttggctgctacgtgtgttagaggtctttctcagtcaatgaacatggccctaccacattcacttcaagaggtttgtttatttcctttgtctcttcctttcttcctttcttcctttccttctttttttctttgtttttgtttttatttttaatttcagcttgctctgtaactcactttataaaccaggttggcctataattcacagaaagcttcctgctttaacctctagagtaccagaattctaggcatgagccagcaggcccagcttacccattcatctccaagagtttgttgttgtttgccgttacagatggtgctgtatactttctatattaggagtcctcaagatgaccactacttcagagatttgggagagagattcagtcagcatgctttccttgtggctaagatagtaaggacacacagctaagatcaatggtaacgccatagtaagaacacaaactcacagtctatgagggaaagaaaggtagaggctgaaggaatctgcatgtatatttccttattcattcttcccatggcgtgaacacagcacactcttcatttagacacaaaaatggcatgccttgcgtgttgtttttattcaagggagccccttagagacttagcatttaacgattgaaagttcattatataggcaccctttccgaccaagaactgaaactttccagatggaaaagaggttgaatacaaatcctactgttttatcaattatcaagacatagctaactacgcttatcaagcaaggaatgataagaacaaccccaagtccaagtaccgaacagcaggaaagagccagccttgtgagcagaactctctaaaagtaaacaccctgcggccgctctactcaagtctgcctgcccttttatggacatgcacaattttttagagcaggttaacactatgaagagatggatcatacagacagaagatgttgaattaagtgaaatgggaccttttggaaaacctcacattaaaccaattacatagaaatgaagttgcatataattaattctgcccgtgagttgaggttgtgctagctagtgatcagtgctaaggactttacaggggtgacagtctgagtgtggtggtggcgtgcatctgtgttactacaacactgaggaggctgagacaagaggattatttttttcaaaccagactgggatacatggagatcagggaaagacaaggggagggaagggaaggagatgagaaggagacaggaaaggagaaagactaatgccagccttaattttaaaatgttttctatttttatctggtattacagaagattgagaaatctttaaggaagaagcgcctgcctgtagcagttagcactgtaaagaagccattctccatcatctttgtggccattcccaagctgccttcttttgaagtctttttctttgggggaataaacgattgtttttacctttctttagatttgtaggaaaatggttcatcgacatgtgctcatattccgcctgcctaatttacagatgttggatggaattcctataaattctgatgatagggcaaaagctgagtttcatttctctgaactacaagcaaaaaaaagttcggtaagtatacagtgtacacttttctttttactgtagactattgtaaatgagcattacatcatgggcattttgacttaactttattaagcacacgtgattctgtaaattatagtatttacttaatgactactatcaatagaaactttttcctagtaagacattgatataaggcaaatgatttaatatttcactgttcagtacttcaaatgacattagaaggtaaaaaactgggacatgccatgtttatagaaactaactgtaaaactgcttcaatttaagcatagagcaaggaaggaattatcactcaactctctggactgcagagttcatgtaacagaggcatgtgctgctattctagatgttcaggatcactgggctctttacccatgagccctaaaatatacctgaccatagaggaaacagcagaaataggattttagggattttatcattagtcttttatttgttctgatcaatctctaaataatgtatttaacacggaaagatggtggtttttcttttttctttttttaacagaaatgtagaattattagagttgagcttttgcaagtttgaagaagagacaggagtagagagggaagccagctgaaacttttaaagtcatccaaaaaaatggcacaatgaccttgagcaggtgcggaggggatgtgcaattgaacctttcactagaagcaaaaatccagggacattagagtcaaggatccaaggttacattaagaacaggatcttcactcggaagcagaggcaggcagaatgctgagtgtgaggctggcctggtctagagagtgacaaccagggtcacacagagaaaccctgtcttgaaacaataaaggacaaaaggctctagaagaagaactggtgaggtgaggtcatgaggtcactccagatggacgccctcccatgaggctttcactccatcccaggattaacacacgctgatggacggctcccctccacccttcagtacaaaaatggtgcttctgttcctatgagcgcttctagcttacttctcccttcagcaagagtcacatactcatagagagatggttttgtgtcacatactctagaaagatggctttcaaaaaaaaaaacctgctgtgtggtgttatactaagtcaacagatgaaatgtaagttcaaattttaagttaggagttctatgttaatatgaaaaccaaattcaatactttgagaaatctggagaaagaataaccatagacacacaatgccaaactggatgagggatttaaaaaataactataaaatgcaggagagaagacacagatttagagagaactaacttttaagcctagacaatttattgtctctaaattttcttcatatctttaaaagtgtatgctgttttaaagaaaccagcagaagaagtgatgtgcaaaatcttaaagaacaaagacccttgcttagataatggccttgaccaggcatggtggcacatacctgtaaccaccacacctgggagacaggaagatcaggagtttaaagtcatccttgccagggcctacctgagaacttgcctcaaaaaggcaggagatttcttcttcatcaaacatatgcaatttgaaaaatgttgtcaaaagataaatatgtattatatgtgtgctttg

SEQ ID NO: 312 - DNA, 3689 bp, Mus musculus
gaaggggaaccgtcttatgacctcactgctccacgccatgctggggatcaagaccagttagtactgctgacttcgaggctccaggtgtcaaaaactttaactgtgaaaatgccaggaccaggtccccaccgcctagcccacaaactgtcactgtcctcggaaggaaacaaagtgaacacccaagactaagaactaggcagcgaccggctgccaccgctccgcgggagtcttaacaaagatatattagtgtgaccattgtttttaatggaagatgattgaaagtgaaaacctaaatcgaggtgaaatcattaaagaactgtgtctgtgcaatggcttaacttatgagatcgttggacaggaaggatcagatacttcaaaactggagatgtttttctcagggtatccccgaatagttggattatcattgtttcataatttatcaagtcttacaattgttgctcaagatataagggaaatttcagggttggagacttgcttacagcttaaagaactttggattgctgaatgctgcatagagggcttgcagactttgaagaatctaaaagacctcaaccttgcaggaaacttagtcagcagcattggtcgatgtcttgatcccaatgaacaactggaaaaactaaacctttctggaaatcaaattacttccttcaaggaccttactaacttgaccaagctcactcacttaaaggacttgtgtctgaacgacccccagtataagtccaaccccgtgtgtcagctgtgtaactattccacccacgtgctctaccacttgccgtctctccaacgactcgacacgtttgacgtatcagcaaagcaaatcaaggagctggcggattccacagcaatgaaaaaaataatgtattataacatgcgaataaaaactgttcagagacatctgaatgaagaacttgaaaaactaaatgacagaaaatgcaagttacagaagctacccgaagaacggataaaattattcaactttgcaaagaaaacgttagaacgggaactggctgaactcaagatctctagcaaagggcagagcgatacaacgccggaggccgagaaaccccggaatagtgaggttgtcacacaggaatcagttctgcagcagaagatactgaccaagctgagcgctctggatgacagagttacattctggaacaagaaactgcatgagattgaagcgatttatcggactgaagtaaaacagaagaagaagactcacggcttactgaccccgtttctgctaactgagctggagactgtgggcaatatccattttgaagaaggcactcaggctgatgactggtttaactcctgctgtgaactaatcctgtcgcgtttctgcacctgggacttcagagcgtacggcatcacgggggtgaaggtgaagcgggtcattaaagtcaacaaccgtattctgaggctgaagtttgaagagaaattccaaaagtgtttggatcttgaagacacacaagatccggagagttaccggaagatgctggagtgccttttctacgtctttgatcccgaagtgactgtaaagaagaagcatctgctacagatacttgaaaggggattcaaagacagcgacacaagcaagccctctctcaaaaaggaagccgtcactcttgtgaacagcctcagtatgtgtgagtgtccccggatagagttcctccagcagaaatacaaggaggagaagaaaggcccctcagagagtgaactctacagacatggcaccatcctcattgcgaaggtttttcttggccagagtattcaggctcgtgaccaggagcccatcaataaagccaactatcccatggttaactcggtgtttgttcctcagagacatgtgctaaattctatcataggacaaagaacttgcgactgtggctaccggcagtacaaatggtttgtcttcgaccatgacctcgttttgccagagtacatcgttgaatttgagtacactacagtggtcaaagttcactctttattttctacatcaaacaacgttattctagaggaaggcaaaaagtattctgaaggattagtattctcacaggatttgaaatttgatgatgaagttctgaagatggaacccaggattaagccccgcccaaaactcattagtttggatgagaagactataatttcccttgctaagactaatatttacagccatattgtgaatctgaatctacacgggaatagcttgagtaaactgagagatcttgccaagctaactgggcttcggaagctgaacattagcttcaatgagtttacttgcttagatgatgtgtaccacttgtacaaccttgagtatttggacgccagccataaccatgtgataaccctagagggattcagaggcctgatgaaactgaagcatttggacttgagctggaaccagctgaagaagactggggaagagatcaatgtgctgtgcaaacacaccaccagccttctcacccttgacattcagcacaacccctggcagaagcattccagttctaaagaggaaaggcctcggatgctcagtacatggccctctgccaaaatcctgacccagatttccaagctgggaccccactttcacctgaccgggaactggtactcaaagataactgccttaaatttagatggacaacatctctttgaaatcacaaatctagaaaaattggagaatttgaaatgggcatcgttcagcaataataacctctccaaaatggaaggccttgagtcctgtgtcaacctggaggagctcacattagacggcaactgcatctcaaagatagaaggcatcaccaggctgacaaagttaagccgcctcagcatgaacaacaaccttctcacgggcctggagaagcacacgtttgataacctgcttcaccttcactccctctctctggagaacaacaggatcacatctctgagcgcgttacagaagaccttcactctgatcgagttgtacataagcaacaactacatagctgtgaaccaggagatctacaacttaaagggtttatgcaacttggtcattctagacatgtatggaaacattattatatggaaccaagaaaactaccggttctttgtaatatttcatcttccagaactgaaagccttggatggagtctcaattgagacatcagagacagagactgcaaaagatttgtttggtggacggcttacctctgacatgattgccgaacgacaaggacactcaaactttatccaaatgcaagagctaaactggacttcatcagccatcaggaccgtggatctgattcctgtcgaccacttcaggaatgtgagcaacgtgaatctccagaacaacaacctcacctcgttcagcggcctcatctacctgcccaacgtgaaggcacgtcttatgcctcaactacaatcacattgaatcaattatgcctagactaaagcctcagacccacttaagcagcagacagctgctctaccagaaagtgccctcaagtggctacggacagcaaggaacctcaaaactaaataggtactttaaaaaaaaaatcttttatttttcacacttaaaaacaaccagagaagtaacacataatagcacacatatttggctgataataagaattatttaacgaacagtatgccaaaaataaatttcgcaaataaaaatctgaact

SEQ ID NO: 313 - protein, 1051 aa, Mus musculus
WKMIESENLNRGEIIKELCLCNGLTYEIVGQEGSDTSKLEMFFSGYPRIVGLSLFHNLSSLTIVAQDIREISGLETCLQLKELWIAECCIEGLQTLKNLKDLNLAGNLVSSIGRCLDPNEQLEKLNLSGNQITSFKDLTNLTKLTHLKDLCLNDPQYKSNPVCQLCNYSTHVLYHLPSLQRLDTFDVSAKQIKELADSTAMKKIMYYNMRIKTVQRHLNEELEKLNDRKCKLQKLPEERIKLFNFAKKTLERELAELKISSKGQSDTTPEAEKPRNSEVVTQESVLQQKILTKLSALDDRVTFWNKKLHEIEAIYRTEVKQKKKTHGLLTPFLLTELETVGNIHFEEGTQADDWFNSCCELILSRFCTWDFRAYGITGVKVKRVIKVNNRILRLKFEEKFQKCLDLEDTQDPESYRKMLECLFYVFDPEVTVKKKHLLQIRGFKDSDTSKPSLKKEAVTLVNSLSMCECPRIEFLQQKYKEEKKGPSESELYRHGTILIAKVFLGQSIQARDQEPINKANYPMVNSVFVPQRHVLNSIIGQRTCDCGYRQYKWFVFDHDLVLPEYIVEFEYTTVVKVHSLFSTSNNVIEGKKYSEGLVFSQDLKFDDEVLKMEPRIKPRPKLISLDEKTIISLAKTNIYSHIVNLNLHGNSLSKLRDLAKLTGLRKLNISFNEFTCLDDVYHLYNLEYLDASHNHVITLEGFRGLMKLKHLDLSWNQLKKTGEEINVLCKHTTSLLTLDIQHNPWQKHSSSKEERPRMLSTWPSAKILTQISKLGPHFHLTGNWYSKITALNLDGQHLFEITNLEKLENLKWASFSNNNLSKMEGLESCVNLEELTLDGNCISKIEGITRLTKLSRLSMNNNLLTGLEKHTFDNLLHLHSLSLENNRITSLSALQKTFTLIELYISNNYIAVNQEIYNLKGLCNLVILDMYGNIIIWNQENYRFFVIFHLPELKALDGVSIETSETETAKDLFGGRLTSDMIAERQGHSNFIQMQELNWTSSAIRTVDLIPVDHFRNVSNVNLQNNNLTSFSGLIYLPNVKARLMPQLQSH

SEQ ID NO: 314 - DNA, 110469 bp, Homo sapiens
ttagctctctcctagtctttcactggtcaggaaaatcccaatagattcctaaaaatatactttgataatgtttatactttcatcccagagctggacccctcaaattaagaaacttagtgtagataattcgctgaactggtttctgttcaaatttctatgtctagaagtgtagaaatctcaactattatgttctaattcatctttatactctatgaagaaaacttccccaaagacaggtcaccttgttcaactacatttcagagaagataatagtaaaagtaaaaactatgaatctgacttttctggcattagtttgaaacccctaagccacaaataactttaattagcttatttcgaattatctattaatgacagatagaaacaattttctgtgaaataagaatgtagagggaaaaccagttaatttttgtttatgtatctttacaaacggtctatattacagataaagttaattgaataaaggcaaatatgctgaaattgttgacaattgttaaatgagaatattcctaaaatctgaactttttcttgggaaagcagttcaaaactatagtctatttaatgaggtggccatctggtgacagaaagaagcactacagacaatattttgcattaacatcacaactattctacacaaaccgactgaaccacataaaagagagcacagtccaaaagaaacataattcaagtcatacatgcaatttaaaatttatctaacagccgcattttcaaaatagaaacaataattttaacaatattttttatttaacccaatgtatcaaaaatattatttcaacatttaatcaatatgaagattaataacgaaagagtttatttttttcatactaagccttcaaaatacaatgcgtaccttacagcacatgtcaatttggacaagccacatttcaagcgatcatgggccctgcgagtctgtgggtagcggctcaccctgctggactgcgcagatccagagaacgacacgagacctgcggttgctttggtttgccttttactaagttcatttctcagcctctctgcccactctgaaaagtctcccctttccccccttttaattctactctattttgtaaattactgttgtctcctgaaaattttggaatgcttaaaaggcactcaaaagcctgtccgagatcgactagaagaccctcggaaggtccctctcttctctggacctcactgggcgttcgtttgcccgcgccgtccttccattcggcttgccgggcgcgcagcggcttgcggctgtggtcagccaccttcccgggaggcggtggtcgctggccgcgggaaggatgccgcgctgggggtcggggttcgtcccggctgtcacgccaccttgtgacatcacagggccatgccctcggggctcaaggccagagaggctccgcgcttccaggacccgagagctaaagataatgaatgggagagagcgagactggaggaggtaacgaataagtccccaccaccttgcccataacgcgttgctttcagtcacgttccgcgaactggcgaaggtaagtgaaaagataagcgcaggtacagaaaaacctgccagcgagaagctcccgccgtttcccaggagccccaggtggggtcttccggttggacccctgcttccgctgattggttggaggtcgccaccacgtgatgcaaacccgggtcggcctccgcttcccccccacccttttatccccctccccgccccttttctcctcctccccacccggaggtcgccggaggcggagatcaggttacctaggcaaccgccacaggcagtctgtacacaccaggcctggggcgggagagggtttcctaccttctgctgcaagacagggattgggaaatcggagtggactcggacttgaatcggattgccccggaatccaccctctctctgtgataaggtcagaatccgtcacctggtggccttcgggcgtacatcaccgggagtctttgatcccctctttttccttccaagccataccaaggggaagacgccagtgaagcaaagttgaggtcaagggaactccgtaatggtgcaatggtgatgataatgatgaaagacagtgaggtggctttactgaggcagtcagggtaccagaacaaagttcaagagaaggaaagggagggtggcctacagccaactatgcagattttactgcaccaattaagattctgggctggaaaaaccaagtgctccctaaccaaacctgacactgctcatctagagagtgtagggggtttatttggactatcagtggtaactgatggattctgatccttttatacccaaaggaggaaataatttgacccatacaggacttctactgggcagagaaaaaaaaagttttctcagaatgacatcctaaccaactctcacggcagacagaaaccatggtcctttttactctatcattatactctggtcatggagaacgattatgtctttaaattataccatatgcctgtggcatgacaattaacccattaaacaatttttttaacaactagcatgtgccagacagtgaacctgtgataggttcacagtttctgccttcaatgaacatgtaacctagtagggaagaaaggcccgtaaacattgttttacagtgtgacaagtgctatacaaagagtatgtgcaagccctaaccagaatcacaagaaagagaatgcttataatactaccagagagaatgaaagtcttcaaagagaagatctttgatttaaatctttagggaagtatggagtatgccatacagccaagggaaaaggacattttagggagaggaaacagcccatgccaaagtacagaaacatccattcagttccagagaactatagttgtggcctgaacctagggtcctctgtggaggttgtggctgatgagcatgtgaggtaggcaggagtcagagcatggaaaccattaataccttccaaaggggtaaagcatgagcagatttacctttcaggaggctgtcacagtagtgtagaggatgaacttgagggaagacagactacagggaggacatcaagttaaggggaggtgatgagggcctgaaccaaggcagaggcaattggaatgaggaggaggaaaaaaaatgtggtaagacctttaagaggtatatgcagaaggatttaatgagtgaatgaaaatagggggatagagtcaaagattggttgaggataatagctcaaccaatagaagaatggtggtgttacttttcaagagaaggcatacattaggagaaggaggctggttggaaaatataatgagttcaattttgaacacactgaatttgagatgcctgtggcacattcagatggagctttttcatgtgggcagttggatttttttttttttttttttttgcacagaaaagaagataaggatttttcaccatgaagaaaacaattggtttgaaaagcacaaagtaggccaggcacggtggctcatgcctgtaatcccagcactttgggaagccgaggcgggtggatcacaaggtcaggagttcgagattagcctggccaatatggtgaaaccctgtctctactaaaaatacaaaaattagccgggtgtgatggcacgcgcctgtagtgccagctacttgggaggctgaggcagaagaattacttgaacctgggaggcagaggttggagtgagcccagattgtgccactgcagtcaagcctgggcagcaaagtgagattctgtctcaaaaaaaaaataaataaataaataagaaagaaaaaagaaaagaagaaaagcacaaagtaagtttgaaataacaagtagagagaagccaaggagaaaagttgaaccaaagaagaaaacgtgaagaagagagtcgtcagcattgtcaaatgccatgtcaaggtcaagttgagaatcaaaacatgtccgctgtctttggccattagaaggttatttttgaccttgtagtggcttgaggtgttctcagtccagatggcagtgaatccaggactgaaagcaggtagtgatgtgttgctaatgattatctaaaaggtgtaccataaaggtatctaaaaacagctattcatagaagaatataggagagactttttaagataggaaagacttaatatttatatacagaaataaaggagaccgttgacaaggaaatttggcaataaatgaaagaggaaaatttgacagcagtattctgaaagagacagataaggataggatcaatacataggaaaagggatttgttttggacaaaaggaagaacacctactaagacaggagtcagaagggaaagaaaaatacgtctttgagaggagggaaataagaaacatacatttgatggcaccactgttctctgtgaaaatggggtcaagatcatctactgagagagagaccttgaaaagagtggtgaaagtttagaatagtaatgtcatgaatctcgagtctctagtcccactctcctaggagaggaaattgaggaaaatataaaacatttgttgctgaagatctaactgaagttagaggcaatgcatttgtagtgacttcagctccatgctggttaggtgaaattttccagtagcaatccaaagtggaaagattaatcctatgcagtttgaggtgtaaaagctatagaagttcctggtggcttctggttttgtgggggaactagagatgacctttagcctcttaaatgggccagccctgaaagagcttcgaagagcaggagagtagttacaagctggccaacaggacattcacctcttgatgaattcagtaacttcatctggaacccttgagtccatttgtgactggagaaaacatacaagacttgtaagtaccaggaaggcctagcatccttgtgattcagaaatagttatacaacttatagaatttggggtttttaaattaaattgtatttttctaattagctgttgaattagaataagattttctgctaaataagtgcattgatgaagagaaaataagttgaagtgagaggtaagatttgtatcccaaataggcatatttttcttccaaggaaaagtagtctcaagtaaatggagagctatcccttgttcttgaggatgactcaaaactgtaatatggaagttctccctaaattaatctttacaatgcaacctcaaccaaaatcccaactgcattttttaaaactaaatacaaaataatcctaaattttatttggaaaaataaatatggaagaatatccaggaaactgccaaaaaagaacatgaggtgggaatttaaaatataaatcacagtaattaaaacagatacagtcaggcgaggtggctcacgcctgtaggctcacgcctcccagcactctgggaagctgaggtgggtggatcacgaggtctggagatcaagaccatcctggctaacacggtgaaaccccgtctctactaaaaatacaaaaaaattagccgggcgtggtggcaggcgcctatagttccagcgactccgaaggctgaggcaggagtatggcgtgaacccgggaggtggagcttgcagtgagctgagatcgcgccactgcactgtactccagcctgggagacagagcaagactccgtcttaaaacaacaataacaacaacaaaaaacagatactcgtgcaggaatagtcagagctaatgaaaaacacagactagaaagtccaaaattaggccccagtgtatgtgatcatttagaatataacaaagagaatgatttaattccttctacaatagttatcttggacaaaggcaagataacttagaacaccatttggtgaatttggagctttgaagggaagcgtttgtcctttgtgtggtggtgggcagctaggctatcctttggtaatcacagactttaatccagtatataagggtttctctttccacgagtagaggtgctgcaaaacactttttaagcttggtgcactattcaaataaacctggagaggtaagactatggcctgcatctatgtatgggcctttgatggagcttccaaattctttcaggttgctttcttgactggcttctcttgcagcctatgctgtaatatcctgaggttgtccaagaatggagtaaagatgaaattgccaatgggaagcagggaaggaatgcgcggcatttccttcaatatagacccatcatctaaccactgtctccactgcctctaccaccaccctactccaatcaccatcctctcccacttacattattacaactgcccattaactagtctccctgcttttgctccaaaccctacaatctattttaaatacagcaaccagagtgatctttttcaatacttatgacagttcttgttactcttcaactcaaatcctcatatagcttttcatcttaccataataaaatacaaaatcctcacagagttctacaagatagcacatgatttggccctgaaatacctctctgacctcacatcctaccattatttatttctctcagtgtactccaggcacataattttccttgctattctgcaaacataccaagtatactctcactgccccccatcccagcttttttttttttttccatttgctgtttcctttgcctgtatgcattttctccagattcccgcatggctcacactcacactcccttatgtccttcatttctttgcccagattccaccttatcatctgataaggtcctgatcttctctttcctcccaccgctgtcattctctgtctggggttctgtcttatgccttcaatatgaatattaacaaagagtcaatgaatgaacaaagagtccaatgtattaggataatttgctggctgtatttttctttgtggtgctagcttgggtcccatccctccttcttgactcagtgtcttcgtccattttgtgctgctataataaaatacctgaaaatgggcaatttaaaaacaacagaaatgtatttctcacaggtctagaggctaggaagtctaagatcaaggcatcagcatctggtgtctgcttccacgatgatgccttgaagtctgcctcctctggagagaaggaacagtatgtactcacatggccaagtcagaagggcaaaaaagggatgaactttctccatcaagccctttaaatgcacagctaatgggcagctaatgccatttggaaggggaggagccctcataaccaaattacctcttaaaggcccacctcttaatactatcatattggcaacacctgaagtttgaaggggacacattcaaaccgtagcattcagcatggtagggcaatgtcctcaatttacaaagcatgagtacaaatacagactgtgtgcaattttctggtgcatttctcaaactcctttgatttggtcccttatatataatacacagctaccccttcccaaccactgcttctctcaatttgaagattttttagaattgtttggtgaaacttctttccctggtaccttgaattttggtctgtaatatggtttggctgtgcccccacccaaaatttcatcttgaattgtaataatccccacatttcaagggcgagactaggtggacataattgaatcatgggggcagtttcccccatgtgttcttgtgatagtgaattctcacaagatctgatgattctacaaggggcttcccccttcactcagctctcattctgtctcttgctgccatgtgaagaaggttggtttgcttccccttctgctgtaattataagtttcctgaggccttcccagccatatgaaactgtgagtcaattaaacctctttcctttataaattatccagtctcgggcatgtgtttattagcaatgtgagaacagactctggtttgtgttaatgggcttttttctcaatctgatgttgtctgtgtcatatttaaagacttctctcaatatttctggcaatcattgctctttttgtagcactgctatattcttttcttgttttcatatttctgtagtcattctagtgagatttggggagggaagataggtaaatacatggactcaaatcatcatcttttttcttaacattttaatttatgtatatgccagcacatgtacataatttagcataaatgaataaaaatgagcatataaatgcctttaaaataaaaatttaagtagaatttcattgaagtatagcatacatccagaaatcacacacatcataggtatctaattttattttcaaattgaacataaccagcacctagatcaaataatacattgttatgaacactctataagcccctctttttgcctcctcttagttgctcttccctgaaaggtaaccaatatcctaacttctaacactacagtttgttttaaaatcttacatgaattgagtcatactcattatgagtattactcattgtgtgtctcttcttttgttcaacatttgtttacgtgaaactcacttatgttgcaaataacagtagttgtttctttctcattccacttttaggtagaaaccccaaagaaatttgtagctatgacctgtatgacaaaatgttcagagaagcactatttaacccccaactggaaacagtcaaaatgtgtacccatagtagaaataataaataaatgtctatacattcatactaggcaattctaaacatgcttttttaaaagtatcattttttcttttccatttttgcctagatctctcccatccagctttacatttgtattctggccacaaaggctttcacctgcatctaaggaaactcatattaacaacttagtatatatctttccatattttctcctgacaataattatacatatacatgcatttacatatatacacatgtatacacacatgcctatgggggagttgttattgtaaagaaagggattatactgtataccattttctaaatctcgctttgtcagttcattatattaaaggcaggattcttatattttttagatagtatgtatctggaataatatacagaaaatattacaaattatgaaagttggattaagtttcatccaactgaagtattagttggttcatattctctagaatgaaggagaagttggagtatttattttaataaacacttattactatgccaaaaatgttgctaagccctaaggattcttctctttgcagtctaggtatacttagagaactgtgttcacgtttagacaccgcagtgtaatacaaaggacaactagagcctgttcaaaggagagaaacatgagtatatagtgagagaactaacaacttgaactgggagtaagataagagtgtagatgagagatgaccattttcttcaagtattgaaggctcatcgtgtggaaaaaaagttataccgaggaggtatactgacaacaaaagggaaggaattatggagagagagatttaaaattaaaataaaaaataacctcctaacagaaaactccctcagagtttatacagatacttggtaatatactatgtgaagatttcaaactacagttgggtggttcaacctcagtagctttaaggtctatttcaacttggaatgacaatgactttaatatttatttcattttttcattttccttaaaagttataatattatgatcactgtttttaatggaagatgattgaaagtgaaaacctaaaccaagaagaaataattaaagaactggtgagtcaaagtcaaatttcttttaaataacatttgcagtaatataaaatggaaagtttttatgctcctttctagagctggaagggttacttagtcatttcctctacctagtgactttgggaagcagagaataatcatatatgtgatataactttctctcttgtgagattataaaaatggcatcagtgcagttgacaatttataatttctaatggtaaaagtcatcttttaattatttaaaataggtaatgaccaaatttctttcctttaaaacagtgtttgtgcaatggcttatcttatgagatggttggacaagaaggatcagatacatcaaagttggagatgtttttcttagggtatcctcgtatagttggattatcattatttcctaatttaacgagtcttaccattgttgctcaagatataaaagaaatttcagggttagagccttgtttacaacttaaagaactttggattgctgagtgctgcatagaggtaagtgtaaacataaaacctcacatggagtattttattctgaattatttggctttagaaaaataattcattgaaatatatgcataaggcatgggttaagacagataaatgaacaaaggctagaaattgatttgtacaaaggaaaaaataaaaataaggaattagaacataaacatattctactttttagtaatcaaagcaaatcaaatcaaaacagcatgttactgttacaaaacagacacatagaccaatggaacagaataaagaacccagaaataaggccacacacctacaactatctgatcttcgacaaagatgacaaaaacgagcaatggggaaaggaccatctattcaatatatggtgctgggataactggaccgccatatacagaagattgaaactgtacctcttccttataccatatacaaaattaaactcaaaaataattaaggacttaaatgtaaaacccaatataaaaaccctggaacaccacctatgcaatatcattctggacataagaacaggcaaatatttcatgacgaaaacaccaaaagctattgcaacaaaagcaaaaatggacaaatgggatctaattaaactaaagagcttctgcaggagcaaaagaaactatcaacagggtaaacagacaatatacagaatgggagaaaatttttgcaaaatatgctttgacaaaggtataaatacccagcatctataaggaacctaaacaaatttacaagaaaaaaacaaacaaccccattaaaaagtgggcaaaggacatgaacagacactttgcaaaagaagacatacatgtggctaacaagcataagaaaaaaagtttaaaataactgatcattagagaaatgcaaatcaaaatcacactgagatactatctcacactaagacagaatggctattattaaaaagtcaaaaaaaaaaataacagatgctggcaaagttgtggagaaaaaggaatgtttatacactgttggtggaagtgtgaattagttcaacattgtggagaacagtgtaatgattcctcaaagacctaaaaacagaaataccattcaacccagcaattccattactgggtatatacccaaagtaatataaaccattctatcataaacacacatgcacgtgtatgttcattacagcagtattcactagcaaagacatggaatcaacctaaatgcccatcagtagtagactggataaagaaactgtggtacatatacaccatggaataccatgcagccataaaaaagaacaagataatgtcctttgcaggaacatggatggagctggaggccattgtccttagcaaactaacccaggaacagaaaagcaaataccacctgttctcatttagaagtgggagctaaatgatgataacacatggacacatagaggggaacgacagactctggggcctactgaaggtggagggtgggagaaggatcaggaaaaataactaatgggtactatgcttaatacgtgggtgataaagtaatctgtacaacaaacccccatgacagaaatttacctaaataacaaacctgcacatgcacccctgaacttaaaataaaagttcaataaataaataaattgatttgtgcaaaggaaaaacagaaataagggattaaaacataaacatattctactttttagtaatcaaatcataaccagtactacgtagtaataaaattggtccacttagacactattggctgtgttgaaattataacatctattttgaaaagaaatattgcaaaacatcaagagccatcacagaaatgcacagggcatacgttttgtcttagaagtccctacactaagattttatcctagaaaagttaactcaatagcagaaaacaaccatatgcacgaagctacttgttgcagcattatttataactaaaaatttgaaacataaatatgccatacatcaggtaatttttcagaaaattattataaacttgaaatatttcataattattaaatataatttgaaggattatgaaaacattttagtcttaatttaaagagtcccacaaaattgtgtgtgcattaggattataaagtgcttacattgttataatcataaccatatgatcataatcatttctatatgattataatcataaccatatagaaatatgatatgtgatatatatgattacaattataaccatatataaatagatatagggttgatcaaaatttaaagagaacatgcaaaattgaaaatagttgtatttaaatggaaaacatggaatatatttttttcttttaaaacagttcattttgctggatattgattttgcaataaaatatgatatttaaaagaaaatatacttagaaacctacttcattggaaggattaatagcaaaacataaactaacattattcagtctccttttcttttacagaaaattgaaggtcttcaagaatgtagaaatttggaaaaactatatttatattttaataaaatttccaaaatagaaaatttagagaaattaatcaaattgaaggttctttggctgaaccacaatacaattaaaaatattgaggtaagataataatttcaattatctatatgtaaagccagttactactgtagagtttaaaccacaatgttcaagatcatattgtggttaaaggccaaactattcttgactagtacaattattgttgtcaaaaagaactaacatgtatatagcattttataaggtacagagggcattgtgtacattactttctttactctttacaaggctaagaggtagggcattgttattctttctttgaaggtttaaaaataaaaagaggtttagataagttacataacttgcctaagattataaatatactctgtgtgatgtattctttttcctcctactcctccttttttcctctctactccgcttcctgttccctcctccaataattctgagttccagtatagagaacaaaggtggcttcttggaggcactcatttccttctgtgcttgtggagtacaaagtaccctgtgctcagagcacctgcagaactaaccagattaatcagagatgatttgtaaatgttaattttaattatctgttctaaataatatgttgtctaaatttttagggtttgcaaactttgaagaatttaaaagatctcaaccttgctggaaatctaataaatagcattggtatgtactatttcatttggaatctgagataatgctataatcattttttatcaatataaaaagtacatgcttagattttttttcttttaggcttttttctgtgacatatttgcaaagcatattgaaacctgtgaaaatattactcattaatcagtggttactaattatacaatggtaccattagtctatttatatgcaagaaacgatggctacatacaactcagaagtatgacagaatatgaacagaaggtaaaataattgaattcttttcgtctattttttaaaggtcgatgtcttgactccaatgaacaactggaaagattaaacctttctggtaaccaaatatgttctttcaaggtatgtttaagtggaataattaatttttatttatcatcctgaatcatgaaccattgtgttgcagaaactgtactaaaaagtcccccattaaggaataagttcattattttgggctgatgctccaggaaatttgaaagtcatctgactacattggccttaatgatctgacactattaaaaccaaacaaataactatttacctggctcttaggataccattttctcttagttttcttccaatctttctggctacatctcttcagtttctgttctttcatcctctcctagcatctaagatatggactgcccttggtcagtactgacatcttttctcatttctgtctgcattcattctctaaataatctcatcatgccttaagactttaaataccgtttatctaccctttaaactagtacctttactttccttaacaactctccagaactgtacacatatcttaatgcaaactaatttttcctctaccaggccttctcctgcagtcttcctcacctctctaaatggagtctccattcttgcagtaacttaagccaaaatccttacagtcatttgtgactcttcttattccttcataccctcatccaatccatcagcaagtacaactgggtgcaccttcagaatatgtccagagtctgatcacttcttaccatctgcatcactaccaagctgattcaagacactatcatctctaacctgcattaatgaaaaatatcttcctaacaatttttcctgtgtttgtcctttccctactatagatctgttctccacacagaagcctgatggaacctttaaaaatctgtcagataaaaatcacccttctgcttaaaaccctccgtcgccttctcatctatttcagagtagaagacatttcatataatggggccataagactacctaatctagccaccccaccacccctacctatctctttgactacagtttctaccactctctcctttgtccagtttcagccacactggtctgaatacacctagcacacagtaatcttatggcctttgcacttgctggaattttctttcctcatatacctgcatggctcatttcatcgtttatttcaagtctttttcaaaatattgtgttgtaagtgacacctttccctcccaatttaggtgtaataggaaaaccgtcacaacctccccaacctgcagcactccctatcacagtgccactgtttcatttttccttttggcacatcccttactagaataccagctctctgagtacaggaactttgcctgttctcttcattgctgtatccacaatccttaacacagtgttggacatgtagtaaatctcaataaacatttgtcaagaacatgaatgaaagagaaacaaccaaataaagggacttaatgtttatcacatataatgttggttaaaaggtggcatttataattttgccagtgtaagattgaaggtgcatattcaaacacatcctctagaaaatactgaagaaagataggtaaatttactatagaaataattttgagttcataagtattaaagtaggcattcttttactcaggcaaaaatataaaaataccaaaaagctatagaatgaggcagattaagtcccttaaaaagaaatgtaaacaaaattgtattagtcaaattcaagaggaaatatttgataagaactttgaagtgtcaacagaatttgaacaagcattggtgggaggatcttctgggtagcagggcgtgggcattctaagacggggaaaacaatatgtacaaaggcagggaagtgagaaatcaaggggtatatttgaataacaccagcattgtcatttgactggagtatagagtatatatagcaatattggaagttaacactagaaaggtcaattgggtctcgaatatagactgtattttatagacaacagagagctgtaaaatttttgagcaagaaagtgatatgatcagaaatgttctttagggatagtgatctggagttagtgtttattgatttggaacagctagaagaagaaaacccagtcaggagattccaggaataatctaaatgagaaattatgagactatgaattggagtgttaacagaaaaaaaaagaaaaaaagaagaggaggaggaggaaagacgaggaagaaatagatgcaagagacattatggttgttgaatttgcagaatttcacagctagtagaatgtgaagagctagagagtccaaaatgaatccgtgattacagttcttagcaagctcaaaaaatacacaaatcagaaaaaaaatagctagtttggtgggggtgaggggaagagaatgtatctggttctggatatgttgagtttagaataccagtggggccatccaggtaaagatctgtacacacaacactgagaaatgggtaaagagcagtcataccttacaatcttggcataacaagcaagagtgtgaagcgatgcttagggccatggcaaattgtctctaccaacattgagaccatcagataagggatcagattaaacatgtggaaaagaagccatgatagaaatcagagacactgagaggatggtaacagttgtgacagggacaggcagtaagatagataacaagattgtgtgtgtgcacgcatgcacgtgcacacatgtgtatctttccccttctagttctgccagcttaagatactacactaaatctttaaatcatacttactatatggaaattctaattatcaggctggtaaacacatcataaaattaaaacaaaccaacaaaaaacctttgaaataattcttacttttaaaagagctcttttaaatcaattagaaacaaataatctaagatacccagtagaataaaggataagtgagcagataattcatagaattgaactccacatgactagtagattcataaaataattttcaatcctactaagaatgaataaaatgaaaaataaaacatgatataaggccgggcatggtggctcacgcctataatcctgtcactttgggaggccgaggcgggcggatcacttgagatcaggagtttgagaccagcctggccaacatggtgaaaccttgtttctactaaaaaaaaaaaaaaaaaaaaatagccaggcgtggtggtgggcgcctgtaatcccagcctattcaggaggctgaagcaggagaatcacttgaacctgagaggcggaggttgcagtgagctgagattgcaccactgcactacagcctgggtaacagagtgagactaggtctcaaaaaaaaaaaaagatataattgtaattgataataaattgataatattttatatagtcaacattttataaacatgttactctgtgctagaaagataaggataagatgggcatttatacgacattggtaatcattaaaatgatagaacttttctagaaagcatttagataatgtgtaccaagtcctttaaaaaggcttctatcctttgacctatcaattcctcttttaggaatctattccaagaaaataatgtgaaatgtgcataaagctttatacttaaaataggctaaaattccaaaagagatcagagagagctatgaacattaaattcagagtgctgtgggaacatataaaagggagacctagccttgtttgggatgtcaggacaagacatccttgaggagctaatgttacagctaatgatatcagacgtgagtaggagttgcccaggcaaagacccttccaggcaaaagttagagcatgtgtggaggctcaaggtggttgaaaggggtatggcagattctaggaactagaaatactgtgtgacttgatcacagcaagggaagcaattatgacataaggctgaagaagattagttcagggttctgggaaaataaggcattgccctgccaagaaactatatggaagtttaacttactctggctagccatggcacccttatggtggttataagccatggctgcatagacagaaagacctctcaggtcttgctctgcctcatactagaggcagcataatacggtggaacatgaagttttggtgaaataacaatgtaaagtacctaaatagtgaccagcacatagtaaggactcaacagatccattgtttttattattttattaccattactttaattacattgaactgctgtatttcagtatcttcattttaaaaatgatgatagcaggattattataaaaattcattgtgtgacataatatttaaaaaggctttttatggcattatgactatcataaaaacattgaacgtgattcacaggaagttttactatcttcatattaaaaatgttcctggaacactattatcttagatttttatctctaacctttcctcctaccctaagaagataactatcttatcatggtggtgattgaatcaattctgtgcccaccttccaaccataccaggcaccagagcactaattttcagtgagattttgtgcctttgtaaactccagtgtcacctgaatttggaatgtagttgggggatttctgtgtaggacttcagagtttatacccaccatctgctagctcagactaatggtcaaatgaaacatagcaacccagtaatcaagtggtttaccttcttgcccctgcagaatttgaccaaataattctctgcacagctctgtccataaatcttccttttagagcaactctgcttagtcctcctccctgcataggctcagcccaagcctcaggtcagaccagtgagccacattctcacttgtccagagagagtttggaaatacattaaccgcctcaacctgtattactcttgcttccagcaacctgacttcactattcccttttccattccatttttactgtagctttagacctaatgcttcctagttcttcctttggatttcccttaactctgattctgatttttctagctagcattgcatcctttcaagtttgaccccaccacagtaccctcctacctcaggcaccatcctggtaatgagaaaggtatgaggatatcctcgaagttggctgaaagtaataattaatttactttacatatttatttagtgcctgctgtgttctaagtgctgagtgttgagaatacaatgttaaacaagacacaaaccttgttcttcacaagtttatcacagggttagcaaatgttttctgtaaaaaaaaaaaaaaaaaaaaaaagccaaatagaaaatctttcaggctttgtgggccacatgtagcctctactgcatattcttctttgttttttttgaatacttaaaaaatgtaaataacattctttgtttgtagactggggaccaaagcccatatagacccttggcttatagacacaagcatttggcaatagggtataataaaatccataccaaaactaagctcagtggctaaaagagctcataggaggaacatctatcccaacgctgggggatgaaacaaggctcccagggaatatgacactgggttgggctctgacagattaaaaggtaaaattggggtgaagttcaggccactcaaaaggagcagcatgagtaaaggtctaaggacaagatagggcttggcacattccaaaacttcaattggttcaatatggctaaatcataaaatattagggtttaaacaggaagaggcaagactgaagagttaatcaagagccagatgacaaataaaggaaagtataaacaatgacttaaacatcaggataaaatatgttaaggagaaacattggactgagagtgcatatcaatccctcctcatccataggttgtgagaaaactgaggccctcaaaagaaagttaggctttagttgaccataataggtaaaacaggtgtttatggaaaaaacaaaacaaacaaaaaaaacaaaaatcaggaattccatggtgactgtaatgaacaggggatcccatagcctttaatgagtagagcagatctggaggcagcgaggatgaagaggagtgtttctaggtgataagtacaggaaataggggtgaagaaatcagagacctacaggtatcctgggggcaattagcaagaggggctgtgtaggggaagcaacttattaatgaataaatgtgctcacatcactggcttcaaggttccagctggaatacatgatttagtaaatatttaaaaggcatagtggtgtagcatgttgtttaattattgttgatattttcttcaggaatttagcttttcaatagagagaaacattttaggcatctaaatcactttaatgtatttaagcgcataattagaatgcattagactatggctgatcttaggtgttcaaatactgcctttagaaatgacagtcacaattaactgaacattatctttgctggcattttaggaactcacgaacttaaccaggctgccttgcttaaaggatttatgtctgaatgaccctcaatatacaaccaatccagtttgtcttctgtgtaattattccacacatgtattatatcatttgccttgccttcaaagatttgacacattggatgtgtcagcaaagcaaatcaaggaactggcagatgtaagtacatccctaatcaggcatctgtgatttcagttttattagttaacggcttctttctggccatgtccacatacggtaggtaggattatcaattcagttcttgttgccaagtctgcttttgccctagtgaactggatattacacataaaagtatataaataataatattaatactagaatcttaattttgatgacagtactggaaggtgaaataatagaataataatgtttctaatctatacaaaacaagaaggaaattgaaaaaaaatcagtgttaaaaatagactagtgccatatatatatacacacatatatacacatatatatacatatatacacatatgcatatatatacacatatatacatatacatacatatatacacacatatatacatatatacatatatacacacatatatacatatacatatatacacatatatatatacatatatacacatatatacatatatacacatatatatacgtatatacacatatatacacatatatacatatatatacacacatatatatacatatatataaattaaagcttaaataacagaaatgtaacaaccacttctcctttggaatattacatatcaaaattagaaaatatctatggtttatggtagtctaccaaggattaggtagattttaatctaattaaagatggtttgtgattctctgaaagtttaagtagctgaggacatcaggggaagagaagtaacagatgaagacaggagtggtagaggccagattatgtgagactgtagactgttgtaaggactttggtctttactttgaggaagatggggtccactggaaaattctgatcagaggagggactaagatgacttatgttttaaaaggatccttttgaataatggattaagaatagagagttagagggggaaagttgaaagcagagagaccagttaggagattattccagtaacttagatgagccatgtggatggttcgatgcatgttcatagagaaagtggtaagaagtcagattctggtagcagttacaagatggaacctatatgggtttactgatggattgaatattaagtacagaggaaagaagtagagaataattccaagatattggcaggagcaattcaaagagtaagttgctatttgacgacatgaggaagagtatgggaggtgtaggtttaggaggaagaatcatgattctagaatcatgataactttaggcatgtaaagtttgaacaattttttgaatatcctaggggacatgctcagtaagtagttggatatatgagtctactatgtaggagagtttcctagattgggggtataaattaaaatatgagaattgaaagcagaaagttggtacttaaagctgtggactggatgagtcaccgagggaatggtatagaagagaaagtgtgtcacttgggtgttaaatgttgggtagaagagaaggagcctgcagaggagactgaaaaggagaactaagagaggcaggttcattctgactgagattctcatacatttggttcagtcttgtaaacgtcaggagtagcataaagaacaaaaaaaggaattgttagacagtttctgacatcttaaattaagtcattatatttcattttcttatcgtaaaatatttatcctccctttaccttttaaggcacaaataggatatatactatagtccaacttttgattcagaccaaaatgattttcaaattcaaagtatttttaatttatggattgatatagatttataaaatgctttcttccctactatgcatgagacaaattgtggcagttctttgtgataaactcttgaacagagtgctattgattcttcagattttcacctatgactgtgaactagtttgtgtaaactacaagtgtcaggtaaagtcagaacctaccaggaggaccaccaaagagttagtgcaagacagagggaagaacatatggattcaaatcagaagacttggattcaagcccccaactgaatgtgccactactgaagagctcagttttctgaactgaaacaaagatgatgaaaatagtatctgcttttcagtacagggttgttttgggggagccaatgagttaatgtacataaaagcccattttaattgttaagtagtataaaaataagtgctatgaaactatagttgaatataattctgtttatgactttgaattcttttttggccacctaagatgcaaagggatcaaattttgtcttagtacaaacatgcaactgaatttagcattataattagtctaatttctttttcttaaaagtttgttttaacaggtgtggaattctaccaaagtctttgaacgtgactttgacattagttttttaaagtccaaatacaaaaagcaagttgcatgtggtcagcctacaaagttgatttgctatatagttacagtttataaaatagtcttccctctttccccaaaatcttactatatactctcaaacaaggacaaaaaaaaaacccttattgataactcttatttatttttatgacatactaagtgattttgaaaaagtttagaaatagtaaaatatcataatttttgtttctatatgaagatataggtacatacttaataaattagaaaaagttgaaactatggtaagatatagtagacactaaaatcagttgttttttgtggaagatggggcaactgagaagatgggaaacataagtgggaagtacacttttcattgtataaatcaaattttttggtttttgaaatgtgaatatattgcttattcaaaaaaattaaaataaaactagtatgttttaatctttttttttatcccacctagggggattccaagttaaatttaaattttagataacctattaatagatatttaataataaaatatctattaaattttagataataaagatgttttgggataattaaataagtataagtaagtttagtaagtattatgtatattaaaacattatttgttgtttatctgaaattcaaatttaatttggcatcttgtattttatctgaccaaattaactccatcccaagttctcttgttgtgttattttttcccttttatttacagttgatgcacaataattctatgtattctataggatacccaatggtgttccaatacacatttacaatgtataatgatcaaataagggtaattaccatattcatctcctcaaacatttattctttctgtcgtgaacatccaaaatcccttcttccagatttttgaaaatatacacattatagttaaccatattcaccctgcagtgctacagaacaccagaatttattcttcctatctagctgtaattttgtacccttaaccaacctttctccccattctttcctccccactaccttgcctacagcctccaatagctacaattctactctgtacttccatgagctcaaaaaatgtttttagttctcatacgtgagtgataacatgcagtctttatttttctgtgcttgacttatttcgcttaacataatgtcctccaggctcaaccatgttgccacaaatgacaggatttaattcttttttatggttaaatagtattccatcatgtgtatacacatatgtgtgtgtgtaatgtgatatatatatattacattttctttatccattcacctgttgatggcatttaggttaattctaaatcttagctattgtgaatagtgctgcagtaaacgtgggggtgcaggtatccctttgatacactgatttcctttgttttggataaatacccaggagtgagattgctgaatcctatggaagttctacttttaattttttgagaaaacgccatcctgtttttcatagtggctgtactaatttacatttctactaccagcgtatgagagttccgttttctgggcccaggtgggcggatcacttgaggtcagcagtttgtaaccagcctggccaacatggtgaaaccccatctctactaaaaatacaataaaaattagccaggcgtggtggcaggtgcctgtaataccagctactcaggaggctgaggcaggagaatcacttgaacccagaaggcagaagttgcggtgagccgatatcacaccactgcacttcagcctgggtgacagagtgagactccgtctcaaaaaaaagagttccctttgctctgcatcctcgccagcatctctctctctcttttttttttctgtctttttgataatagccattctaactaggtgagattatattgtgatttttatttgcatttccatgatggttagttagtgatgttgagcattttttcatatacctattggccatttgtatggtctgttgagaaatgtctatgcagttcctttgcccaccttttggttggattatttgtgtgtgtgtgtttcatttgtgtgtgcgtatgtgttggtttttttgtattttgttttttgctgttgagttgtttgagttcgttgtatattctggatataagacccttattggatgagtagtttgcaaatattttctcccttccataggttgtctcttcactctgttgattgtttccttttgctgtgcagaagcttttcagtttaatatagtcccatttgtctatttatgtttttgttgcccatgcttttgaagtatttgcctagatcaatgtcctgaagcattttctctcttttcttctagtagttttatggtttcaagttttacatttaagtccattttttgagttgatttttgtatatgttgagagacaggggtctagtttcattcttctgtatgtggatatcctgttgttttagttttcagaatttattagaattatttttagctgtcactgacccacagaattttgtattggatttcctattgtctccaaataggcaagaaaaaaaaacaagaaacaccatttcccatttcttaagttacggttttttcttttaactcagttgcacttcagaaattaagcttttctttatcagatatacttaatcagtttatcatgatcctaaaacaaacttttttcttaactgttctttgttataattgttttatttctggcaggggaatttggtgatttcagttgcagtacttcataatatgcatggggaaagaggattattttggcctctcatcatactatgtatttgttcctattctgtcttttatgccagataattatattaggatcttgattatccactccatactaagtaaatttcataagaaaagactgcatctgtagaaaatatatgtctaagagtgtaaaagccttccaacttattcgctttcattatttcaggtaaacaaaaccatgtcagattttttataatgcctcaaatttgtttatggtctcctcagatagttctttttaactaacataactctcaaacaccatttagctgttgcatatcttaattatggaattaatcaatttatcatgataaatttattaataactgaatgatgcattgttattaaggaacgcaagataaatggatttgatagacatttagtaatttgctcagcctaacattcttttatacatttgaaaaaaaattatattccttagccatgcttttaaaaaacgaattgagtaatgttgtatttgcttttaattcttattaatttattttattccctgagttaatcaaataggaataatgagttatatgtttgctctaattgtactacctcattacctacactagtttatacattaaattttatctgtagtctctttttgttgttatcctggaaataaatgtgaatacgcctcacactttatgcctcacaaaggaaatctttggaattttatattttgtattaagtttaaatatagaactctgtgtagccattgtcactccagctgtcatcattattagtaactaagcatgcaaatcatctaaattgttatatagaacatactgtatttatataataccactaacaattgcctataatttgttttagctaattttttgttgttttctttcttacttttagaccacagcaatgaaaaaaataatgtattataatatgcgtataaaaactcttcagaggcatcttaaagaagaccttgaaaaactgaatgatcaaaaatgcaaattacaaaagttgccagaagaacgagtaaaattattcagctttgtgaagaaaactgtaagatttaataatgtaaaatcccagtggccataccttaagaaaaccgttagataagatagcaagcaatatcttttaaattatgtatatacacacatatataatacacacacacacacactcacacacacacacacacacatatgtaattactactgaatttcaagttaagcttgcccccaaaaaagttctgattccaggtacttaactaagctacattctgtgcttagaaatctgcaattcaaaaaaggtataggcttattaaattatgaattttgtttaaaaaaactgtgtatttcaatatgatttagagtgttacaaaaattattagacttattcagctgtgtttttattagatgccagtaggctgtgctcaaaattcattttcttgtttaaagtgctaaaaaaaaaaaaaccctttcctaataacactaaggtatacaacaaagtgggaactttaaatcaagctatatgttagtagtatgtatgcatttttatttagaataaattggatttcttttactaaaagtagaccctgaaaaagtaagcattatttaactcaaaacggaatcttgtatatatagtaattcctgtatttttttcagtatgaggaaataatggattattcaacaaatggtgttacaaaaatagtcaaactatttgggagctggagagttggctccttcatttgcactttaccaaatgtaaataccagtaggaaaaaaaagaattaaatgtaaaaatgaaaacatgaaaaattgaagaataaatatatagatggatatatttatctgatctcagcctgctaaatgaaagaaatactagaaatcacaaaggaataaaatgtagaattgattttttaaaaaccagtgaaatgcttttgtatttaaaataataaatgtaaacaacaaatgaaaatctgaaaaaatgtcttcaacaaacatgatggacaaagagtcaatatccttagtataaaaaggtgctcatatgtaaaacaaaataaaaggtaaatgtctaaatagaaaaattgagcaaagtacataaactagaattttacaagagtagaaataaaaatgactaataagcatttgaaagaactcaatttgatgattaacttccaaatgttaattaagataacaagaaactgtttcacctataaactgtcaaagtatgacacatgacagtactcaggctggtgaagatggatgtgacacactagataccacttatggaagtgtaactttggtcatatgtataacagcataaaaatgctgagtttttgacccagtaaatctacttctagcactctattgtaaatatgtatataaaaggatatatataaaaatatttatatatcattgcactattaataattaaaaaattggaaactatctaaatgtttaataagagaagagttatatactcaagacagaatagtgtgtagctattaatattaaaaaccaaggttttgaaatatatttaatgcttttttaaagtgagcagttcttattataattagaaaaatattcttaaagtaaaacattaataaaatttaattaaaattaaaattaataataaaaaagattatttccataaaaatcacaagagatcaataaatggatatcattttatatccgctattttcatgtgcaaatgcatgtattaagtaaaatctgcaaatgagaaaaataatggctatagatatatacaaatatatatattttaatgaatatgcttaatctattttctttttttttgtcttttttttttttaaattatactttaagttttagggtacatgtgcacattgtgcaggttagttacatatgtatacatgtgccatgctggtgcgctgcacccactaactcgtcatctagcattaggtatatctcccagtgctatccctcccccctccccactcctcaccacagtccccagagtgtgatattccccttcctgtgtccatgtgatctcattgttcaattcccacctatgagtgagaatatgcggtgtttggttttttcttcttgcgatagtttactgagaatgatggtttccaatttcatccatgtccctacaaaggacatgaactcatcattttttatggctgcatagtattccatggtgtatatgtgccacattttcttaatccagtctatcattgttggacatttgggttggttccaagtctttgctattgtgaataatgccgcaataaacatacgtgtgcatgtgtctttatagcagcatgatttatagtcctttgggtatatatccagtaatgggatggctgggtcaaatggtatttctagttctagatccctgaggaatcgccacactgacttccacaatggttgaactagtttacagtcccaccaacagtgtaaaagtgttcttatttctccacatcctctccagcacctgttgtttcctgactttttaatgatcaccattctaactggtgtgagatgatatctcatagtggttttgatttgcatttctctgatggccagtgatgatgagcattttttcatgtgttttttggctgcataaatgtcttcttttgagaagtgtctgttcatgtccttcgcccactttttgatggggttgtttgtttttttcttgtaaatttgtttgagttcattgtagattctggatattagccctttgtcagatgagtaggttgcaaaaattttctcccatgttgtaggttgcctgttcactctgatggtagtttcttttgctgtgcagaagctctttactttaattagatcccatttgtcaattttggcttttgttgccattgcttttggtgttttggacatgaagtccttgcccacgcctatgtcctgaatggtaatgcctaggttttcttctagggttcttatggttttaggtctaacgtttaaatctttaatccatcttgaattgatttttgtataaggtgtaaggaagggatccagtttcagctttctacatatggctagccagttttcccagcaccatttattaaatagggaatcctttccccattgcttgtttttctcaggtttgtcaaagatcagatagttgtaggtaagcggcgttatttctgagggctctgttctgttccattgatctatgtctctgttttggtaccagtaccatgctgttttggttactgtagccttgtagtatagtttgaagtcaggtagtgtgatgcctccagctttgttcttttggcttcagattgacttggcgatgcaggctcttttttggttccatatgaactttaaagtagttttttccaattctgtgaagaaagtcattggtagcttgatggggatggcattgaatctgtaaattaccttgggcagtatggccattttcacgatattgattcttcctacccatgagcatggaatgttcttccatttgtttgtatcctcttttatttccttgagcagtggtttgtagttctccttgaagaggtccttcacatcccttgtaagttggattcctaggtattttattctctttgaagcaattgtgaatgggagttcactcatgatttggctctctgtttgtctgttgttggtgtataggaatgcttgtgatttttgtacattaattttgtatcctgagactttgctgaagttgcttatcagcttaaggagattttgggctgagacgatggggttttctagataaacaatcatgtcatctgcaaacagggacaatttgacttcctcttttcctaattgaataccctttatttctttctcctgcctgattgccctggccagaacttccaacactatgttgaataggagtggtgagagagggcatccctgtcttgtgccagttttcaaagggaatgcttccagtttttgcccattcagtatgatattggctgtgggtttgtcatagatagctcttattattttgaaatacgtcccatcaatacctaatttattgagagtttttagcatgaagggttgttgaattttgtcaaaggctttttctgcatctattgagataatcatgtggtttttgtctttggctctgtttatatgctggattacatttattgatttgcgtatattgaaccagccttgcatcccagggatgaagcccacttgatcatggtggataagctttttgatgtgctgctggattcggtttgccagtattttattgaggatttttgcatcaatgttcatcaaggatattggtctaaacttctcttttttggttgtgtctctgcccggctttggtatcagaatgatgctggcctcataaaatgagttagggaggattccctctttttctattgattggaatagtttcagaaggaatggtaccagttcctccttgtacctctggtagaattcggctgtgaatccatctggtcctggactctttttggttggtaaactattgattattgccacaatttcagctcctgttattggtctattcagagattcaacttcttcctggtttagtcttgagagagtgtatgtgtcgaggaatttatccatttattctagattttctagttaattgcgtagaggtgtttgtagtattctctgatggtagtttgtatttctgtgggatcggtgatgatatcccctttatcattttttattgtgtctatttgattcttctctctttttttctttattagtcttgctagcggtctatcaattttgttgatcctttcaaaaaaccagctcctggattcattgattttttgaagggttttttgtgtctctatttccttcagttctgctctgattttagttatttcttgccttctgctagcttttgaatgtgtttgctcttgcttttaattgtgatgttagggtgtcaattttggatctttcctgctttctcttgtgggcatttagtgctataaatttccctctacacactgctttgaatgcatcccagagattctggtatgttgtgtctttgttctcgttggtttcaaagaactctttatttctgccttcatttcgttatgtacccagtagtcattcaggagcaggttgttcagtttccatatagttgagcggctttgagtgagattcttaatcctgagttctagtttgattgcactgtggtctgagagatagtttgttataatttctgttcttttacatttgctgaggagagctttacttccaactatgtggtcaattttggaataggtgtggtgtggtgctgaaaaaaatgtatattctgttgatttggggtggagagttctgtagatgtctattaggtctgcttggtgcagagctgagttcaattcctgggtatccttgttgactttctgtctcgttgatctgtctaatgttgacagtggggtgttaaagtctcccattattaatgtgtgggagtctaagtctctttgtaggtcactcaggacttgctttatgaatctgggtgctcctgtattgggtgcatatatatttaggatagttagctcctcttgttgaattgatccctttaccattatgtaatggccttctttgtctcttttgatctttgttggtttaaagtctgttttatcagagactaggattgcaacccctgcctttttttgttttccatttgcttggtagatcttcctccatccttttattttgagcctatgtgtgtctctgcacgtgagatgggtttcctgaatacagcacactgatgggtcttgactctttatccaacttgccagtctgtgtcttttaattggagaatttagtccgtttacatttaaagttaatattgttatgtgtgaatttgatcctgtcattatgatgttagctggtgattttgctcattagttgatgcagtttcttcctagtctcgatggtctttacattttggcatgattttgcagcggctggtaccagttgttcctttccatgtttagcgcttccttcaggagctcttttagggcaggcctggtggtgacaaaatcggtcagcatttgcttgtctgtaaagtattttatttctccttcacttatgaagcttagtttggctggatatgaaattctgggttgaaaattcttttctttaagaatgttgaatattggcccccactctcttctggcttgtagggtttctgccgagagatctgctgttagtctgatgggcttccctttgagggtaacccgacctttctctctggctgcccttaacattttttccttcatttcaactttggtgaatctgacaattatgtgtcttggagttgctcttctcgaggagtatctttgtggcgttctctgtatttcctgaatctgaacgttggcctgccttgctagattggggaagttctcctggataatatcctgcagagtgttttccaacttggttccattctccgcatcactttcaggtacaccaatcagacgtagatttggtcttttcacatagtcccatatttcttggaggctttgctcatttctttttattcttttttctctaaacttcccttctcacttcatttcattcatttcatcttccattgctgataccctttcttccagttgatcgcatcggctcctgaggcttctgcattcttcacgtagttctcgagccttggttttcagctccatcagctcctttaagcacttctctgtattggttattctagttatacattcttctaaatttttttcaaagttttcaacttctttgactttggtttgaatgtcctcccgtagctcagagtaatttgatcgtctgaagccttcttctctcagctcgtcaaaatcattctccatccagctttgttccgttgctggtgaggaactgcgttcctttggaggatgagaggcgctctgcgttttagagtttccagtttttctgttctgttttttccccatctttgtggttttatctacttttggtctttgatgatggtgatgtacagatgggttttcggtgtggatgtcctttctgtttgttagttttccttctaacagacaggaccctcagctgcaggtctgttggaataccctgctgtgtgaggtgtcagtgtgcccctgctggggggtaggcctcccagttaggctgctcgggggtcaggggtcagggacccacttgaggaggcagtctgcccgttctcagatctccagctgcgttctgggagaaccactgctctcttcaaagctgtcagacagggacatttaagtctgcagagattactgctgtctttttgtttgtctgtgccctgcccccagaggtggagcctacagaggcaggcaggcctccttgagctgtggtgggctccacccagttcgagcttcccggctgctttgtttacctaagcaagcctgggcaatggcaggcgcccctcccccagcctcgctgccgccttgcagtttgatctcagactgctgtgctagcaatcagcgagattccgtgggcgtaggaccctccgagccaggtgtgggatatagtctcgtggtgcgccgttttttaagccggtctgaaaagcgcaatattcgggtgggagtgacccgattttccaggtgcgtccgtcacgcctttctttgactcggaaagggaactccctgaccccttgcgcttcccaggtgaggcaatgcctcgccttgcttcggctcgcgcacggtgcgcgcacccactggcctgcgcccactgtctggcactccctagtgagatgaaccgggtacctcagatggaaatgcagaaatcacccgtcttctgcgtcgctcacgctgggagctgtagaccagagctgttcctattcggccatcttggctcctccaatctattttctaacagctggatatatctattatagaggagtacagataactattaaatttccacttatatatattttcccttatagagtacaatttatctgttgttgttattgttgttgttgttgcttttattttcctttaaattctgggatacatgtgcaaacatgcaggtttgttacataggtatacatttgacatgatagtttgctgcacctatcaacctgtcatctaggttttaagccccgcatgcattaggtatttgtcctaatgctctccctccccttgccccccacctcgcaacaggacctggtgtgtgatgttcccctccctgtgtccaagtgttttcattgttcagctcccacttgtgagtgagaaaatgtggtgtttggttttctgttcctgtgttagtttgctgagagtgatggcttccagcttcatccatgtccctgcaaaggacatgagctcattctctttaatggctgcataatactccatggtgtatatgtgccacattttctttatccagtctatcactgatgggcatttgtgttggttccaagcctttgctattgtaaatagtgctgcaataaacatacatgtgcatgtgtctttatagtagaatgatttctaatcctttgggtgtatacccagtaatgggattgctgggtcaaatgttatttctggttctagatgtttgaggaaacgtcacactgtcttccacaatggttgaactaatttacactcccaccaacagtgtaaaactgttcttatttctccacatcctctccagcatctgttgtttcctgactttttaataatcaccactctaacaggtatgagatggtatctcattgtggttttgatttgcatttctctaatgaccagtgatgatgagctttttttcatatgtttgttggtggcataaatgtcttcttttgagaagtgtctgttcgtatccttcttgtaaatttgtttgcaaatttgtaaattttttcttgtaaatttgtttaaattcctttaagattctaggtattagacctctgtcagatgggtatcttgcaaaaattttctcccattctgtaggtggcctgttcaatctgatgatagttccttttgctgtgcagaagctctttagttttattagatcccatttgtcaattttgacttttgttgctgttgcttttggtgttttagtcatgaagtctttgcccatgcttatgtcctgcatggtattgcctaggttttcttctagggtttttatggttttgggttttacatttaagtctttgattcatcttgagttacattttgtataaggcttaaggaaggggtccagtttctgttttctgcatatggctagccagttttctcagcaccatttattaaatagggaatcccttccccattgcttgtttttgtcaggttagtcaaagatcagatgattgaagatatgtggtgctatttctgaggtctctcttctgttccattggtctatatatccattttggtaccagtaccatgctgttctggttactgtagccttgcagtatagtttgaagtcaggtagcatgatgccttcagctttattcttcttccttagaattgttttggctatacaggctcctttttggttccatatgaaatttaaagtagtttgtttctaattctgtgaagaaagccaatggtagcttgatgggaatagcactgaatctataaatttctttggggagtatgaccattttcacgatattgattcttcctatccatgagcatggaatgtttttccattttttttgtgtcctctcttatttccttgagcagtggtttgtagttcttgaagaggtccttcatgtctcttataagttgtattcctaggtattttattctctttctagcaattgtgaatgggagttcactcatgatttggctctctgcttatctattattggtgtataggaatgcttgtgatttttgtacattgattttatatcctgagactttgctgaagttgcttatcagcttaaggagttttgggctgagaatatgggattttctaaatatacaatcatgtcatctgcaaacagagacaatttgacttcctgtcttcctatttgaatacactttatttttttctcttgcctgatttccctgaatagaacttccaatactatgttgaataggagtggtgagagggggcatccttatcttctacaacacttccagcttttgcccattcagtatgatattggctgtgggtttgtcataaatagctcttattattttgagatatgttccagcaatacctagtttattgagagtttttaacatgaagggctgttgaattttatcaaaggccttttctgcatctattgagataatcatggtttttgtcattggttatgtttatgtgatggattatgtgtattgatttgcttatgttgaaccggccttgcatcccagggatgagctgacttgatcgtggtggataaactttttgatgtgctgctggatttggtttgccagtattttattgaggatttttgcatcaatgttcatcagggttattggcctgatattttctttttttgttgtgtctctgccaggttttggtatcaggatgatgctggcctcataaaatgagttagggaggagtccctctttttctattgtttggaatagtttcagaaggaatggtaccagttcctctttgtacctctgatagaatgtggctgtcaatccatcaggtcctggacttcttttgattggtaggatattaatgactgcctcaatttcagaacttgttattggtcttttcatggattcaacttctttctggtttagtcttgggagggtgtatgtgtccaggaatttttccatttcttctagattttctagtttagttgtgtaaaggtgtttgtagtattctctgatggtagtttgtatttctgtgggatcaatggtgatatcccctttatcatttttattgttctatttgattcttctctcttttcttctttattagtctagctagtggtctgtctatgttgttgatcttttcaaaaaaccagctctgggattcattgatttttttgaagggtttttcatgtctctacctccttcagttctgctctgatcttagttatttgccttctgctagcttttgaatttgtttgctcttgtttctatagttctcttaattgtgatgttagggtgtcgattttagatctttctagctttctgttgtgagcatttagtgctataaatttccctcttaacactgctgtagctgtgtcccagagattctggtacgttgtctctttgttctcattggtttcaaagaacttctttatttctgtcttaattttgttattttcccagtattattcaggagcaggttgtcaatttccatatttttgtgtgggttttaagtgagttacttaatcctgagttctattttaattgcactgtggtctgaggaactgtttgttatgatttccattcatttgcatttgctcaggagtattttacttccaattatgtggtcgattttagaatatgtgctgtgtgttgctgagaagaatatatattcttgatttggggtggagagttctgtaaatgcctattatgtctgcttggtacagagctaagttcaagtcctgaatatccttgttaacttcctgtcttgttgatctgtctaatgtgacagtggggtgttaaggtctcccactattattgtgtgagtgtctaagtctctttgtagatctctaagatcttattttatgaatctgggtgctcctgtattgggtgcatatatatttaggacagtttgctcttcttgttgcattgatccctttaccattatgtaatacccttctttgtcttttttgatctttgctggtgtaaagcctcttttatcagagactaggattgcaaatcctgcttcttttttactttccatttgcttggtaaatattcctccatccctttattttgagcctatgtgtgtctttgcacgtgagaggggtctcctgaatacagaacagcaatgggtctttactctttatccaatttgccagtctgtgccttttaattggggcatttagcccatttacatttaaggttaatattgttatgtgtgaatttgatcctgtcatcatgatgctagctggttattttgcacattaatttatgcagtttcttcatggtgtcattggtctttatattttgttatgtttttgctgtggatggtactggtttttcctttctctatttagtgcttcctcttgtaaggcaggcctggtggtgacaaaatccctcaacgtttgcttgtctgtaaaggattttatttctccttcgcttatgaagcttagtttggctggatacaaaattctgagttgaaaattcttttctttaagaatgttgaatattggccctcactctcttctggcttgtagggtttctgcagagagatcagctgttagtctgatgggcttccctttgtaggtaacctgacctttctctctggctgcccttaacattttttcctttgtttcaaccttggagaatctcacgatgtgtcttggggctgctcttctcgaggagtatcttaatggtgttctctgtatttcctgaatgtgaatattggcctgtcttgctagggtgaggaagttctcctggataatatcctgaagtgtgttttccaacttggttgcattctccccatcactttcagggaccccaatcaaccagagatttggtattttcacatagtcccatatttcttggaggctttgttcattccttttcattctttttgctctaatcttgtcttcatgccttatttcagtaagttgatcttcaatctctgatatcctttattctgcttgatagatttcagctatggatacttgtgtatgcttcatgaagttcttatgctgtgtttttcagctccatcaggtcatttatgttcttctctaaactggttattctagttagcagttcctgtaaccttttatcaatgttcttagcttccttgcattgggttagaacttgctcctttagctctgaggagtttgttattacccaccttctgaagcctacttctattaattcatcagtctcattctctgttcagttttgtgctgttgctggagaggagttgcgatcatttggaggagaagaggcattctggtttttggaattttcagcgtttttgtgctggtttttcctcatcttcatggatttatttacctttgatctttgaggctgatgacctttggatggggttttgtgtgggggtcctttatgttcatcttgatcttgttgctttctgtttgttagtttttcttctaacaggcccctcttctgcaggtctgctgcagtttgctggaggtcaactccagaccctgttcacttgggtatcagcagtggaggctgcagaatagcaaagattgctgcctgctccttcctctggaagcttcatcctgaaggagcactggcctgatgccaaccagagctctcctgtatgaggtgtctgtcgacccctgttggggtatgtctcccagtcaggaggcacgggggtcaggaacccacttgagcaggcagtctgtcccttagcagagctggtgcactgtgctgggcgaatccctcttgtcaggattagctgctctcttcagagctggcaggcaggaacgattaaatctgctgcagctgtgcccacagccaccccttccaccaggtgctctgtcccagggaagtggggtttttgtgtgtaaaccccttactggggctgttacctttccttgagagatgccctgcccagtgaggaggaatctagagaagcagtctgaccacagctgctttgccaccgggcccagacctcccaaactccttagcactgtcagggaaaaaccacctactaaagcctcagtaatggtggacacccctgccccaaccaagctcaatcgacccaggtcgacttcagactgctgtgctggcagcgagaatttcaagctagtggttcttagcttgctgggctctgtgggagtgggacccgctgagcaagaccacttggctccctggcttcagtccgctttgcaggggagtgaaaggttctctctcgctggggttccaggttaccctgcggtacgaaaaaatactcctgcagctagctcagtgtctgcccaaacagccacccagttttgtgcttgaaacacagagccctggtggtataggcacacgagggaatctcctgatctgcagattgcaaaaacggtgggaaaagcatagtaacccggctgggtagcacagtccctcacagcttaccttggctgggggagggaggtccctgctccttgcacttcctgggtgatgtgacaccccaccctgcttctgctcaccctctgtgggttggacccactgtctaaccagtctcactgagatgaacagggtacctcagttggaaatgcagtaatcacccaccttctgcattggtctcactggaagcttaagaccagagatgtttctattcagccatcttggcccctcctcagtacaatttatctttaaattacataaggctgagattagagttagacaaaagaggttcttgctgtgggcccagaatttaagggagtacccaaaaaccttaagtaatcaagataaataatattccatgcaacatttttaaaatatccaaattaatgcaaaaagttcattatgataaatttaaaaaccccaaaataacaaaatcttaagaccagtgctgtgctgagtcatgtaagagactaaaacaaaaggaaaaatgtgcacccctatatatatgctttcgtgtaattttaatagttatttttttccagaacaccaaagtggtgaaaaatactgaaaaattgaaaagtatgtgtgttaaaaattacattatttgaattttaaatatttgtactaaaatcagtatttattttaattttactttggctttaatagaggcgaacttattaaaaagatttgaaaatctgttgctttgcttattttcaattgggagactgccctatttgaagtggttaaggtcggcacttggtcaagagaaactggctgactgaatttgcacccaacttgaaatcacatgtttggcatgtttttatgacatctggcctgtttattacctagatttccactttgttcatttaaattagacatttgtttaatagatcccattaaaacttaacatctgaattccgactttgcctagaccatgttttatttttattttgctctctgacacattgttttccacagttggaacgagaactggctgaactcaagggctcgggcaaagggcacagtgatggatccaataacagtaaagtaactgatcctgaaacactgaagagttgtgaaactgtcactgaagaaccaagtcttcaacagaagatattggccaaactaaatgccttgaatgaaagggtaacattctggaacaaaaaactagatgagtatgtttaattaattatctagttgttctgatctgaaatggagagaatcagaatgttttgggccatcagttgaccctagttcccttcttcaggagtatgaacaattacagtatgaagtaaagcatgaaatatattcttagtactagttcctagtacatataagcatcatgggataaaagctggcttacagttttttgcagaggcagttcttaattaggaacagtaagcttccccccagtggattcctgtcctatcactgctctagtgtctgcaaactaaaaacaatagagcctctgctggtggataaactcaccaaatagatgagacctggcaaagcccaaacacagtagaaacaagttcaggctcagttatcaattagaaatgtaaagcaagaaggcttagcaaggactgtgaatttttttatttactaaggcactaagtggataaattagtgtgccctgtgataatgctaacaataatagtaacatatattgggtttttactttgtgccagactctgtgctaagatctgtacatgtattttgtatgtaactctcaaaacaaccattttaggaataaggactacgaatattgccattttactgagaaaactgaggcataaaaagtccaagtgacatgtctgagatctgaaagctgtaagtggtagagcaaggatagtcttctagccttcacatattctgagagcagcaaaattaaaggtgattttaattgccaaaaatagaatgtctttgacatggtttaactgttaacaccaagctttctttatccattgaaaggaagccttgtgttttaacatcagttaaaaaaaatctatcataagttttaatgttgcgatttttagatcattctaatagctgtatgtatttttctctccaatagaattgaagcaatttatcatattgaagtaaaacaaaagaagaaaagtcatggcttattgatcccacttttgttaattgagttagagactgtgggaaatttccattttgaagaaggcactcgatctgatgactggtaaatctgttagaaatttagtatagctttaaaaataacttaagtacttaggatcatcaaccagaatatcaacttataaaatcttaaaatgtcccatttttgaaacatttctcatgcagaatattcatctattgaaaattggcaggcatctattgaaaactgaaaattacctactttccgcctatacatttctgtttatgccattaccgtgagccaaccttgaagacatcctaatggtttatcattgctctttacccaatttttcttagcccaagagcagaatataatttagaaaaaaaaatttataatcaagttttaatttttaaaatatgtttatactgtttgtttcctgactggatatagtgcatgattctgaatattggttgagaaactggaagagagcaggaatgccaaagcaggattggcaacagcaggttgccaacatgggaggagactgtctagcaaatcttctgtaggtctgtggtcagagtggaacccactgtttagagatagctacagtcagggtgcacacgaacactacatgttagcataaagtatatgcttataccaggaattcaggtcaaaagcttgtatcaacaaaaatggagagacaccagaatcaagcagaaagcagacagccaggctttagaaccaaggcctactagtagatactaggaagtggttgtgttgcttcaattagaggggcacaatttcaaattacccttaaaaaaagtcttgaagaaaaatattgttaagtatcactttcacatttctgagtcattttttcagaactgaagagcctgtgaaacagagaaagattgctctagagccacacaataggaactgggtacatggaaatacaccaggagacatgtcaaactatagaatggacttggcacataaccctggagcatgattttacttgaagtcaatgtcaaaataaatactaatttttatagtgtagaatgtaaaacttacactaactttttagaaaaaaaaactgttattgttatgggttactttaaaccaagtcccctgatttctattagacatggcttttttctcacctctgtgagtaaaagcttctcaaaggtcttgggagaactctgatggaaaagtgtaagaagctcttcgcaagggaaaaagaggcctttgaaaatactttcctttgtattagtacatccatttgcccagcagttactactgtttgcttaaccacattttttgatttttatatacaaagatataaaaggtgttcatccagctcccatgtaaacaagtaaaggccttgatttttcaagtgcaaaaactgaatggtgtgtctctactgggtgcacatttatattcactcaacctaaacaggattttttttttttgagatagagtctcgctgtgtccccgagactggagtgcagtggcccgatctcagctcgctgcaacctctgcctcccaggttcaagcgattctcctgcctcagactcccgagtagctaagattataggtgcatgccaccacacccactaatttttgtatttttagtggagacggggttttgccatgttggccaggctggtctcaaactcctggcctcaagtgatcttcccacctcggcctcccaaagtgctgagatcacaggcatgagccactgtgcccagctccaaacaggatttttaaaaattatttgtttctttttaaattattgcagaggaaactctttgcaacaagtggattagtgaaaaaaaaaaaaatgtaaaagcaaaatgaccaaaaagccatttagataactatgtcagcctgatagtaaattagatagctttgatggattttgattagcattaacctgtttacttggttttaataagagtaactttgatttgttttaaggaatatatcaaatatatgttagcagaatttaaagtactgttttttagttttagcatactgcaagcttggctacttttcctctgatcttttatgtatgttaagaaataactactaagtgctttaaattgctatgctacatttctagttgttttatttaaacactgacttctcctattaatatttttaaggctaaggattcagtatttaaataaaaagtatttcagtagaactaggactgaaagattttctgttaaaattatctttatgtctttaacaacaacaaaacactgcatgtttctaattgtatgtcattatctcttagcttcatttcttttatgaaataaaattattatattttccagtttacaaaaatcttattttatagagacatgctagttgagtggattgttgctactatacctttattattatagatttgtattatttaccgatgtgttgccaattgagttacccattgacatcatacaacatttatcaagtagggacttcaaagcataaaagatgctgtccttgtgcctgagaagctgtcagcctggtcatagatacagtgtatttacaactaaaaaaaaaaaaacacctttaaaatacgacaaaacaatatataagtgactctgtaagttcctttggggaagatatgatgttttgtgtcttataagacataacatctagcatgggactggattaatagcccagtacatatttactagttgaagcttccatatcactttatagatacacaacagttttgctttggtgtatataatgactttcagtaattaatctgcctctttataaagatttcatgctatactatctcaaggagctacataagcagaaactttctgttttacagggctttgaaactgttgatttaagtcagtaagcctgtaaaagtatttattaaacctttatataggattataaagtatattttaatagattacattaagcttcaaacatttaaaaacgtgtgtagcctacatttgctaaatgagcacattattgtatattaacaaaatgtgtaggcatctttctgtgtaactgaatatattagtcattgatatatatcattgtgaatgtttataccttcaagtaccactgaatgaatgagggtaaggtacacagttcagctgactctaaaggatttgaacaggagttatgattagtttagagaccatacagtggagaatattgaatcctctactgtaggtgaagagtctgaatgtaatttggaaggtaacaaatggctgcaaaggcttttgttttgttttattggcagactcttcacctacagtaaaggatcagtgttctccactgtatagttttagactatcataacttctgttcaactcttttaaagtcagctgaactgtgtaccgcactgctcttgaagcaaacgcagtactccaccacataagtggttttgtttgttctgtttccttcacccagaatgcttttgcatacctcacacttacttcatcattgctcagctgctgaattcctgggcaacataaaatctccatgaaaaaatcacacttcatagctcctgccttcctggggaaccagcctaggagctaggtattgtttattcattccttccacccattcatgagacgcctcaagcccaatatcccctatatagcaaaaactttatctaaaacgcctacagccctagtttctatcagagtgcagaaagcttccaggacatgttacttaggggaaatttgacagatttaggcccagcaaatgatccctctataggaggggcagtagcttccccacctcagatgctaatgtggctgttttgtaggtactctaaactggttagcaggcatcatgcttgattgcaacactattcatatctgtctcctctaccagactgcgagctcctctgggattagtttggtttaggcagctctcctttcaactctaagggagaagtaatttataagatcctggctgcattgattaagtatttgcttgtgagaaatatagatgccctaagttaggagctcagctattaggctcaaggagagactacccatcaggaagctcacctctgtgaccttagctcacacccatttcagaccctggttgattatgtaggtgaggacctagatctttcattaaaggcaaatgtattccttataagaccatttacttccttctcaaaatgatccgtttttcaatctcatcttaatctaggttctgtgctagacaggaccggaattttatgcgtatggccaggtgagggcagcagagagcaaacaagcacttcagtgttattttcacacagctggcccctgctcctcctcctccaattttcagatcaaatatcttaacgtctctgaaaggtcgtccccaaggccctatcttaagtaggtcccctttgcattccttaccccaagcttctcttcagagcctttttcagtttagaaattttatttctggctttacttgtttaggcttcattagagcagacaatgcctctttcacatccgtattcattgtcaggaagttatttcagtagtccaatgagagatcgtggtgatttggattaggatggtaacagtggtgatgatgaaacacgatcacattcaggatggattttagatgtagagccaggcggacttgctaaagaattagatactggggccgggcgcggtggctcacgcctgtaatcccagcactgggaggccgaggtgggcggatcacgaggtcaggagattgagaccatcctggctaacacggtgaaaccccgtctgtattaaaaacacaaaaaattagccgggcgtgatggcgggcgcctgtagtcccagctactcgggaagctgaggcaggagaatggcgtgaacccgggaggcggagattgcagtgagtggagatggcgcccctgcactctagcctgggcgacagagcgagactccgcctcaaaaaaaaaaaaaaaaaaaaaaaaaaaaaaaaaaaaaagatactggtgaggaagaaaggagaggattattcctacggttttgacttaagctatcagttaaatggtggtgccatatactgagatggaaaatactcagaggagcaggtttggggtgcagtgttagttatgttaggttggagtcacctgtttaacatgcagatggacataccaagtaggtagttggatattcaagtctgggtataaccagctaagttgagtagagatcaagactagaaataaaatgttgtaatttatcaggatgtatataaagccaaggaaccacgtgaaatcatctagggagagtgttcgtggaagcaagaggaaggccaaaggctgatccctgggcagttcaacatctaaaagtctgtctgagaagacccagcaagaaaactatgaaagagcagccaataagaggaaggcgtatgaagtttccctgaagctaagaaagtgtttcagaaagtgaagattgctcaaccaacctgtcttccaggcagaacaaatgtgcaataaatgaataaataaacggagccactatatgattactgtatctttagcaaaagacacaaaatatgagctataacttttatcacgtagttttctgttcttaaacattttaaggaaaatctattattttcttcatgtatattctgtatgtattcccacataggtttaatttctgctatgaattaattctgtcacgtttttgtgcctgggacttcagaacatacggtattacaggagtaaaagtaaaacgcatcattaaagttaacaaccgtattctgagactaaaattcgaagagaaatttcaaaagtttttggagaatgaagatatgcatgattcagagtaagaagctgaattctttatggaacaactttacaaaagtgtgactgtatttgtaaaatttctattttaaaagtttacagcattaaaaatatacatataccttgttagtaaatgtttcctttttatgcatctcccatggccaggatgacctcataatttatccacattgagcctgtttttgaggttgaaggcaggggagctattaataatgacactagaacattgcatgtcaatgacaaatatccctggcaggacatatggttatcttatctatggctaagcttttgtgaaatcaatcctcaaactttttctgtttcaattattcttaaggagctaccgaaggatgctggaatgccttttttatgtttttgatcctgaagtttcagtgaagaaaaagcatcttctacaaatacttgaaaaaggattcaaagacagtgaaacaagcaaggtagcataaaatgtcatttagaataatgctttcttcctagcaagtggagctctgccgctggttaagcatgatttcccaatccttttatccatatttatagtaaatttctactgctgtttcacaaaaagcttagtgttatcatggaaagtatagcatctttcctctttggattataccaaagtaagcccattaattactactgcctgaccctacgtaatccttctaggcatcttatttttatgttgtgttccttttgttgatggttttgaaatctgctttttaaattggttataaatctttaatcttttgtaaactctccagtcttcaccttgaagcaattcagtcacttaactccactgtactttctagctattgctttccttttactgctaccatttctttattctctacttcactatctccatcttgctgctgatcttgctttatcattggtcacttctgatgccccaagtatccaactaatctttctcagacctccaccatcttgacaaggcagctgtagcacactggtgtagagcagcgcttcccaacctttttcacatcatgacacacataaaatgataatattcctgcatttggatcccgatttcactcctcaccagctatgtgacttcacctctctgttaatctgtttcttcctatctgtaaaatgaagataataataatatctattttgcagagttgttgttaggatttagtgagataatgcattaaaaatttcttggatattggtacaccagtgttcatgacatcactattcaaatagccaaaaaaactagaaacaatgcaaatatgcatcaacagatgaatggataaacaaaagtggaatatacatacaatggaatgctattcagccataaaaagaaatgaaattccgaaacttcctacaacatggaagaaccttggaaacattatgctagagaaataataagccagacaaaaatggaaaaatattgtatgattccatgtatgtgaagtacctagaataggaaaattcagagacagaaagtagaatagaggttaccaaaggctctgggagaggaggaggtagggagttactgtttaatgggtacagagtttcagtctggaataatgaaaaagttctggaaatggatggtggcgatggttgcacaacaacgtgaatgtacctaatgccactgaattgtatgctggaaaatggctaaaatggtaccttctatcttatgtatattttgccacaataaaaatatcacctccccaaaaaagcattccatccactcagtggagaatgggttggtgggagtagaagcagatgacaaggcactatgtaggggagctattgcagcagctcaggccatagaggttggtactgtcactgcagggtggtggtgagagtgccctcattgtactttatggagaagtaagaaggaggtgaggaattcagggttttacaaggcagagtgaattgctcacattcggtccagagaactatgaaccattatcgggagagggtaagggaaggatgaggctaacacttctgtgttttccacctaccagccctgtgctgagtactttatcttctgcatctcctaaaagagatgaaccacctcctttaattctcccacagctctctgtgctgctctgtccaaaagagtagccaccacccacatgtaactattaagcatttgaaatgtggctagtccaaattgagtatgctgaaagtttaaaacaagcaccagtttttaaagactgagtatggaaaaaaaaacactataatttttatattaggtacatgttgacatggtagtattttggacgtattagattaaataagatattttattaagatttgccaaaaaaagatctcttggaccaatgcctggcatcaagaaagtttttgatattttattttgatattttgatattttattttgaaagttttaaatatttttatttttgaatttttacaattgtctgaaacatttgacactattggttgccttcttctttttgaaactctcctttggcatccatgatattacactattgttatcctcctatttttctgattgttattcgcttcctttttgttccccattttgcttctaaacatgggaataccacaggttaaagtctcctgatcttcccttttttcttcacacaccatcaattactgtcattgttaagatcctagaaatggaagaaacatcagtgtgtagcatgtaaaagatcagatgagctacatttctgtgctatgatgtgtacataatgagtcaggataaatatttatgttccgcattgtttaagagatgggctctgatttaaaagacagccgtgtaagcagtttagaagagaggtttggctaaggttggcagtatctacaggcagagggctggccatagtggggaagaagaaactatttgactagcaaacatatctaaggttaagtccacttttctagttggaagaggaaggatctctttctatcaattcaggatgaagtgttcagtagtaagggtgggagagtacgtaagtaaatctgctcacatagcttgagttcattccctaccgaatattgtttgtaatcaaggacttggtcaataaacgcaaagagtatcacgtattcacttatggtttctccaaaatgtacatcttcagttaggctatctcttcctctctgctctgccacctacagctgccattcctgcatggttaatatactttattctcttatatagtgtgtctaaaaccagccttttaaaactgttaagttcagggttacatgtgtaggtttgttattaggtaaacttgtgtcatgggtgtatgttgtacagattattttgtcacccaggtattaagcctagtacccattagttatttttgcagctcctctccttcttcccaccccctccctccagtaggccccagtatctgttgttcctctttatgtgttcatgtgttctcatcatttagctcccacttattagtgagaaaatgtagtattttgggtttctgttcctgtgttagtttgctaaggacaatggcttccaactccatccatgttcctggaaaggctgcatagtattccatggtgtacatgtaccacattttctttatccagtctaagcatgtaggttgattctatgtctttgctgttgtgaatagtttgcaatgaacctatgtatgcacgtgtctttatgatagaacgatttatattcctttaggtatatacccagaaatgggattgctgggtcaaatggtagttctgtttttaggtctttgaggaatcatcacactgttcttcacaatggttgaaccaatttacacttccatcaacagtgtataagcattcctttttctccacaaccttgtcagcctctgttattttttgactttttaataatagccattctgactggtataagatggtgtctcattgtggttttgatttgcatttctctaatgatcagtgatgatgagctttttttcttatgcttattggccacatgtatgtcttcttttgcaaagtgtctgttcatatcctttgcccactttttaatggggtgatttttttttgtaaatgtgtttaatttccttatagatctggatattagacctttgttggatgcacagtttgcagaatttttctcccattctgtagattgtctgtttactctgttgtttcttttgctattcagaagctcttaaatttaattagatcccatttgtcaatttttgcttttgttgcaattgctttcaatgtcttcatcatgtagtatttgcccattcctacgtccagaatggtattgcctatgttgtgtgagggtttcgatagttttgggttttacatttaagtccttacatttaactccaacttgagttgatttttcatatatggtataagaaaggggcccagtttcaatcttctgcatatggctagtcagttatcccagcaccatttattgaataggggttcctgtccccattgcttgtttttgtcagctttgttgaaaatgaaatggttgtaggtgtgcaaccttatttccaggctctctattctctgttccattggtctatgtgtctgtttttgtgccagtaccatgccgttttcttactgtagacctgtagtgtagtttgaagttggatagtttgatgcctccagtattattcttttcgcataggattggcttggctatttgggctctcttttggttccatttgagttgtaaaatagttttttctagttccgtgaagaatgtcactgttagtttgataggaatagcattgactttataaattggtttgggcagtatggccattttaacaatattgattcttcctgtccatgagcatggaatgtttttccatttgtttgtgtcatctcttattttaaaaccaggctttaatcttttgcttataagcagctctctcctggtcttctttcctgatttccataacaatactgtcatttccttcactgaacatgctcaaagccttggaattatgttcaaccctcccttttccattatccccacatctaatcattttccagtggctcttcatttctctccctaatcccattgcctgcgaccactttcaacccttagaactttccttctaatctctgccattgtttcccaataggcaacactgcccttggtcatgccctctagttcttccatttttcacagtacaaattaatctttcttaaaacattattttcatagtgcacattgcactgtgtccatgatgagaaactttcagtagcttcgcattacatgtaatgatgatgtccacattcctctgcctggcattgaaggcctctgacaaccctcacaatctatcttcaacctaactccccattaccaaatatgccaagtgcccctaatgaagtatgtagtctacttgtgattctcctaagtacagctcataccaccctttgatgaaatgctgttttctatttttaccctgtaacagacttactgatcctttaagtcccaactcaagggtttcttcttttgtgtggcttttcctgaattttcaaacagtaggtgcccttttacctagtttgcaggttaatccaaaaagtcagttaaaatggagaactgtaaacagatgatttacttaacaaatcctttaatataacttaaaatacaaatttacattcatgtgtcaatcttctgtgcaggtccaaagcctttgactatgaaattggaactctaagtagtctttcttgtatcagccataaccatgtttcatattagttttgttttccttaaagttgagcatgcacttaaagattcttgcaaagtaactcgaatgtaaaaatccttctagtttgtctgattccccccaccaccccaaacttctgcatttgctttatctacacatgccttgccagaagttcttaatgattatcttctattgaattttactaaattttccaaaattgttcaaagaaacaactcctcttctattttatagctttaaataatatgcataatttcataacaactacaactggcataaacaagcttgggaacaaaattaactgactcttggtaagcatacaacacaactggatacagtagaagtacatccattttttaaaagttccattttatccctgaactgccatcatagtatgagttatatagacaacagaaaatactggttaatcctgcaaattggttaagtgttagttaagtggtgaacaactgaaaaattttattataacacatttgttttattgaaatgtaaccatttgtgtgcatttttctactagttcttaagagcaggatctgtatttatagagtagattcttagtagaaatctagtgaaggaattgatgtcagatggatggatagcaatcacacctatttgtataccttcatgttttcctcctcttaaaatataatttccttttaaatttctgattatttgaattatgtccaatcttcaaagcctacccatgatttcattgcctctataaactccttcctaatcccttcagttaaaaagtatatcttatttgacacatcttgtggtgccttgtattttttaaattatcatatatagtttctatatttgcctttcttaactgaggaccaagactacactgtagccttacaataccctgcacgtgggttatatcgaatggatatttagtgatgttcattgaaagtctaaaaaggttacttactggggtgtggaatttgtggtcggataagccctattagagtatactcacccatcagtatctctgggggattggttccaggactcatgcagataccaaaatctgtgaatacacaagtccattatataaaatggtgcagtatttgcatataacctacacatatcctcttgtgtactctaaaactcctctagactacttacaatgcaatgtaaatactatttaaatagttgttatactgcattgtttgctatttgtattattttgtattgcatttttttcctgaatattttcaatccatggttggttgaatcctcagatgtgggaactgtggatgtggagggctgactgtatttattttttcagaatgtctttggattgcagatttcaattaaaaaaataagtaatttggcatttacagataagacataattctaaataatttggctattaatgttaaacaaatagtaatttcaaacctttgagattgtgacaaggacaaatagacctgagttcaaatcatgactttgccaattactagttctgtccttggacagatcgtataatctcttttagctctagttttcttactactaaaatctaaaaatagagatttttggtttttagagctgttttcacggcaagcaagtaatgtgaacattaccgatagaatactttcaagaaataaagttagtcacaatacaaactaggatttccatgggttaacacatgaaaagtgttttgtttctagaaaacaatgtagattattagccccaaaaattatagtataaacaagaatcttcactgatataatacctcattccattagattttctttttggagttagcaagattactagtggagtactcattgaaagctattgctcctgctccacatagtattatcagtcttgactgtggctgcttttccaggaacaatttttgttctgcatcaccttttattaacctatttgcatatgaatttaagataaataaatggttttgccaaatgaagttgcacctgaaggttatctacttcttttcagtgagtccggcctgcagatttctttgcccagacacataaaaataaaataataaaccctctgtattgaagttgaagtattgtcaattttataaaaatactcagactttgttttttctttgcagctgcctctcaaaaaagaagccatcattgtttctaacagtctaagtataagtgagtgtcccagaattgaatttttacagcaaaagcacaaagatgagaagaaaatctctcttaagcatgagctcttcagacatggtaaatacaaatatgccatgtttctgaacttttaagttctgtcttcaaattcattaattatttttatatcgtttctgatacttggttttatcaaccaaggagatgttcttcaaaccattttatttcatatttaccagtgtagtaatacatgactttctcatcattaatttagccacacttttaacagatacttactgagtgattattatgtcagcattaagaggaacatttgttactcagatatttaattcaacttttcagggacatttttcacagtctgcttttgtttattatgttgtgtcacatatatatatatgtgtcacagcatatatatatatatatatatatatatgctgaactaaatgtgtgtgtgtgtgtagtgtatatatatatatatatatatatatatatacactacacacacgaacaccaaattcacaggaaatagaaaagaatttggcccatatatgtgataattatataataattatataaagtactccggaagataggccttatttgtcctgaatcatcataatttaagatgataagaaaacctgggtttaagttaaaatcagctaaagacaaattgtaaagtgtatggattgctttataacttgtcttatataagataattttttgataattcattcatagttaccagtacttcatttgcagcttgaatatgtagaaatataagtacacaaaccaatttataggacacttctgggagaaactccctggtacccatggactggggaaaaagactatagctcatcatgtccttcttgcctcaccctcttccactgtacattctttagttccacaagtatttattgaatgcttattgtgtgttaggcactggaagggatacagtctatgcaaactagacagtttcatctttatggtgcttataaatattaataatcacataaatataaaatcatagttatcatataggagctataaacatgaagtattaatgcgtggtaccaaagaatgtataatatggagaatagatcaggtcagggagtaaggaacacctattctttagtctcaaccatccgacctactaaagcagggtctccaacccctgcccacagactggttgcagtttgtggcctgttaggaacctggccacacagcaggaggtgagcagggggcaagtgagcaaagcttcatctgtatttgcagccactccccatcatttgcattaccgcatgagctccgcctcctgtcaaatcagtggcagcatttgattcttataggggcgcgaaccctattgtgaaccgcacatgcgagggatctgggttgtgcgctccttatgagaacctaatgcctgatgatatgtcacttgtctcccaacacccccagatgggaccatctagatgcaggaaaacacgctcagggctcccactgattctacattatggtgagttatataattatttcattatatgttacaatgtaataataatagaaataaagtacacaataaatataatacacctgaatcatcctgaaaccatcctcccatccccagtctgggggaaaattgtcttccatgaaaccagtccctggtgccaaaaaggttggagaccactgtactaaagattgggtagtcagaaattgggttaacttaattctataagaatgacattctaggttccagattgctaaggtgaatcattctgaactaaacgatatgtgttttgcagttttttatccagttaataataattataaaattaagcaggttattgagtctagaaagaactccttaactccttacttgaaaaaaccttttattctttatcattcttctccattttcatattaagaaatgcctcacgatgttctgctagatccttctggaatgtttccaaaacaattaggttctcctaatttacattttatatcttgtacatagtaaaaacaaacaaaattcctttgaacattttatgtattatgattataaattacgtttttagtttcttgactttaggatttaatgaatcccaaggatccttaagaatctaaaggaaaatgaaatgtttattcattaagtagacatatattgagtgcctcctaccatctaagctatgtgctaggtgctactgaacttttacccagttaacaacaaccaaaatttatttttaactacttaaaaaaccttgccgaattagtgtgttctttccttctccctcttctgtaaagctttgcttgatataatcacacaacacctcttttataattatttcatgtattcaacaaatatttgttgagcatctattttggatcgagcaatgtgttatgcgctgtacagtagcaaacaagagagccagcatctctgcctttacagaacatacagtttagtcttgggccaataaagaaggttatgttggaaaattattaaagttaattattcttaagaattacttctgtttttttatatttaggcatcctcctcattacaaaagttttccttggccagagtgttcaggcccatgaaaaagaatccatcagtcaatccaactatccaatggttaattcagtgttcattcctcggaaatatttactaagtatgtctatcataaagattaatgtggttttatctctctgaatgaaaaatgtttgtgtttaatacggatactcacaattttatttctacttaacaaagtttgtagaattttctacaaaaatctgttactagccactaataatttttatattccctacatcaaagacatttatatatgggtgtgggtagataatctggcaaattttaatgtaattatgtatttgtgtgtgtgtgtgtgtgtgtgtgtgtgtgtgtgttcattttcaaagaattaaaaaagcacccgacttttaacaagagttttagagaaatacgtttgtcaaaattgcatggccacacattgaatagaaaagtgaaaaagtatgaaaaggaaaaggatatgaataaaattaagcactactagtctatgtagtgaaaggatttatataattaaaaagtatttatataattaaaaagctggagtggaaaggatgaaagaaaaaatcctcaataatataactgtcgcaacttactgagtttgttatttatttaaaaatgaaagaaaaaatcttcaataatataactgttgcaacttattgagtttgttatttattaaactatgtaagaatgaaaaagtatgtttcaatttgagaaaatgtgtttgctttgcttgtttttgcttttactctagattctgtcatgggacaaagaaactgtgattgcagtgttcggcagtgcaagtggtttgtctttgatcatgaccttgttttgccggaatatgttgttgaatttgagtatattacaatggtatgaattgttacatattcttaaagactaattctaattccttaaatgggaacaaagtagtaatttgaagtcgaataatgctatgtcaagtttatattatgtgcatgtgtgtataattgttattttgtgaataacttaattttcaaaacaagtcaactaatattttttaggcaaataatcaaatgattaatatatggctgtactcccactggaaaagattcagtctactttgaagattcaaaatacattgaaactacattgaagaataaacatgaaaatgtgccctcactttaacctcactgccattctctttcaccagggaatccactgttaacagttttatgggtttgctttcaatcctttttctacgcatttacatatataataacagataccatttgacatagtagaaacaaggtctaagtattctgtgatttttttgcctttaacaatatgttttgaacatattttcactttagtacatatagatgggtatttcattattttggtggctgcatattattcagtaatactaatttattcaactattctcctgttgatatactgtgtccatatttattatttaaaataatatttcagtgaacatcattgtagatgtatctttatacaaatatggaagtttctctacaggatagatttgtagaaaacttgggagtcaaaggatatatgcatcttaaattttgttagattttgccaaattctctccacaaagacttgactgttttacaaatttccaagtgtgtgtgacagtgcatgtctcattacatttgccaacacaagatgttatcagtctcttttggccactatggtgggcaaaaaacattatattttattctttcatatgcttaaaattatttagagttgtacgaaccaaatgttatatcttttgaccattttctattaaactctgtctttcttgtattaattgggaaaatccttacatacattctggattttagtactttatcttagcccaggcatggtggctcatgcctgcaatcccaggagttcaaggtgagaggattgcttgagcccaggagtttgagaccagcctgggcaacatagtgagatcttgtctctacaaaaaactttaaaaatttaaaaaattaaaaatcatttatcttatatatgttgcaagtattttctgtcacttgccttttaattttaattgtaagaaaaactcggccaggcgcggtggctcacgcctgtaatcccagcgctttgggaggccaaggcaggcggatcatgaggtcaggggatcgagaccatcctggctaaccatccccgtctctactaaaaatacaaaacattagccggccgtggtggcgggcgcctgtagtcccagctactcgggaggctgaggcaggagaatggcgtgaacccgggaggcagagcttgtagtgagtagagatcgcgccacggcattccagcctgggcgacagagcgagactccgtctcaaaaaaaaataaagaaagaaaagaaaaactcatcattttgttcatgtcctttgtagggacatggatgaaattggaaatcatcattctcagtaaactatcgcaaggacaaaaaaccaaacaccgcatgttctcactcataggtgggaattgaacaatgagaacacatggacacaggcaggggaacatcacactctggggactgttgtggggtggggggagggggaagggatagcattaggagatatacctaatgctaaatgacgagttaatgggtgcagcacaccagcatggcacatgtatacatatgtaactaacctgcacattgtgcacatgtaccctaatacttaaagtataataataataaaattaaaaaaaagaaaaactcatcattttaatttgtaattcacaagttaatttttaagaggtcagctctctctctcaatcttatcctgtatggattctgaattttatgtcttatgtcaaaaagcctgtaataaatattctttattttcttacaatacttatataacttgttttaaagcctttagcttttttaatccatctagaaattgttttatggtgtgtgaggtagaaaggtggtcaatttttttaaatgaataaatacttaggcattatcttttctgctctatttcaaaatacaacctttattgttaaaattatttgcatatatgaggaatctgtctatatgaatctattctgttccattgaactctttcatctaattttggatcactatcatatttgttttggttattacaaacttcatatatcttgatgtgtgatagggcaaatccccttcctctgtccccactcatctttttaaactttttttgactattcttaaacagtatctttttccaaataaaatttagaatagcttgtcaagctctattttaatatcctattaaaatatgattgaaattatattgaatttaaaacttaatttggtgtgaactgactactttgctgtattggacttcttgttctaggaacatgataatctgtctactccatttactcaggtcctctcttacagttttctttatataggtctccaacatttcttgtttagttctggacatttatattttatattgctataatgaatgggattatattagtcaagtatgcctttagcaaaagatacagaaacccagacaaacagtaaacagatagaagttcatttaactcacataacaactcaagagatgggcaatacctggcagttgtgaccattcaatgatgtcagcaaagaccttggttccatcatcctcctgcttgccgctttatgagctcttttgatgtgatgattcaattctttcttctcttcttgaaagtttgcttctcttagtttcttggttatttcttctcttccattctctattaggccctctggaataccccgattagttaaatatcgggtgttccaaattgatccttcatgccttttaattttttctcttctattttatactctatttttaaattatttgttttgaaatattttctcaatcttagcttccacattgctaatttgatctgctaccatatccacttggttctcagggtatttactaaatttttattttaataattgtttttattttagctttgaagtgtgtgtccttttcttttccatagcagcttattcttttatcataggtactttattgtcctagatttttaaaaattctctgatgaagtattctggttttttctagagccagttctgtttgttcatgtggctcttgctcattcatccacaattcttaccgtaattactgaattacctgataattaaggtaactaattgctctttgttcaagtttctctggatctgattttaaaagtgtttatctcctgcatattttttagccagaggttacatttctgatcctatttacctgtcagttcagtcctttctgattcatgtgtcacaatttctaggcttttgtaggtaccctcttcactgttatgaaatattttaaaattatcttctgccagttttaagaaatgttcagtgggtgggaatagatacaccatgcatagcctacaattttaatctgctctcatagatgtcctaatgtgattctgataatcacagatatgactgtataactaaaaatgtcaactcatcttttctacatagcttgtttgtttttcaaaatgataaatacagcaactgattttgcaatgtttttaatacattttttaggtcaaggcaccctctttattttctgtattcaacaatgttattctagaagaaagcaaaaaaaacccagaagtatcagtattttccaaggatttgaaatttgatgatgaagttataaaaatggagcccagaatcaaggcccgaccaaaactgattagtttggatgataaaacaatactttcccttgcaaagactagcgtttacagtcatattgtggtgagtattgtgagaaatacagctttgagacaggaatcttgaatttggaatcagaatctagcatatgaagtcaaaagatactaaactgcctgtctgatgatgccaggtacaatgctacctaaagcgtccatttctctttttctacttggattaaatcagtgctctctagtagtaatataatgtgaaccacatatgtaatttttacttctctagtagctatgtttttaaaagcttttttaaaaagtaaaattaattttaataatacattttatttaactgaaatatcttagtttgttttctatttctataacaaaataccacagactgagtaatttatgaagagaatacgtttatttagctcatcgttctggaggctgggacatccaagatcatggtgcctgcatctggtgagggccttgcagtgtcataaaatggcagtgggcatcacatggcaagaaggcaagagcaagagagccagagagagctgattttataacaaatttactcccaagataatagacccactcctctgaaagtgacattaatccattcatgaaggcagagggagtaagttccaacacatgaacttttgggggacacattgaaactatagcacctgcatatctaaactattatcatgttaacatggaaccagtatgaatattcattaataaggtaatttcatcctaactcttaattctgaagtatattttacactctgagcacattaagactagtcacatttcaagtgctcaatagccatttgaggtggccttccaattagcaagggattttattcctgaataaccaatcagctctcttcaataagataaaggcagataagttttaaataagcttctagaattaatcaacatagaatatgggatctttacaaaattaatcaatggaaatcaggttacttattaaagtgacttactttatgccgagacaattctactgagatattaggcctacttctatgtctgacttttagatgtgttcatttcagatctgctgctaccactctatccaaactactatagtttctgacctagactattaccccagccttccaaccagactctctgtactctactattgcaatattgcacaactctagaaggcaaaattcacattatattctctttagtgtgccctttgggtgtcattcattatataactgaatagaactcaatacaagataaggggagtaggatgcctctagagttatgcaacagaggccctgtcctgtgtctgtaaatgtgcagcataataagagcaatcttctggctgacagtactgagaaattattatttctgcactataatatctagatttactattttagtaagaaattagtttacctgagtcaaaaacatcaatttagtggaggaaatagatatgtgaacacatgtaggaagctcagagttactgggagagatttatagaaagaggtgagctttgagtggattttgaaggacatgagaaatttagttgtttacatcttccagagagagaaaatattcttactgtagaaacatgcttttgaaagatccagatgtcttcagggaacactgaaaaatttagtatgcctagaatatagtgttacaatggtggagggtaaagatgtaggttggaattcaagaaagacacaggaagccagggctggaagagtatgaggttgtagccaaattaggatggattttggaagccaaaatttaaaagtttatattcttctgtttaaggaacagactccctttaaagaccctaactttgacagcttgtgcatggaattaactgaaatcagactggtggtatggaaattcagtagaaaactattgcactatccaaaggaaaaatccattcatttcttcactggataaccagaaaaccagctgcactgttacatcaccactaccactgcctaagtctgctaaggcactgatagtggtgatataacggtgtggcctgtttgagaaacagttctacaatcaaatgtataaagaaaagagggaaagcaggtgatcaacagtatgttagatagtgaagctctttatcagacacatagggaagatgaaatcagttgtggacatgttaaatgtgaggtttctgtagaatatatcatggatgatacccatatgtgacttgtaaaatcactagtctgcataaattggcccttaacaattttagctaattttgacagctattagaaatttaattgtttctcccttctaggaattttgttatgtccacaatataaggcataagatggtggtggtgaatgaagatagctgggagatagatacttgatactgtagtcagttgcattaatacattgtcttgtgcccttgtttattttgcaagccatacataaatacagtctttacttgataccactcataatggtataaagacagaaaaacatataggcatcaggatctctcctttagtataaatgtgtaataatatttgtttttatatagcctagaatgaaatggacaagaaaagtctgggccaaattctgatgtaggtgttgtcttaaacaatctcccacctcctcctttgaccttctgtcctcctacttcagcaccctcagcttttcttctttggttcggtgccctcatacattttcctgccatctctcttgtgtgaggtaccctacctgataccccaaatctttagggtctccattgttcactggttagccttagaaacagatctaccctaataagtatcttaacacatgtatttattttctaaaaagaatttcacgccaattgctgacaaacttagaccaagtgagaaatcatattaatcaagaaccaggtctagtgatactattacaaattatttatcttttaacatcatagattagattttttttcttattgactgtttcttaatgctatttaaaataactgctttcttattttgtagtatattggctcaaataattgttctaaacattttacatatccacacttcagtttaatgtagaatgtaacctgtattattttttaatgtatattttattttacttcagagtctgaatctacatggaaacagcttgagtaaattgagagatctctccaagttaacaggacttcgaaaactaaacattagctttaatgaatttacctgtttagatgatgtataccacttggtaagaattgttcctttgaatctaaaaaagtgaaactcatagaagcagaagtagaatggtggttatcagggcctaagggctaggggaaatggggagatattggtcaaagggtataaactttcagttataaattagacaagttctaggtatctgatgcacagcaagtgtggtgatggatgtgttaatttgattgtggtaatcattacacagttatatcaaatcattacattgtacaccttgaacatattcaaatttattctgccaatttaatattttttaaaaactgtgctgactctgggcacactgcccaggagttaggcctgctctcaaaggaacagctataaaataaaaagaaaaaactttggtgcagaaaaaagatcatgaagtcagaggacaaatgataaattggaataagcatttgaaaaaagagctgtccttttgaaaacattaatgtaaaataaaataattaatggataaattatttttgtaattacggcttcatatctaccatttacaagattatacagcctaaatcagcctaaatacatatactgtattatgttactttctctaaaacaggtcttaggttgaacttttgttagcagaccaaatccgtaccagtggtcatatctcatttctatctactttaaaatgaatatattaaaataacttctcaaatttgcttttaaaatgtactttggtgtaatttccatttttttctactcttgttttcccactcttctttctctctttctcatgaatccctatttctttttcattttgtagtttaccacttcacatcttaagatggtcagttcctcccatctgctcatccaggttattatttctttctttctgtcttgtcctttgacctgaatatcacatgcatagatcttgttgaatttgtgtttgccttcttgtatatcataggacaatacaggaatgcacatgtacacataggcatggatattgtctggcttttattttgttatacatcatataacaaaaataattacatatgtggttccagaactgcaacccagcatctcctgtttacatgggttccaggtcactcacttatctcttcagaatatatcatcattttcagctcttattcattctttattccagctccttgctactatatcaaagcctttacattatttcttctaccattgtaatgggagctgtttcttttacttattggcattaggtttagatttagtgttaaactcacttcctttttcttttggtaggcccaagcccttttaagtaagtagaatccctgagagtctggattcagtatgcaactgagggaaaaaggtattttagaagaggtctcaggactgtatgtagattgttggtatttttatttttttctatttatttgccagcacttccaaaattacgacagtcattataattttgcttaggcacagatttaaagagtaaactcattcaagacacttagatagagagtgagcttagccagctgcccagcatttattttgccatgtggtggtggtgttcaactttaatacaaaaattattttcattatcatagcctcacagtctacttgttaaatgactataaccttagtcattttacagataagggaactgggtaagttttatgccaaagtggtattttcaaattttaggatgagtaaaggtggctagctatagacctttcaaatgtcaagtctctaaaaatgactctaaggatattagaggtggccagagagaggagaaactctacatggatgtctatgtgtattttttcatctttttattataaaataaaacacagatacagagaattacatgctatatatatggcttagtacattgttgtaaggtgaaaatgcttgtaatcagcacccagatcaagaaagaaaattttgccacctagggcaaaagcctcttctatgtgccccatgccttcctctctccacaagaaatcattatcctaacctctgcagtaatcgtcttcctggattttttcctgatagttctgtcacccaaatgtacatccctagcacaatagtttggttttgccatttttaaaaaatgtaactgcgtttcttttgttgcttttggcaaccagttacattatttgtaacaacttgttatcattacagaggaagtttatatgcattgtataaaaacagaaaatgtaggccaacaacaaaacattctcaccacccagagatcaaccttaacttcttttttttttttttttttttttttttttttgagacggagtctcgctctgtcgcccaggccggactgcggactgcagtggcgcaatctcggctcactgcaagctccgcctcccgggttcacgccattctcctgcctcagcctcccgagtagctgggactacaggcgcccgccaccgcgcccggctaattttttgtatttttagtagagacggggtttcaccttgttagccaggatggtctcgatctcctgacctcatgatccacccgcctcggcctcccaaagtgctgggattacaggcgtgagccaccgcgcccggccaaccttaacttctttgtactctgtcttttaaatctcttttaattgatagatttcccttccatttcccatagtttatctctagaaatacttgagccattcgacccaaagagtttccagcagcctgggatttgcttacttaagatacatcgctatatgcctcccatcttctatatttcctgcaaattggcaagtggatccacagataggatcagacccaggttccatttttctggcaaaactaatgtttgacaagactgtaggagacacgtgatatcttattgtctcacttgtgtgatgccaaaagccattattacttaatgcagttggggattacaaaatggtgatattcttattctatcattatttcatttattatttggaatacttttacaaagagacatttctcattatctattattttatttcccagtggtagcattcacatagaaagtacagaatagatgcttatccaccagttttcaagataatgaatttgttccctatcatttcccaaagtgagcaactcttgttttaataacagtatgaatgcagggacttaacaatatttgattatattcaatccattgtaatttttatcatggttgaagctcagattgtctcatctttaaccagtgggagcttttcaaagttaacttcttttgccttgaccctaatggcctttgatagcttatttgacattggtataaaaagatgttccatacacatcttatatattttctgttgcagacacagtatcagccatgtcttcaagaaaccttagtttcttttagagagaagtggtccttcagaaacacaatccagttggtcataatttctaggtattagaaattatgactgactggaaactggactgaacttgttggaagggatatgaatatatgtgtgcatgtgtgttgcatgcgtgcacccatgcgtgtgtataaataaccttatgaattttttatacttccaattcaggttcaagaccacaaagctttcaacttcttctctattacttacatatatatacttttctcataccaagaatcctgattcttaaggatacaagatgatagaatatttaataattactcattgttttatctactgtcgtacacgcaacagtgtcataatgacagtacttatactattatcaatatcatttactggaaagattttctaaaaattttgtgtatgttcttcccattcttccccattttaaaaaataattaaaataattatactataactatattgttaccgcatgtagccttatgctctgtacactctcccttttaattcattggtaattgtatatttacttctcatcaccagtctttattttggtatctttctaaacattttgattgtctgaaatatatcctattatagatcataggaataatatcccttcagttactgaatgttaataacagtttagctatgtcctttatacttgaaaggtggttttgcaagatataaaatctttggctcacaatttatttttttggggcatcttaaatgttacttcattttcttctatcacaaagtattgttgtagaaagtctgatgagaatgtatgatttttttaccctttataagtcacaagcttttcttccttctagatggccaaataacttttttagttttctttaaagtctaataagtttactagcatttgtcttggtgttggttgttctgggttgtttttttcagattcacagtatgatcttccaatatgtagtttaaaatctttttttctttcaggaaagatgttttaaatttgaattttttaatcaatttttctgtttccttgctgttgtcttcttcttcagggactcccattatccatatgtgaaatcttctttatcatcagtatttgtcactttctcttgaatcctttttgtctcttcattcatttcttatcttaaatttttttcactttttcatcttgtatttctcttaaaagtgttatctattttttattcactcttggatatgactaatttagtgtttatttcttaaattattttattatttcatttcattgtttctgggtcctttcactccacgttttaaaacacttttttcgtttttgtaattcagatttatattgttattttatgtctcatatcattcttaacatcttttagtttgttttaaaacggtaggttaatagtcatgatatgtttcttgagcatatttttctggtgtacttttttgctaccagtaatattaacctctgtcttccccctctccacactcccaccatagctttgtcttgaatttgacctcagtacttttctctgctcatttgtaaatgaaattagtttttcttaacttttaaaatgaggtaaggttcaggaaagtttttctaacttcacagatcttcctcttctgttgtttatatgtactgtttaaaatttgtaatgcttactctgagatttttttggctctattccaatcctccactttagtctagaccttcctttttttttttttttttgagacggaatttcacttttgtggcccaggctgaagtgcagtggcgcaatctcggctcaccgcaacatccacctcctggattcaagtaattctcctgccttggcctcccgactagatgggattacaggtgcacaccaccacacccagctaactttgtatttttagcagagatgaggtttctccatgttggtcaggctggtcttgaactcccgacttcaggtgatctgcccacctcgacctcccaaagtgctgggattacaggcatgagccgctgtgcccagcctagatcttcttttttattcacctctcttgtccttatcctgtttcattttgagtttagccccaacagtttcttctatgagaaggattctgtcttgaagagagtcctagtggaatagtttttagattcacaggggctcgactgctccagggactgctttcttcagacctttcttttttctttttcttttttcatttttagacagggtctcactctgtcacccaggctggaatgcaatggcataatcatagagtacactgcagcctcaacttcctgggctcaagtgatccccttgcctcagcctcctgggtagctggaactacaggtgcatgccaccacaccctgctaattaaaaaaaaaaacaattttgtagagatggggtttcactatggtgcctaggctggtctcaaactcctggtctcaggcagttctcctgcctcagcctcccaaagtgctgggattacaggagccactgtaccaggccccttcagacctttttactgtggatcccatgaactcatctggtattgaagagaacaaaactcctccctatttcaattgctgtaaattggtctccacacattccagtgaatatttgttgactgttctggggctctcctgttttcaggtccatcagatgctgccctgacacttccttcttctcccacatgaataccatgcaggtcttgtgttgatggtggtttatctctaccaacttcttttggagcctatagagcaaccttgtcatgtagttttgttgtaaacattgtccatgaaaatttggttttatctatttgctctgtttttatgtgtggattcacagcatttgaaaacttctgttgcctctgcctctatattctctaatacttggttttatatgcatgtgtactattatgtttattccagtattgtaaaaagttatgatctaattgaatcactcacttataattcctatcttttaagtttttaaatttgctttgggatactcatctttactgtcattttccttaagtgtgtactaaaatggacaatttctatgcccttcttgcatgcttctcatataaatgaggtaagttggttctactaagttgtagaaagtaaatgtatcggggcagagccaagatggccacataggaatacctccagtctacagctcccagcatgagcgatgcagaagatgggtgatttctgcattttcagctgaggtactgggttcatctcactggggagtgtcggaaagtgggtgcagaacagtgggtgcagcacaccgagcgtgagccgaagcatggtgaggcattgcctcacccaggaagtgcaaggggtcagggaattccctttcctagtcaaagaaaggggtgacagacggcacctggaaaatcgagtcactcccaccctaatattgcacttttccaatggtcttggcaaacagcacaccaggagattatatcccgcgcatagctcggagggtcctacgcccatggagcctcactcattgctagccaagcagtctgagatcaaactgcaaggcagcagcgaggctgggggaggggtgcccgccattgcccaggcttcagtaggtaaagcagcccagaagctcgaactgcgtggagcccaccacagctcaaggaggcctgcctgcctctgtagactccacctctgggggcagggcattgccaaacaaaaggcagcagaatcctctgcagacgtaaatgtccctgtctgacagctttgaagagagtagtggttctcccagcacgcagctggagatctgagaacagacagactgcctcctcaagtgggtccctgacccccgaggagcctaactgggaggcaccccccagtaagggcagactgacacctcacatggccgggtactcctctgagacaaaacttccagaggaataatcaggtagcaacatttgctgttcaccaatatccactgttatgcagcctccactgctgatacccaggcaaacagggtctggagtggacctccagcaaattccaacagacctgcagctgagggtcctgactgttagaaggaaaactaacaaacagaaaggacatccacaccaaaaccccatctgtacgtcaccatcatcaaagaccaaaggtagataaacccacaaagatggggaaaaaacagagcagaaaaactgggaactctaaaaatcagagcgcctcttctcgtccaaaggaacgcagctcctcaccagcgatggaacaaagctggacggagaatgactttgatgagttgagagaaggcttcagacgatcaaactactcagagctaaaggaggaagttcgaaccaatggcaaagaagttaaaaaccttgaaaaaaaattagacgaatggctaactagaataaccaatgcagagaagtccttaaaggacctgatggagctgaaaaccaaggcacaagagctacgtgacaaatacacaagcttagtagccaattcgatcaactggaagaaagggtaccagtgatggaaaatcaaatgaatgaaatgaagcgagaagagaagtttagagaaaaaagaataaaaagaaatgaacaaagcctccaagaaatatgggactatgtgaaaagaccaaattacgtctgattggtgtacccgaaagtgacagggagaatggaaccaagttggaaaacactctgcaggatattatccagaagaacttccccaatctagcaaggtaggccaacattcaaattcaggaaatacagagaacgccacaaagatactcctcaagaagagcaactccaagacacataattgtcagattcaccaaagttgaaatgaaggaaaaaatgttaagggcagccagagagaaaggtcgggttacccacaaagggaaagtccatcagactaacagctgatctctcggcagaaactctacaagccagaagaggacagtggggaccaatattcaacattcttaaagaaaagaattttcaacccagaatttcatatccagccaaactaagcttcataagtgaaggagaaataaaataccttacagacaagtaaatgctgagagattctgtcaccaccaggcctgccctacaagagctcctgaaggaagcactaaacatggaaaggaacaaccggtaccagccactgcaaaaacataacaaaattgtaaagaccatcgaggctaggaagaaactgcatcaactaacgagcaaaataaccagctaacatcataatgacaggatcaaattcacacataacaatattaaacttaaatgtaaatgggctaaatgctccaattaaaagacacagactggcaaattggataaagaatcaagacccatcagtgtgctgtattcaggaaacccatctcacgtgcagagacacacataggctcaaaataaagggagggaggaagatctaccaagcaaatggaaaacaaaaaaaggcaggggttgcaatcctagtctttgataaaacagactttaaaccagcaaagatcaaaagagacaaagaaggccattacagaatggtaaagggatcaattcaacaagaagagctaactatcctaaatatatatgcacccaatgcaggagcacccagattcataaagcaagtccttagtgacctacaaagagacttagactcccacacaataataatgggagactttaacaccccactgtcaacattagacagatcaacaagacagaaagttaacaaggatatccaggaattgaactcagctctgcaccaagcggacctaatagacatctacagaactctccaccccaaatcaacagaatatacattcttctcagcaccacactgcacttattccacaattgaccacatagttggaagtaaagcactcctcagcaaatgtaaaagaacagaaattataacaaactgtctctcagaacacagtgcaatcaaactagaactcaggattaagaaacaaatttacaagaaaaaaaaaccccatcaaaaagcgggcaaaggatatgaacagacacttctcaaaagaagacatttatgcaaccaaaagacacaggaaaaaatgctcatcatcactggccatcagagaaatgcaaatcaaaaccacaatgagataccatctcacaccagttagaatggcgatcattaaaaagtcaggaaacaacaggtgctggagaggatatggagaaataggaacacttttacactgttggtgggactgtaaactagttcaaccattgtggaagtcagtgtggtgattcctcagggatctagaactagaaataccatttgacccagccatcccattactgggtatatacccaaaggattacaaatcatgctgctataaagacacatgcacacatatgtttattgcagcactattcacaatagcaaagacttggaaccaacccaaatgtccaacaatgatagactggattaagaaaatgtggcaaatatacaccatggaatactatgtggccataaaaaatgatgagttcatgtcctttgtagggacatggatgaagctggaaaccatcattctcagcaaactatcgcaaagacaaaaaaccaaatacctcatgtcctcactcacaagtgggaattgaacaatgaaaacacatggacacaggaaggggaacatcacacaccggggcctgttgtggggtggggggaagggggagggatagcatttggagatatacctaatgttaaatgagttactgggtgcagcacaccaacatggcacatgtatacatatgtaacaaacctgcacgttgcgcacatgtaccctaaaactgaaagtataataaaaaaaaaaaagaaaataaatgtatcgttgttacagtgttcatcattcctggccttgcctgtgtatcagtgtacttaaactaaggctttctttatgcagtggaaggactgggattcataagtcatagaaaataaatacatcatatagttgtatggaatttttcaaaaatctaaacaagatatccacataaggcaaattgaaatgtaataagctgcatgtctgtcattcactatcaggaaaagagaatatctgggagaaggaaatagagatgttttctctgaaaatagctccaccataattagtgttgactagggaaagacaaagataaatggctatttgcaacctcgatctagaaaacaattacaattctaattttttattgaaataatactgaatatcttatctttctgaatgagaaatctgttgttaagttgttcctgatgtctagagatagctaacctacatttagagaataaaccagtatcccaagaaaatttaagaggtgttttgagttttaatctttgtaagttgtactgtactgtactgtaacttgagagatttttaaactgaatcaaaagaaatattaaaacaaaatgctattgcaaaactgaaatactgtttcatgactatttaatgagttcctggaatctgttttatatcctgaagataacagaaataaagattccccccctgttttcaaggggtggaagaagacaggtttttttttttgttatattttattttattttgtttttgagacggaatgttgctctatagccaggctgcagtgcagtggcatgatcttggctcactgcaacctccgcctcccgggttcaagcgattcttctgcctcagcctccggagtatctgggactacaggtatgcgccacgatgcccagctaatttttgtatttttcgtagagatggggtttcaccatgttggccagatggtctcaatttcttgacctcgtgatccacccgcctcagcctcccaaagtgctgggattacaggcgtgagccaccgggcccgggcagaagacagttatatttttatgatgtgtggttcccaaatgctggtctacaggcaggtgccacaatgtgggacaagttttcaccagcttatgatgaaaattgggaacagaagggccatatagtaaattcttataaagcctaattcactttacttaaaggtgttttttttttctaaagttatggccttaatagttttttactgccaaatatcctttcgttcaagaaatgatgataggaagtgatagtttttgttttgttttgctaatgcttgcttctgataataaaaagtcagtaactctgttcattttcagaaatttttttaggttttaattcaactcttgaaacctgaaccactataagaagttctatcccaacaataagaattataccttataaaggaatgactaattccattctggattaaaagagttgtttgaattaagttgtagagaaatcaaacataacaaattaaagtcttagagattttttacaaacaagtaagatgaagatatgaatagataaatagccaaagacaagaaaggcaataaacaaaaaaagaatttaaaaatgaccagtataaacacatagaaaaatgttcaacttcaccagtaataatgtaaattaaaataaggcaggtggatcagtgagtatttgagaaaatgggtattctcattgtctactgttggaagaaaatgttggtacaaacttccttgaaatctacttggcagtatttatcgagagtcttaacaatacagaaagtctaagaaccagtgatcctgtttccaaaaacctgttctgaaaaatattttggagctgcaattagagaataattctcacggatgtttgttgctgtgttgccaacagttagaaacataaagatctatagtaaaatgtttttaaaaattatgatcacatagtcaaatatcatgcagtcataaaaaatcatctttaagaagatctaataatgtgaaaaaatgttaaaaggatacaaaattatatatgttttacataagaaaaaatatgtgcatataataaaaaacaatgctttcagtggttctttctgagcaataggattatatatgttttctattttttcttttcatttatttgctatattttccaaatttccaacaaggaacatgtgttacttttatgatttaagaaaattattatttaaaagtatgcactttttaaaaagaaaattattagtattaagttaacaggtttagtttctaactctgaagatgaacctttttaaagcaggctatggggctcaacagtataaacaagaagcctatatattaaaaagtacattttgtttgttggggataaattatcttgacagtttctttatatcttctctcctatgaaaacagacattgccactctgtgttacaagggtaaaatatgaattgaaagagaattactaaaacataatacctgtagctctttagacaaatgcatatgttgataccatcattgcaacataactactgtttatgtgtcctgtgaggattaccaggaagtgtgtaaagtatgtaaagaaccacagagaaactattttgtaaatacaaattatgattctcttagcatcacttttatttatatgtgttgcagtataaccttgaatatttggatgcaagccataaccatgtgataacccttgagggatttagaggtctgatgaaactgaagcacttagacttgagctggaatcaactgaaaaaatctggcaatgaaataaatatgttatgcaaacacaccacaagccttctcactcttgatattcaacataatccatggcaaaaggtatgccacagacatgttactaaaaagcaaacatttttattttcagagccatttccctactaactttactatttagtaatagccagagataggcaaagtatcttcgtttttctagacttccttccgtgaagtcattcataaattggatttaatgtactgatcaaatgaatcagatgttactataagaaaagactataatttcaaaacagattttttgtaacctctaatagattgagaacattattgcttttagtcattgatgtcattgccatttgcaaacctccagatattttatatagttcagtgtgccagaactctattttaatgagtcataggaaccaagaataatataatacagtgagaggggcacactattaaggaagaaacataatttgatttataatatatcctaatctgtggttgaacaacatgttttacaattttattttgcattttgcattattcactacttgttttctgttttaagtccagaaatcatctcccctcataaacttgcattataaagtcttatgttctcttataaaaaggaaatctgaacattattttttctcattacaaaaatatgtagattaatgctaggtaatttccatattccatgactatatttaagtatatcttcaagtatttaaaataagtcccaagattataaagtcaagaatcttcctttctctgcctttaaaagatgtatatcaggctgtgttcagcctttaaaaaggaaactaagcacagtaggttctattaaattgaccatattactaagtttatattattgtatttcttcttttttgctcagtaaaagtgaagaatatttttcttttgccaaagcatatttcctggatgatcacagtacagctatctctctgttgccaaattggattgtcaagggctaaagatccatattgaatcacacatggagatgactagcttactgctgatctagataaacaggagtcactacagttgttcttttaacacttttcaccgcagtcacttttcaatagcttatgggatttcccttcctcatcagagtagaatcatcaaccttcaaacaaacagattaattattcaacataatttcaactattatttaaataattaagctttttttaggtatatgtaatgaacaaggaaatgtatgattttgaattatatggaaagacatgaaaacagtcattttcatgccataacatatttaacagtttataaaaaattttttttttgtttttcccaagccagccacattgaggctgagtgttattggcagattaaagactcttacccatttaaatggagtcttcatttctgaagaagaagcaacagcagctatgaaatttattgcaggaacaaggattactcaggttggattttactgtttactattcattgtgctatttagaacatacagataatattttgcatactctttttctgtcattaagattttatagtccctcttagcctattaataaaaaattaatatagagcaatcataccacttggtattttttctgtttaaatgtatctcatttaaataccaaatcgttgtatggattctcttgactatccatgaacactacaccaaaaatacctctagggtaactgcttttttaccagtcacctgaactcaccagagccctttctagagcctacatgaaaataagcaactgtctgaggataaggtaagcttagaggccttcagaaagcattagtgaattatctatctacttaatattaacattatatttgtttggctgaaaggaacaaaatccattaacatggaaggaggggaaatacctttgttatccatattaagaatgctgtactttagccaaagtagcttcaacatcctaaatatatctactctagttttctagttgtttactttttgtggagtatctgaatattaattccttaggcaatataatgtttagttttggatctattcaaaattttgaaaagaaattttttattggtaaaaaataataataacactcctaaagaagagctgggaatttaccctaagaaaagaactaaaaatagaactaccattccactcagcaatcccatttctggggctataaccaaaagaaaattaattgttctactaaaaagacacatgcattaatatgttcattgcagcactattcacaatagcgaaatcacagaatcaacctaggtgcccatcagtggtggactggataaagaaaacatggtaaatatacaccatggaatgctacacagccataaaaaagaatgaaatcatgtacttcacagcaacatggatgcagctggagaccattatcctaagtgaattaacacagaaacataaaaccgaataccacaagttcttacttataagcgggagctaaacattgggtacacatggacataaagatggggacaatacacattggagaatacgacagggaggagggagatgggcagagctgaaaaattacctattaggtactatgcccactacctgaatgatgggttcaatcctaccccaaacctcaacattacgaaatgtctccttgtaacaaacctgcacatgtaccccctgaatctaaaatgaaattaagaaaattagttttttaaaaagaaatcaaatcctgctaaaatcctttaagacaatgtggtattggcacagagctagacaaatagaccaatggaacagaataacaacctaatatagacggtggaaactttataaataacagagctgcctttgtagatcagggagattattcaataaaaggcattaaggagtttattgtaaaaggcaaaaccaaaaatttttttgaagaaaatatgaaagattatcattatgaccttgaatttgtgaataatttagtaggcaagaaacaaagagcataaaccataaataattggacatgtctacattaaaattaatatatcttttttcaaagaaagtgaaaagacaagctacatactgggaaaagaaatttgcgacacaactgtcaaaagatattctttatatatccagaatatataaggaaaaagacaaccagccgaacagaaatatgtgccgaagatctgaacatacacttcactggagaggaaatcagaacagccaattaacttaggaaaagatactccaccatattagcattcaagaaaatgaacattaaaaacacaatgacctaccaatttttgccagttttatagatgagcaaaaactttaaagtctgacaataccaagttgttgcaagaatatgaagtaaaagtgtaatttttctgaagtggtacaaccactctggaaaacaatttgacattattcagtaaagctgatgtatatttgtgtgtgtgtgtgtgtgtgtgtattctacaacccagcaattttactttacttaggtgcatatactctaaagaaactcttgcatgtatgtaccaggaaacatgcacaagaatattcatgacgacagtgtttataatagcaaaaactgaatcaaccccaatgttcattgacaggagagtcattaagggaatactatacataggacatatgaatgaactacagctacatagagaagcttagatgaatctgatgaatatgatattgaacaaaaaaggcaagtcataaagaatacatacatattcaatttacatgaagttcaaatatgtgcacaactaaatgatatattgtttatggacacagacataggactataaagaaagcaaggaatggtggacaaaacatttgagataatgatcacttctaaagaaaaggaaagaaaagggcttaggatcgggcccacagggtgcttgtaatctattcataatattctagctcttaaactggtttcatgggtggattctatgtgtgttcatattatagtaatcattttacagtcttataaatattatcttgtaatggttccacatttgctaaaacaagaaacaatgtaattaaaatgtatctagatattgaaaacaatttaaggcaaaggaaatgttacattttataattatttattgggccactcatcttccctggaaacaataattttaactatatatcaactaacctctgtatactgtttccttttttcattgtattttttaaattttattagttatctctcttacggcattctagtactaaagaggagagaccacggatacttagtatatggccttctgccaaaattctgacgcaggtttcaaagttaggacctcatttacatctgagtggaaactgctacttgaaggtaaaggctaattctattaaacctaatataaagcttaatttaaatctatttttaagtcagtgttggtctgtgtatcataaagagggcacagataggtaagggacagaaagctggaagagattaattaaaatagggaagaaacacttaagatctaccctcttggcaaatttcaagtatacaataccgtatcgttaactttagtcattaactttagtcgttaaagttatcgttaactttgatgttgtacattagggtctctagaaagtattcgtcttgcataactgaaaccttgtacctcttgaccaacatctgcccacttcccattgcccctagcccctggcaaccactattctactctctcctatgagtttgactattttagagttcatatataattgagattatacagtttttaatttacaatgtatgcttatatcaagttatacatctttaatatatgcaattttaaattgtcaattacacttcaacagagttggacaaaataaaaataagaaagacattgttattattagtaaaaagtaatacatttgtcatattccaaaaaataaaaaacagggaggtcaagtcatgaatggctacgtcagatgggctgggccttgactgcgttcgccacagaattggaaatttaagataaaggtgcactaaaacttaaggacaaatttaaagggccattctaattccgtattctgataacatgtcagaataggcaagattctgataacatgtcagaataggaaagcaaactttaaaggctcagagccagagatcaagccaaaattcagacagcaagagtcaggtatcctgacaagggagtaggggagctggtcagaattcagccaaggataagggaaaaggttatagaacacttgcagcttcttgctacattaggtgtccttatacctcttgccaaacatagaaactgggctaagtgaagctgctcccagaaaatgggagacattactggcattacttttattacaagatatatatagatattgagctgcaaatgaaggcccagtgacagctttggctgacccacaggcagttctggagttagtggagttagaatggccctttaaatttgtcctaagttgggctgagatggtcaggcctttataggcttccatcactggctgagggccaacctgggaaggagagtgaccttggcagctgtctacagcaaggcagtccctgcagggactgacagctgaagactctgccagaagcactcccagcagctgggacaagtccattactgtaatgggactctagcacatcgcagtgtccttaataccatataagtccttcttggagttataatctcgtcaaattttacttttctgtaaactgacagcttcacaatatctttagctcctgaaggaattcttttgatatctatttatcacatttgaattatttcattagctttttaaaatgttattaacattgactgaatttataagatttagaaataacatacaatgtaaattattctacagataactgccttaaatttagatggacaacatctttttgaaatcacaaatttagaaaaattggaaaatttgaaatgggcatcattcagcaataataatctcactaaaatggagggtctggaatcctgtattaacttggaagagctcacattagatggaaactgcatctcaaagatagaaggtaaggtacttaagaactttgaagtctcaaaatatgggatgtctaaacaacaaagcaaaaaataaccctgggaacagagtttctgaagaggaagatctctaggaaagttccaagtttttgtggcagggtattctaaatacctgtgtgaggtaatgcaattattagttagctagattggaccattctacaatgtatatatatacttcaaaacatcatgttgtacaagataaatggatacaatattatctgtcaaattaaaaaataaaagataaataaaaaattaaaacgagttcatacctattagtggaattcgtgactattttactttatataatgagcccgagcaagctttcacctcctgtgccttctctcccctctcctctgtgctagtttataatctgttaccaaacattagcacataccaactagttagtcattaatgtctgtaaagttgagtaaacaaatgaatgaggtatgcttttgaaaaagataaagcagactagttctgttttgaaaatataaaattgaggttatatttggaaatttgaatactttaacaagaaatgaaaattatactcactagaggttgaaaataaaatatactatatgtaacattttccatggatccacatacaagtccaattaagcagctttagtaatatcttaataataatgataccaatataatatattttatttgactgtttaaagttcagtattaaaacatatttttctgaaccagagagaataaaaaagacttttcctccctttccccttccaagcttcttagattcttcacttcatttggatttatgcttatctacagctaaaaatcatgagtttagagaacatgtcctagaatatatactactaagtcaagtattttctgactcctccccagctttattttattcttaccttcattagaaagaaattgaaagaagctttccatgacttgctaccaactttctcttattctccctctccatctactcaaaagagtaactaactcctagaaattaaaaaatatgtccacaagtgtgcactatttgattgaaaagagaaatatgtatatgtgtgtatacacacacacacacacacacacttatctgaataaagaatatttctgtatgtgcattttggtaacatggttgtgtttgtcaaggagggaaggtaagaattagaaatcacggctgggaaacagaatttacattttattcatttttgaattggattatttttatcatgtgtatatactgcatttttcataaaatagaagatttgatttcacaaaattatatatataaaagcaagtattaaatatatttaagaaagcatacataacatttgtgacatatttcattttaatggctgttaacaatatgtttctaaaactttcttgatcatgagaatcacttaggacacttattgaagatacagattcacaggcctctcttctgtagatttcagtagagtaaacctaggggtagctcaggcacctgtgtcttgacctatcactagtctcccattcccatacaactggatattagttttgctttgtacatacaattaaaaaccctatttccttttcatttccttccataaacctattaaacagaagaatcttccaatctatatttttcttacacctatattttggagaagatagctacccctctaaactttaacaggaatttctcctttttcttcagacatgggtaggttccatatccatttaatgatttttgctttgatggctttgatcctatcttgccctggattgattcaccttcaacattgtacagtcccacaataggaactgatgtgaaaggggagcacagataattatttgatactttccaaacattattccatttaatttcataactccttggaagtaaattttagtatgcccgttttatggatgaggaaattaaggctcagaggttacacaatttatgtatcgccacaaacctagtagtgatatatttgaagccaactaggattccgaagttcttgtctttcaactgcactgtcctggctatacttataaagtgcttgcagtacataatgtatgcaggagttagactggttccattttccaaacttccatcttagagtacttttaggcataagcaagtaaaagtaggctagattgttcattttaatacaaacgatgcactttccagaatgtggttccttacccttaatatttaaaaatgagggctggtgattattttgagctttgtgtagagctttttgttttcaaaatgatgaaaatcttaattaattacatcattttaaggttatttgaaagagaaattcaatattttcatgtaatgcctttccttaactcctaagaagaaggaatctacttagaaatccaaaatttgaatttaatgtttgagatggggcttatacacaagattatattcttccaaaacaaaggcttaaagcaatgatggttagtattacagaatctttaaagccatttgaacctagctatctaattacaataaaatgaccagccacttattttttaaattaaacctttagtgttatctgaatcttttcttgaatttgcttatttttctaggtatttccaagatgactaaattaactcgcctcagcataaataataatcttctcactggttgggaagagcatacctttgataacatgcttcatcttcactcgctttctcttgagaacaacagaatcacttcattgagtggtttacaaaaatcttttactcttgttgagttatacataagcaataactatattgctgtcaatcaggagatgcacaatttaaaggtaatcatctgggtagtaatttttttgttttttaacatgtattgtttctttatattatgaaagtaatgcatgtttattgcacagaatttggaaaatataaagaaaataaaaataagaataacaagtttattaaaatgtatttgcattcaatgttgtatacatacaaaaatatatctgtgtatacataatgtccccatttgctatccttctggggtaactttttttaaatactcaagtatgataaaccaaacctattccttagcattctcctgttctcagtacaattcgtgatgatctttcactgttctcttaccagtggctcaaacttggtcgcctttgctcagatttgcttttgttaattcccccaaaaaaccactaatttaaggctgttgtgtaataggatttactaaaggtttgaacaaaacagagggtttctatagcacagaacaggaatttacttcaaatgtcatgtgtgacttcattgtttctaaagctcagtggccattttctaacactatgggtcttacactggcctgtccttttgctgatacaatattactaggactttatctcctaccaaaaacttgtgtccatttcctgtcttttcttagttcagacttctccccattccgttcccccagtataattactacttctagagctagggaggcaacctaatcaacaacaccagcaacacaataagccatttcacattatgatgcacagtagttttactccctcttgttttcagtagttttactccctcttgttttcacctctcccctccatacctgccaagacccttccttcacaacaaaggcatatcaaagtgtcttgtctaataaaacagcacatttcccttaggatgaattccactaccctctcagaaagtagaagcacttcagtttcatcacttttcaaatagcagtgtcttttattcctgttatatctatatagacacatacatccatttattaagccattattccataaacaaagtatatttgtcttaaacatagtgaagttccctctaagcccttaccattaatagataatacatttggcactagtatcctaaaagggattctgattatataacatagaccattgaaatactgcacaaaatatacctaagtggtctgaaagggtaacccttgcacttaaaagtgcactgaggctgggcgtggtggcttatgtctataatttcagcactttgggaggccatggtgggagaatcacttgagcctaggagtttgaggctgcaatgagctatgatcagaccactgcactccagcctgagcaacagcacgagaccatgtctttaaaaaaaaaaaaaaaaaaagtatacttaaaggcactgaaatcccatggaatgatagataattccaatattaaaatttgaggatggctaacctcttactagagtgctttaaatatacatatagatgaatatatgtattttattacctagggtttatgcaacttggtcattctagacatgtgtgggaacatcattatatggaatcaagaaaactaccggttgtttgtaatatttcatcttccagaactgaaagctttggatgggataccaattgtaagttgatttatgactcacaacatttggtctaagctgcatagtcacatatttataggacatagtcattttgaacattgctttatcactagcattatagccaaatttactatacttattaaatctaggtctccaaagcttattttagatctgggttttttaattttgtcatctggtcaattcttaattgtctgaattgtggtggaaagggagggctgtgctgcttacaatagaacccacagaattcagtgcctaaaaggtaaagaacacaattttatgggacaggatagaaaattatgcactggggatttaccatcctcctaagcctaaaagcagctttctattttcagtgcaaatatagttgctaatattaataattaagaaaaatatatttgaaccaacatgtggtatgtcaacattactaagtaagctgtaaagaaaaatagacacagaccctaggactgaatgtgaaagcaacatttggatactggattctataacaagcaaattcatagggctcctgttttccacatagcagggtaaatgcatgacaaatgtgtaaagagtaaaaggtttatggtgtaatgttgcctagctcctgtcagaaaagaaaacacatcaaattttctagaaaattgaaagatagttcatgatcatttagtattctgaggtactccaagaagattactaatcctagcccttctgttttctggcccatcctcagaatgggtcactaaaactttctcactccaacacatacaaattctctagaaccttgtatactgtgacttatttatttgttagctttcactgaaaaatgttttttaaaatagtcctatgagaccagtactgcatttactctaaagatgttgttgaggatcttatctgtcctatctctctgtgccctcatttgaagggccacatgaaaaagcacttatagaaataaatgtagaaaaaacatttaccgctaaggaaaagttatgttctgctcactgacaatgagtgtattagtctgaaatctgctactaataaagacatacccaagactgggcaatttataaaggaaagaggtttaatggactcacagttccacatggctggggaggcctcacaatcatagtggaagacaaaggaagcgtaaagtcatgtcttacatggcagcaggcaagagagcatgtgcaaaggaactcccctttataaaaccatcagatctcatgagacttattcactatcgcgagaacagcgtaagaaaaacccacccccatgattcaattacctgccactgggtccctcccatgacgtggggattattacaattcaaggtgagatttgggtgtggacacagagccaaaccatatcattccaaccctggcccttcccaaatctcatgtcctcacatttcaaaaccaatcatgccttcccaatggtcccccaactcagttcagcattagttcaaaattccacagtccaaagtgtgagctgagacaagtcaagtccctcctgcctatgagcctgtaaaatcaaaagcaagttagttacttcctagagacaatgcgggtacaggcattgggtaaatacacccattccaaatgggagaaatgggccaaaacaaaggggctacaggccgcatgcaagcccaaaatccagtgaggcagcaaaatcttaaagctctgaaatgatctcctttgactccatgtctcacatccaggtcatgctaatgcaagaggcgggctcccacagccttaggcagctccactcctgtggctttgctggatacagcctccctcctggctgctttcacaggctggcattgagtgtctgtggcttttccaggtgcacggtgcaagctgtgggtggatctaccattctggggtctgaaagacagtggtccccccctcacagctccaataggcagtgccccagtggggactctgtgtgggggctccaaccccacatttctttttggcactgccctagcagagggcagcaggcttctgcctggacatctaggtgtttccatacaccctctgaaatctaggtggaggttcccaaacctcaattcttgacttctgtgtacccacaggaccaacaccatgtcaaagctgccaagtcttggggcttgcaccctctgaagccacagcttgagctatacattggccccttttagccatgactggagtgactgggacacagggtaccaagtccctaggctgcataaagtatgggggccctggaccactccaggaaacgtttttccctcctagacctccaggcctgtgatgggagtggctgctgtgaaggtctctgacatgccctggagacgttttccccattctcttggcgatttgcatttggcacctcgttacttatgcaaatttctgcagccagcttgaatttcttcccagaaaatgggtttttcttttctactgcatcatcaggctgcaaatttttcagacttttttgctttgcttcctcttgaacactttgccacttacaaatttttcaccagataccctaaatcatctctctcaagttcaaagtttcatagatctctagggcaggggaaaatgccaccaatctctttgcatagcaagagtgatctttactccagttcccaacaagttccttgtctccatctgagaccatctcagcctggaccttattgtctatatcactatcagcattttggtcaaagccattcaacaagtctctaggaagttacaaactttcccatttttcctattttcttctaagccctccaaactgttccaacctctgcctgttacccagttccaaagtcacttccacatttttgggtatctttacagcagcacattactctaccaataccaatttactgcattagtctgttctcatgctgccaataaagacatacatgagactgtgtaatttataaaggaaagaagtttaatggactcacagttccacatggctggggaggcctcacaatcatggcagatgaaggaagagcaaaggcaggtcttacatggtggcaggcaagacagcatgtgcacgggaactcccctttataaaaccatcagatctcatgagacttattcactatcacaagaacagcacaggaaaaacccacccccatgattcacttacctcccactgggtccctcccacaacacaagtggattattacaattcaagatgagactttggtggggacacagagccaatccatatcaatgagtattatttaattatattccttttcactttgcctaaaagctcaggaccaaatttatgaatcaataatataaaccctataggatcttacagtctttttgtcactaatcctagtgagcgtgattttcactatgtatggtttgcattttactatttgattatatgtgtttcctgtaagctgccacaaattatttgtggaatgaggcagaatataaatgtatgaattaataattggacatgaagactagactgaagaatttagattttaaatgcaaggtaatgggaatgcattggatttgaagggcaaaggaaaggaagaataaaggatttctacaaggcttgagtctatgccaataaaagacaccataacagaatatgaatataggaagaaaagcaatttgggggtgtaagatgattagtattagacattagttttatatgacagaagatcatctgactggagatgtcaagcaggcagctgaaatcacaggattaaatatgcatatgaaaatttactttacatatgtttggacttggaagtaatttgaagagagttaacagttaagaccaaaagcatatgcaatattgtctaaggaaagagagtagagaaagtaaagaaatcaaagtgaggctctaatactttcatttattaaacatatgtagaaaaagaagtcatgaaaagtgggtgcagaggtaggtagtacagtaatatataatgctagagtgtctgagatataaataaactttggaaatggcatagttcaaatcctttattttatgtatgaacacaaggaactctagagaagttacatgacttctttcaagttatgtgactctttaatggtaaatcatgggcacctgagcctcattctctgtccaacactctctagacacataattacattgtcttctttggagtgggagtagaaaccaagggagggcatagactaggaagacccaaagaacaatttgggtagttgtgttttcattttatcttttgttcctatgtacttttatttgtaaaagattattttttgcattaaggatacatattctcaatttagatatgaagttttaacagattagaaaaaaagaagggagtttgagtaaaagtagatcaaatgacttaccagtttaatttagatcaagttcaaaccatttgtctgaaatagattgtcaaacaatagccattgggccaaatgtgacctgccacctattttagtaaataaaactttattggaacacatccatgcctgtttgtttatatataatctgtgactgctttcacactgcagtggcaaaattaaatagcaacagagaagctattgttcccaaaggctaaaatactgactgactctttacaggaaaactgtagaaaacatttgtcagcccctgatttaggaggacattaatcatatgttgcttgtataattatgaaaaacacaaaagcaatggtatttctaaggcttaatatgtttttattttttatttattttttgtacaattttatttatttatttttttaattttattattattatactttaagttttagggtacatgtgcacaatgtgcaggtttgttacatatgtatacatgtgccatgttggtatgctgcacccattaactcgtcatttagcattaggtatatctcctaatgctatccctcccccctcccccaaggcttaatatgtttttaaaacttattttgagattttattattgaggattcaacaagagaagcagaactagtaagatagatatacatatagagatatctatgtctatatatagaaatatagatatcaaggaatatttaataattgaggggactgcctaaacaagtctgacatccataggacaggccatcaggaagggaagattatggacaggctgggagtcacagggatagatgaaagctgctgtccatgagtagattttcttcaggaaaattctttatttcaggaaacttacctctgcttttaaagccttgcaattgtttgaatcaggcccatccagattattcaagattatctccttattgcaagtcaacttgctaggagctttaattatgtctacaaaattctttcacagcaatacctacatcattggctaaaataactggggactctagcttcaaatattttgcagctctgttgttggtgcatacacgtttaggactgttatgtcttcttggtggactgaccgttttatcagtaggtaatgttctgtctgactctggtaatttcctttgcttcaaagtttactttatctgagattaatgaagccactcctgctttctcttgattaatgtttaggatatctttttccattcttttactttcaacctgcatatattattatattcgaagtgagtttcttgttgacaacatacagttggatcatgttcttttaccttttagctaatttttatcttttaattgatgaacgaagaccatttatatttactatagccaactgacctgttagggcttatgtctgccattttgttttcttgttttatatttgtttcctttgtttatctttcttctgttttcttttttgtgccttcctgtgagcttcctgaacacattttgaaattctatttttatttatccatagtgttttttagtgtatctcttcatatagttttttttagtggttgttctattacaatgcatatacataacttactatagtctgttagtgttgacattttaccagtttgagtaaagtgtagaaatgttactttccttccagtctatttcttctctcctgttaatatttgacttaaatattttcaccatatacattgagaaccaatgagacaatattatagttttttcacatcaactaatcaaagataatttagaaaaatcaagaaaagaagggaagtttattaatactctttccattgtgctttcctctttcctggcattccaagattccttttttttttctttccatttcaaaaactttctttagtcatttcttagggtagttctgctggtaacagtttgcttagttttccttcctatgagaatgtcttgctttctctttttatttctgaatgatattttctctggatatagaattctgggttgatgtttctctttcaccacttgaaaatgtcgtgccacattccctggtttccatagtttctgattagaaatctgctgtcacttacattgtttttcctttataggtaagatttaattcctctgtcactgttttcatgccttttttctctgtcattagtttttagaaatttgattctgattattattatgtgtccttgcatggatttgggttttttttcctgtctgaggtttgcttagcttcttacttagtttcttagtttatgtcttttgccagatttggaagatttttggttataacttcttcaaatactttttcagccccacattatttctcttctttttctatgaatccagtgatactaatattaaatcttttttatggttccacaaatacaggatatgcccatcttggtaaagtgaggctcatttatttatgggtctattttctctcttttgttcatactgggtaatgtctattgttctgtcttcaagttcagttattcttttctcttttctttccactctgctattgagtccctatccattgcatttatttgtttacagtatttttcaattctaaaattttcatttcattcttcatatcttctattgctttgctatcacttatttctttgctaagggtttctgtttttttcatttgtttcaagtatgtccataattgcttgttgagcatttttcctttgactgctttgaaatgcaattaaaaatatttgtgtcatttcaaagttggcatccgttgatcgtcttttcacattcaagttgagatgttcttggttcttggcataacatactttttattttattctggacatttggggtattatgtgggtcttatttaaatctattttagcaagcctcccttggcactataccagtgagaagacgaggaacaactttgttgctgtcaggtgggagatagaagttcaaattcctccatttggcttctgttgacaacctggaggtgtgttcttcattaactgctaggctagagttggagttcatgctccccaccaggcctccattgatttactctggctgggaaggaaggaactccttgttactattacccagaacccttcactgattcatcctggctgggagagacaagaatacctaattgatgctccacagataactcattattactgggtggaagtgggaatccaaactccccatgttatctacaataacacttgcatgcagggagtggggacatgtgttactgctgaggagggatgaaatacaggttcccactcagcaggtggatgatgaagaagtgccttgttacagatgagcactggtgaaagtctaagcagcccattctgcttttacttgtgggcatgaagttgggggccacagtttattctgtaggatttagcaggagtaggcttgttatcgtctaaagttttctgctgtgctaggcttcccctttcccgatcctttgattagagagagcaggctttttgtggactttgtcttgttatttccttactgtcatttctgggtttctagcttctctaacacccagtagagattatgaggcaaaaagaaaatccagggtgtcattcctcaggtcctgaggtacctacctggtctgccttcttctccacatctttcagtattcttatgtttggttttaatttctttaattaaaaaaaatttttagagacaggatctcactctgtcacccagactggaatccagtggcatgatcatagctcactgcagcctctgaactgtgctcaagacatcctctggcctcagcctcccacatagctacaactagaggcatgtgccactgtgcttgactaattcttttttgttttttgtagagacagggtctcactttgttgcccagcctcatcttgaactcctggactcaagcaatcctcccaccttggcctcccagtgtgctgggattataggcattagccaccttgccctgcctatgtttgtttcatatataatgcacaggatttagctctacttagtaggaggaatctggaaaaatgagtccactgaatttttacctaaaaccagagaactatgtaatttagtcatctgtaagacaggacatcattttctaaatatcttcatataggaaccatcagagactgacagtgcaaaagatttgtttggtggtagacttacttctgacatgattgcagaacgacaaggacattccaacttcaaacaaatgcaagaactaaattggacttcatcatctattaggtacaatcattttattatatgcctttttacattataattacattatgtaattattatcatttttctgaagcttacatttatacaacttatctaaatataatcaataattcataaaattatctactgtactgaaaagattcatgctaagtaatgagcattttttgagatggggtctcaaaaaatggctcactgcagcttcaaccttgcaggctcaatcgatcctccgactataggcacgcaccaccaagcatggctaattttctttgtattttttgtggagacagcatttatgccatgttgccaggctggtctccaatcatgggctcaagtggttcacctgcctcagtctcccaaagtgttgggatttcaggtgtgagccactgtgcccagcctaaaattaaaaattcctttgtatggcataaaagactctttattatctgtccattattatctcttgtagtccttttctttactgcccatgacacttcatacttcagaaattctgaaatattctagttactgaatctcaatcataagatgttctttcatatttgtttctccctttgtttttcctgttgcactgcctagaactcttttctgctaatttgctcgacaaatacctataactcctccaaatatcatctcaagatgtttctcctccatgctgtcatccttgactttttaaaatagattttatttccctgaaatgccattacattggtatgatagagatgctaactctatcacagcaattctcctctttatttttatttttctggctcccacttcttgggggctgaaacatttctttcatctttcttgtagcctttccaaacacatccgctgcacttaggaaatactaatggaaatatgttgactgaatgaatgacttattagtgggtaaaagtatgtcataattgtaacttcaagtttaggatttatttagagaactggttagggaaagggatgtagttttatgctcttctctgtcatggctcaaatgaagatatagctatagactgggaatcaagcattctgtttaattaccaaaatgttcacacagggtggaatgccataaaagtttccagaagataccacagaaactctattttcaaagaccttacctgcttttcctttcctttcctatccctaaccacttcctggtatttcagaaatgacctacttcaatatatatcatctgaagtttataacctgaaaagcttatgatttacaatatcaacttcactatgatttcataaacatatatgtgaatttataaagaaagtggaaatgtctcttttataagtttcttctataatagtgctatgtttatatggtaatagatgtgtttttttttaaagcaaccaaattctatgtcactttcttgcatatgtacccaacaaaaatgtatattcagccgattatttaaccaattcattttacattaaagtaattatttttatacttgtcaggtgagactttttaaatgtctttggtggctgtatgtgaaggaactcaccttttcctatattttcctgtcctattaaaataatagctgtatttactttgtctaaattcagaacagtggatttgattccagtcgaccaatttagaaatgtgtgtaatgtgaatctacagaacaatcatcttacctcattcagtggattaatctatctacctaatgtgaaggtaagtcattcacaaatttttctttctttcaaggtttccaatacaaattattctttgctttggattaaatggtatttccatgttattaaagtagataaattattcctaaattttctttgggttttttttttgttttttactaagcaagaaaaaactattaccttccaaagtgattttggtgtgacctcagttttatgtgattgtcacatatttagtaaattttcctctgtagtcagagatgggattgaaggcagatatggaaagaagcttcaaggttctttaaacggccttattgcctccgttattatttacttgactcaggcatctactaaggccttttaaacataggtaaatagctgtcttttcgactaaaaattatttcatccttgtcaggtttggagaaatcaggagaacagattgagaaagttgaggagttttctagggtctccatgtgaagtactgtaatttcccagaatgtcagattaaaaacacattgaaaactaaatctagattatttaggatataaacatttgttgttttagcactaatatattattaaattatgtggtatattccaagttttatccatacaatttttaataatttctaggatttctgattaataagatattctttctgtaggtcttatgccttaactataatcatattgaatcaatcatgcccagactaaagcctcagactcacttaaccagtagacaactactgtaccagaaagtgccttcaagtggctatggacagcaaggaatttcaaaaacaaacaggtagtattctttatttttatgattataactaattttggctgggaattttaaaagcagttaatcacattaatgatagcagtaacacattccagtacataaaatttagcttattgtaatacctattttatttaatagctacatgccaaaaataaacttcataataaaaaggtactcaaaatatttctctcattgtttattctctgccttctccatttcaaacctatattgtgaataaagggaaaaaaccaaaaaacaaacaaacaaaaggccttgtactgcatgtttaatgaccttgggtttcttttttaaaaattgaggtacaattcacataccataaaactcaccctgtatgtacaatttagcaatttttagtttcttcatcataaacatttttatcaactcacaaaggaaccctatacacagtagcatggacgtgggctttttttttagcatttgttttgcttttatttctaaattatttatctggtcacttaatgactcagcaccaatggaatagatactttatgcaaaaaatgacgacaaaccttctacctccttacacatttttgacagaacatatatatacatcatatataatacatcatatatatgatatatatattttataatgtgtatctccaaatcagaatgctttcattccagttttcccaataaagaacattccttgtgctttttattacctctatcgaagtataatttccttgcaacaaaattcaccaatgtaagtgtaaagtttaatgaattttgacaaatgtattcaatcataaaacctctaccacaatcaaaatacaaagtattcccattccagaaacttcctttgtaatctctcccccgacaccctggcacctggcaacaaccactgatctgctctctcgctataattttgcctttttccagaatttcatataattggaattatgtagtaagtagtttttgtgcctggctccttttacttagcataatgcttttgagagtcattcattttgttccaagtgtcagtaatttatttcattttattgccgaatagtattctattatatgtattatatgacaagttatttatgcatttatcattgatgaacattttggttgttcctaattttaggctattacgattaaagctactatgaacatttcatttatatacatacttttttggatcctattcatatttgatttttctaatagttttattgaagtggcagttaatgtatcatgtttacttatattaagtgtataattcaataattttactaaatttatagagttgtataatcatgactgcaatacaattttataacattttccatctcaccaaaaagatccttcatgtccatttacagtcaacttcctttcccacctctagtcccaaacaacctctaatctgttttctagaattgtattttctagacattgcatataaatggaactataaaatagacggtcttttgcctctggcttcttacactcagcatgatgttttcaaggttcattcacattatggcatgtgttagtagttccctcctttttattgctgaatatattggccatttcactgtatggatatgactgtatggatatgttacataatgtttattcatcagttgatggaaatttggattgtttctattttttggctggtttgactaacactgctttaaacatttgtgtacaaatatttgcatgcactcatattttcattatgtttattttgggtagatacctatgagtggaatggttgggtcatacagtaacttaacatttagctatttaagaaaccgctaaactgttttccaaaatggttgcaccatttttcattatcaccagtagcatgtgaagattttaattcctgcacatctttgccaatgcttgttattgcccatcttttatagtatagccattctaatacatttgaagtggtatctcattgtggttttaatttgcattttcctaatgacgaatagtgttgagcagtgtttcatatgcttattaatccttcatatatcttctttggtaaaatctctattcgaatctgaaacctaataaacctaattgtttaattaggttgcttggcttttcattattaagtgtctttatactgggggtaagccctttattaaaaaatgatttacagatattgtctctcaatctgtggcctctcttttcattttcttaaatgatgtctttgaagaaattttaattttgataaagtctaatttaccatcttttctcttacagattgcaatttaggtgttatatgtaataattctttgcctaacctaaggtcacaaagatgttctcttgttttctttaaaaagttttatgttttcactcttacatcgagtcctatggtctattttgagttaatgtttgtgtatgttgtgaggtaggagtgaggtctaaatctatttttgtatgtggatattcagttgtctgagcaccatttccttagaacactctcctttcctctattgaattgttttggcacctttgctaaaaatcagttaagcataaatgtaagagtttatttatgtactcagttctgttccattgatctgtatgtctgtccttttgtgccagtactagactggtttgattactgtggttttataaaaaattttaaaatcagtgatttaagctctccaactttgttcttttaaaagattgttttgaatattctagattctttgcatttctttataaattttaggataagatgtttattcgcagtgagtgggggggatgtcttctgggcttttgatagagattgtattaaatgaatctattgatcaatttgggagaattgccattttagtaatatggaatcttctaatccatacacatagaatatttctctatttatttagatctttgttaatttctctcagtaatgttttgtagttctctgtgtacagattttccactttttattaaatttatgctgaagtattttattcttttttatactttgtgaaaagaatttttgcttaatttcattttcagattatttattgctggtaggtagaaaattcagttgatttttgtacattaatcttttatcctgtgaccttgctaaactcctttattgcttcaagtagttttttggtggatcttttaggattttctaaatacaggatcatgtcatctgaaaataaagacagttttatttactcctttccaatctggatgcatttttttcttgcctgattgcattttctaatgcttttcattgtaacaccttatgtacttctttattctagaccattctttttaaagaataagtattattatataaaatataaacagactgtattaagcttaattctgatatattaataaatttatattttcttaacttcagtttatagtaaacacatactgaactgtctttttataatatagctggtttgaagttaagtttatggcctcaaacttacctatgtgtttcagagatataatgagcagtgaaaatttgcctccaataatgcacagtttagaagttcttcatttgggctacaatggaatttgtaatttgatccagctacaacttaacagactaagaaatttaaaattcctctttctacagggtgagtagaaacactgttactgtataagtctttatttttaaaaactgattttatcatcattctgttttgataagcaaatataagcatcagtatttactcaaacattcatagacaaaaatattttaataatcacaaattgatttttcttggttacttacattttttagaaaccatttttaaaggtcaatgcagtattctgagaatatatatagtattacgtcataatttacttgtatatcgtattcaacttaaaaaacaataaaaaaaacagtggataattcacaagtatttattaaacccagaattgtggtaagtactatgaaagatatggaagtactatgttattataattatgtatcattgaaatccttgatctaagtagcttaagatctatctgtggagatgtactgggccaaagatgaagttcagactatgtattactaacttaagtgcaatagaagttcagagagaagagaaattaaaagattagctcgtcggcatgtatagaactctttaaaggagtgatagaatctagattgaaggtgagcattactgagtgctttgcaagcagggggaggaggaaaagagtcacaggacatgactgtggtgtctatgggccaagacttgaaaagggaacaacctgatgagaacaaagaatatgcacttttctaagagagttataaatcctctaaacatgattaatttgataaataatcctcatttcaatatatgagatcattttatttagtttttgtttaaataagcctcattactttacagtaatttttttattatacttcaagttctgggatacatgtgcagaatgtgcaggtttgttacataggtatacatgtgccatggtggtttgctgcacccaacaacccatcatctacattaggtatttctcctaatgctttcccttcccttgtccccctactccctgacaggccccagtgtgtgatgttcccctccctgtgtccatgtgctctcactgttcaactcccacttatgagtgagaacatgcagtgtttggttttctgttcctgtgttagtttgctgagaatgatggtttccagcttcatccatgtcgccacaaaggacatgaactcattcttttttatggctgcatagtattccatggtgtatatgtgccacattttctttatccagtctaacatggatgggcatttaggttggttccaagtctttgctattgtgaatagtgctgcaataaacatatgtgtgcatgtgtctctatagcagaatgatttataatcctttgggtatatacccagtaatggggttgctgggtcaaacggtatttctggttctagatccttgaggaattgccacactgtcttccacaatgtttgaactaatttacactcccaccaacaattagtaatttttaaattttgtggaatagtgaaaaattgaggttgaaaatatagagccaggaccaaagtagggaaagccaagcagagaaatttgtacaggatgtagtcaacaatagataggagcttgaaactttgagaagtagcgtgagaaaaacacagggcttgggacattagtctaacaataatttttaatggcataggagaaaggcaggtatatccatcagtgggacatgtggggagacatcgaggtagttgatctgagtatggtaacttctcaaagacaggcctttctagaccatatttttaaaaatttgaatgcatctatcaaaagcacttgtgatttggatcaagaacctggagacctggccttaaaaacaagaaattcagcacaatgacagatctttttttaaaaaaataattattttagattcaaggggtacatgtgtatgtttgttaacatggtattatgtactagtgggaattgggctgctagtgtacccattgcccaaataatgaatatagtatccaataggtaatttttcaaccctcacccccctcccattctccccctttttgcggtgtacttattgttggagcgtacttactgtgtacttattgcttagctcccacgtgtaggtaagaacatgcagtatttgattttctgtttctgagttagctcactgaggataatggcctccagctccatccaggctgtggtagagggcatgatttcattcttttttatggctgtgacagattgatttttgtttttgtgtttttttcggttggttttttgtttttggttttttttttattttttattttattatttattattttttgagaaagggtctctctgtatcacccaggctggagtgcattggcacaatcatagctcactgcagcctcaacctccggagcccaagtaatcctcccacctcagcttcctgagtagctgggactataggcttgtgccaccatgcctggctaattttttaatttttctatcttttttttttgatacggggtctcaatttgttacccaggctggtctcagactcctggccttaagagatcctttcacctcagcctcccaaaatggtgggattacaggcgtgagccaccactccctgcccagatattttaaaagatacactgacatacaaaaaagcagaccacctaaccctggaaggtctatttcaatctaataatgtaatggaggagtatgttctgatgccatggcgagcatggcaaattagagtagggcagccttattcaggaagtgaggcagtttactctgacaataacagctgccatttatggagtcactaggcaaggtgtttgtctacatagattgtcatatttaatcttcacagcaactctacatggtaaggattgttacatatattttacaaaaaaaaaaaaaaagaaagtgacattcagtgtggtttaataatttgccaagtttgcaccagtgtgtgttatggtacaaagtcaaacctagatctatctacctccaaagcacatgcagtttctatccagcttgaatggtataataagggcatagactagagtgctggcagtgggagtggtaagaggtgaatccaaaaggcagtttaaaaggaataaatattaggacttagtggctaattagatgtaaaataaagagaaaaactgtcccagatgtttttataatttcattgggagattgggcaagaggaggtactaaagctaaagtcattgggaaatgttgctcatttgggagtagagaaagatcagcttgtgttataacaattttgatgcactaaaaatagaaactttttctagcaatagtactggaccacaagtcaggactagagatacattattttagaatgatcacaatggaagtgacaggagaagtcaaaaatgtatgtgcttacttaaaagtaagcacacagaaagatgaatgaaaggctgagaagagctttgaagacattctacccctttctctatatccttgtcagcatttatgattgcctgtcttttggataaaagccatttttactggggtgagatgatatctcatttgtatttcccttatgattagtaatgctgagcatttttccatatacctgttgaccatttgtatttcttcttttgagaaatgtctatgcagacctttttcctgttgagttgtttgggctccttatatattctggttattaatcccttgtcagatgggtagtttacaaatactttctcccattctgtaagctatctcttcacttcgttgattgtttcctttgctgttcaggagctttttagcttgatgcagtcccatttgtccatttttgctttggttgcctgtgcttttgaggtattacacaagaaatctttgtcaagtccattttgattttatttttgtatatgatgagagataggggtcaagtttcatttcttctgcatatggatatccagttttccacccaccatttattgaagagactgtcttttccccaatgtgtgttctcagcacctttgttaaaaatgagttgactgtaaatgtgtggatttatttctgagttctctattctgttcccttggtctatgtgtctgtctttatgccagttcttaagaggacactagccatattaaattaatgctcatcccaatgacctcatttaaccttaattatctttttaaagaccctttctccaaatacagtcacattttgaggtactggaggttaggattttcacatatgaattggagggggacacaattcagcacataataatcaaggagaatgaatattgactgaaatgtagtatggcatactagaaagataattgagcttaaaatgtaaaaggtctaagttaggcctgatactgccatttttatgtctttgagaaagccacttaatttctctgaccctcaattttctgattagaaaaaagagataaaatatttcccctgtagtattttgagactctaatagaaaatactgtacatataaaagcattttgtaaattggagagtcttcatataagttatcattaatatttatatagctattgatagctacaatagagagaaatcataggtttataaataaggtttagagttttgaagaattaaatgaactttgatgtgtttaatatgattgcagtgcaaaaatatgagaaagaacagcataattaatgtgtattcttctaacataatacaacaaattagtctattttaagaaataattaaatatactattgtaatatctattagagtactaatatactcaggaagcgtatcttctgcagcagtcttctatatctacttttgtcaataccgactattttaacacttaattaccaaacagacatattagatcaattcagtacattctgtacatcacatcctgatctttcaaattcacaaatgagaaattttagcaaatattattttatgatgatgctaccttcctgtaaattacatttcaatttctctttggaaataagtttcttgaatcctttacttcttttgacaaatcatctgattaaaaaatatttaaatgtaagtagatatcctttacttcaggaagtttgggctcacttgatatatcatgacttatctctttttaggtaatgaaatcagccaagttgaagggcttgacaacttagtagtccttcaagaattggtagtggaccataaccgcatccgatcatttaatgacagtgcttttgccaaaccaagttctttattggcacttcacttggaggaaaacagactacgagaactgggcaaattacaatctttggtaaaactagagaaactcttcctaggatataataaaatccaggtaacattattatttttttattatgggatttacaagctttagtttctctgagttctgagcataaagcttccaaacacatcaatgaaaatgttgctagtatattatttatcacctatataccatctatatttcaagtcatagaaatagtctgtgatgcagaaatatccaccctacttctagacttcagaactggacaaagcaacatgcacaagctcattaacaaagattagttctacgtgttctaaggctcttctcatcagtcctctctgagagttctcatttgttccttgactgctcttggtccaagttgtttctgaatctcgattccggacttcctttggccccttaaacttgtcatatgtacttgttctacccggcatttgaatcaactcctgataatggactttgacttggcttaatattttatctctcccc

SEQ ID NO: 315 - DNA, 3369 bp, Homo sapiens
atgtttttcttagggtatcctcgtatagttggattatcattatttcctaatttaacgagtcttaccattgttgctcaagatataaaagaaatttcagggttagagccttgtttacaacttaaagaactttggattgctgagtgctgcatagagaaaattgaaggtcttcaagaatgtagaaatttggaaaaactatatttatattttaataaaatttccaaaatagaaaatttagagaaattaatcaaattgaaggttctttggctgaaccacaatacaattaaaaatattgagggtttgcaaactttgaagaatttaaaagatctcaaccttgctggaaatctaataaatagcattggtcgatgtcttgactccaatgaacaactggaaagattaaacctttctggtaaccaaatatgttctttcaaggaactcacgaacttaaccaggctgccttgcttaaaggatttatgtctgaatgaccctcaatatacaaccaatccagtttgtcttctgtgtaattattccacacatgtattatatcatttgccttgccttcaaagatttgacacattggatgtgtcagcaaagcaaatcaaggaactggcagataccacagcaatgaaaaaaataatgtattataatatgcgtataaaaactcttcagaggcatcttaaagaagaccttgaaaaactgaatgatcaaaaatgcaaattacaaaagttgccagaagaacgagtaaaattattcagctttgtgaagaaaactttggaacgagaactggctgaactcaagggctcgggcaaagggcacagtgatggatccaataacagtaaagtaactgatcctgaaacactgaagagttgtgaaactgtcactgaagaaccaagtcttcaacagaagatattggccaaactaaatgccttgaatgaaagggtaacattctggaacaaaaaactagatgaaattgaagcaatttatcatattgaagtaaaacaaaagaagaaaagtcatggcttattgatcccacttttgttaattgagttagagactgtgggaaatttccattttgaagaaggcactcgatctgatgactggtttaatttctgctatgaattaattctgtcacgtttttgtgcctgggacttcagaacatacggtattacaggagtaaaagtaaaacgcatcattaaagttaacaaccgtattctgagactaaaattcgaagagaaatttcaaaagtttttggagaatgaagatatgcatgattcagagagctaccgaaggatgctggaatgccttttttatgtttttgatcctgaagtttcagtgaagaaaaagcatcttctacaaatacttgaaaaaggattcaaagacagtgaaacaagcaagctgcctctcaaaaaagaagccatcattgtttctaacagtctaagtataagtgagtgtcccagaattgaatttttacagcaaaagcacaaagatgagaagaaaatctctcttaagcatgagctcttcagacatggcatcctcctcattacaaaagttttccttggccagagtgttcaggcccatgaaaaagaatccatcagtcaatccaactatccaatggttaattcagtgttcattcctcggaaatatttactaaattctgtcatgggacaaagaaactgtgattgcagtgttcggcagtgcaagtggtttgtctttgatcatgaccttgttttgccggaatatgttgttgaatttgagtatattacaatggtcaaggcaccctctttattttctgtattcaacaatgttattctagaagaaagcaaaaaaaacccagaagtatcagtattttccaaggatttgaaatttgatgatgaagttataaaaatggagcccagaatcaaggcccgaccaaaactgattagtttggatgataaaacaatactttcccttgcaaagactagcgtttacagtcatattgtgagtctgaatctacatggaaacagcttgagtaaattgagagatctctccaagttaacaggacttcgaaaactaaacattagctttaatgaatttacctgtttagatgatgtataccacttgtataaccttgaatatttggatgcaagccataaccatgtgataacccttgagggatttagaggtctgatgaaactgaagcacttagacttgagctggaatcaactgaaaaaatctggcaatgaaataaatatgttatgcaaacacaccacaagccttctcactcttgatattcaacataatccatggcaaaagccagccacattgaggctgagtgttattggcagattaaagactcttacccatttaaatggagtcttcatttctgaagaagaagcaacagcagctatgaaatttattgcaggaacaaggattactcagttatctctcttacggcattctagtactaaagaggagagaccacggatacttagtatatggccttctgccaaaattctgacgcaggtttcaaagttaggacctcatttacatctgagtggaaactgctacttgaagataactgccttaaatttagatggacaacatctttttgaaatcacaaatttagaaaaattggaaaatttgaaatgggcatcattcagcaataataatctcactaaaatggagggtctggaatcctgtattaacttggaagagctcacattagatggaaactgcatctcaaagatagaaggtatttccaagatgactaaattaactcgcctcagcataaataataatcttctcactggttgggaagagcatacctttgataacatgcttcatcttcactcgctttctcttgagaacaacagaatcacttcattgagtggtttacaaaaatcttttactcttgttgagttatacataagcaataactatattgctgtcaatcaggagatgcacaatttaaagggtttatgcaacttggtcattctagacatgtgtgggaacatcattatatggaatcaagaaaactaccggttgtttgtaatatttcatcttccagaactgaaagctttggatgggataccaattgaaccatcagagactgacagtgcaaaagatttgtttggtggtagacttacttctgacatgattgcagaacgacaaggacattccaacttcaaacaaatgcaagaactaaattggacttcatcatctattagaacagtggatttgattccagtcgaccaatttagaaatgtgtgtaatgtgaatctacagaacaatcatcttacctcattcagtggattaatctatctacctaatgtgaaggtaagtcattcacaaatttttctttctttcaaggtttccaatacaaattattctttg

SEQ ID NO: 316 - protein, 1119 aa, Homo sapiens
MFFLGYPRIVGLSLFPNLTSLTIVAQDIKEISGLEPCLQLKELWIAECCIEKIEGLQECRNLEKLYLYFNKISKIENLEKLIKLKVLWLNHNTIKNIEGLQTLKNLKDLNLAGNLINSIGRCLDSNEQLERLNLSGNQICSFKELTNLTRLPCLKDLCLNDPQYTTNPVCLLCNYSTHVLYHLPCLQRFDTLDVSAKQIKELADTTAMKKIMYYNMRIKTLQRHLKEDLEKLNDQKCKLQKLPEERVKLFSFVKKTLERELAELKGSGKGHSDGSNNSKVTDPETLKSCETVTEEPSLQQKILAKLNALNERVTFWNKKLDEIEAIYHIEVKQKKKSHGLLIPLLLIELETVGNFHFEEGTRSDDWFNFCYELILSRFCAWDFRTYGITGVKVKRIIKVNNRILRLKFEEKFQKFLENEDMHDSESYRRMLECLFYVFDPEVSVKKKHLLQIKGFKDSETSKLPLKKEAIIVSNSLSISECPRIEFLQQKHKDEKKISLKHELFRHGILLITKVFLGQSVQAHEKESISQSNYPMVNSVFIPRKYLLNSVMGQRNCDCSVRQCKWFVFDHDLVLPEYVVEFEYITMVKAPSLFSVFNNVIESKKNPEVSVFSKDLKFDDEVIKMEPRIKARPKLISLDDKTILSLAKTSVYSHIVSLNLHGNSLSKLRDLSKLTGLRKLNISFNEFTCLDDVYHLYNLEYLDASHNHVITLEGFRGLMKLKHLDLSWNQLKKSGNEINMLCKHTTSLLTLDIQHNPWQKPATLRLSVIGRLKTLTHLNGVFISEEEATAAMKFIAGTRITQLSLLRHSSTKEERPRILSIWPSAKILTQVSKLGPHLHLSGNCYLKITALNLDGQHLFEITNLEKLENLKWASFSNNNLTKMEGLESCINLEELTLDGNCISKIEGISKMTKLTRLSINNNLLTGWEEHTFDNMLHLHSLSLENNRITSLSGLQKSFTLVELYISNNYIAVNQEMHNLKGLCNLVILDMCGNIIIWNQENYRLFVIFHLPELKALDGIPIEPSETDSAKDLFGGRLTSDMIAERQGHSNFKQMQELNWTSSSIRTVDLIPVDQFRNVCNVNLQNNHLTSFSGLIYLPNVKVSHSQIFLSFKVSNTNYSL

SEQ ID NO: 317 - DNA, 60202 bp, Mus musculus
  misc_feature (1)...(60202): n = A,T,C or G
tctctgagggtgcgtttccatccatgaccccaatgtggagactccctcaactgagctggaggagtattactctggaacagcacacactggctgacttcaggccatgtgtgctttaggaaaacttaggcgtcaaacctggctcccttgcctggagcggaagagccttcctagaagtggcaatcccacccctcccccaccagagcccacacactagtccagtcactacccctgcgcaccttccaacacttctctccaccacaccagggctgatgagtgtcagaggaaatgccacctcatggcagaaaacctggggggactttcctcccttccataaacatttactgaaataacttttctgctgatggttgttttaagacctgcagcagaaaaggagacctgcgaactagtcccactgtaacttttgttcagccagatctgtgtcatcggtgtgggccctaattttgtccttgatgaaatacagcacctttccctcgctttcacgggctaggttttgctctctgtgaggtatgactgataattctgtctctgctctctatctgcctggtggagattgttaaaagccagaacccaggctggtttctgcctctgcagggatttaaaaggaattgtttctaggccctgcccgttgtttatttaaatgtgtgtcaagtgccaatcagatgtttggcacgtgtttggcattctggaagttttaaatttttaacctgttgttgttcccctcccccgcccccctcacctctacatcagggctgagcagatgagggtggtggtgaatatgaaataagaaacagttttaaatcgaagaccatcagatattggggggggggggtagagcttctcaactctggagagggaggagtcaccacgagcctgacggatctgagaaggctacatagcaacagggtctctgttggatgacacatcatatcaatgggtataatgggaatgatgatttcaatggtcgaactcagttgtcaatctatgagatctagaactgcctgggagatggatcttttgatatgccggtgggagaatgtcttgattaggttgaggtcagaagactcacccacagtgggcagcaccactccctaggctgagctgctgggctgggtaacaaggaaaaaggaagccaagaaccagcattcattactttcttcttcctgactgcagatgcaatgtgaccaggtgcttcaagttcctgctgccttgacttccccactgtgatggactgtacccttgttctatagtcaatataaactctgtctctctaaagttgcttttatcagggtatttttcaagtaacaaaagaaaaggatttaagataatgatggtgttcatgaaaatagcaacatgtatttatcttttagcacatggcagatattgatgtggttctagaccctcattttacaaatgaggaaagtcaggtccagctgacttattctccgcctttctctttctttcttttttttaaaaggatctcaggtggcccagtttgtcttctaactcagtaagtagccaaggctggccttgaactccttatcttcttgactctattgcatgagagctaggattacaggtatgaaccatcaagtctggtactaggttcagacttcttaccttaaagtctggctggtctgcagcaacgccttcttggcatgggaagcagggataaaggaggaaggaagaatgggagaagttttagtatctcaagaagcatcattgtatggggctaagtggaaacattattagactccctcttgtaaaaacaccctgacatttcttcatggtacatctctaagattttaatgtgctctacagatctaagcaaatgccccggactcatctcagatcctatttcttgttatactcaattgtcttccttcctccctcccttcctccctnnnnnnnnnnnnnnnnnnnnnnnnnnnnnnnnnnnnnnnnnnnttttgagacaaggtcttactatgtggcccatgttgacctggaactcatcctgtatccccagctgatttggaactcacccttgccctgcctcagcctggtgggtgccaggattgcagatgggtgccatcatccccagcttacatgtctcttcctatttgctccatgctgcatgatccacacgctctgcgtctgggtcctagtggaatctgtttattcactcacttatttagtcaatattgtttgctgataacttatgacttgaaagtaggactgaaacatcatttttgatctgacagagtttaaagaatctacctacaatcttactattgccttcaggaatcctttaccttgggcccgagtcatttattgcctcaatgctataaataatacttatcttcctggaccctcgaggctgtttttttcttgttgttgtttgtttgcttgcttgcttttgtgtgtattctgttgtttgttttatgtatttatgtatttatgtatgtatgtatgtatgtatgtatgtatgtatgtatgtatgtatgtatttagagacagggtctctatagcctagacagtgtctagcttgacctccaactttgagttcctagttgtcctgcctccaactcttgagtgttaggactataggcgggccaatacacgtggtttctgtggtgctgggaatcaaatccagggcattgtgtgtggtagccaagcactctaccatctggccatgccccagtctctgggctgtcactctttatgggccagaagaaacgatatattttttttttcttttactttgcttcttttataagggtggtgtcagcgcctagcagatattcaaatgaggttgtctgactaaattatttaaatgactaacttaactgtgcaccatgagaaagcagttccaacggtcctgcatttagtctcacatcaggggttgagtggcatttgatggacgagcaggaatagaagccgatgaagttccatggagccaattcagcattcctttcaaagcttgactttggatatcttctgcctagatccttcagcattctttagtggtgagtgccaaaaaaaaaaaaaaaaaaaaaaaaaaaaaacccgacccaagctatgcttatcaagacaggaagaggaggttgatttcatcactacggtgtctgaaggctgatcctgaacgtgcacgtgacacgttagactcggtgactcaaacggtgaactcgtggctagttctcttcttaattgtctgaactttcttttcctctatatgctagtttctttctgggtcagactcttttcatgtgataggaaaatggccaccaatagctgcaatctgtatgtctacaatgatagtttaaggaaacctctctttcttagtatcacttaatcaaatcttagggaagactggctatttgggtcatggacctatccctgaaccgatctccacagtttgggacatgaactcccgcaactggactactcaggtcataccctgaatttgttattctggggttgctctaatcacagtccctcaaagacacaatttgagggaggagagatttgttttggcccctggtttcagagtttcacacagtgtgtgagaaaggctgttcacatcccaacagctctgcaaacattgggacaggaagtaggcagggataacacactcccaaggactcatccccagtcatttcctccagctagccccgtgatagcactaccagctaaggatcaagaaataaaaatgtgagctggtggagggtggggagggggggaaatgaacataattccataacattagcgatatacaatagatggatattgagattagctttacttatattgaggtttgcgaaaacaaacatcttgagaatctaggcaggtcgtataaatgactgaaagcagatggaactgtgtcatgccaagggagcagtccctagtggtttcaacccatcccttgccataagagtgtgcatgctgtggtagatattacttggtcactaatgtctggttctcttctctatagactttgaaatcaagaatcaccttactttggccaaagaaatgaagctaaagtgatggtctccaagaggagatgactgggctgctgctgcctggtctactctcctctcttagttatggtggccttgctgacatgaaggtacaataccatgccctcacttgtaggatggctgccctgggcaatcacttagatccatagttgtcttgtgtgagggttgtgtaacaggtccctcccggatggaaacactatatcctgcagggaagctctttaagcaggaaggtaaacaactcaaaggagcatcaggaagtccctgaaactgaccagattcactaggcccctccctgccagaagtaagaaatacaagccctccgaggagaacagaacagagcagcaaagaaaactgagaccaccttgccttgaagaagcaatcagtggagctgcctggaagaggattagaccaacttaagtgcctggagagaaccctctgcaacctgctaagctgcctgcaggctgtgcaatgtactccgggttcccagcttttgtgagctgtcacccatcatccatgctggggtgggctgtagtgatgcagttgtctttgagtcatctctgctcctgtgagtaacctcaataaaactcatggtttaccaagttggactctgacggtatctattttggtctgtcactgcttctctatctggggtgggaagatctgtgtattgcatctccccaggagaagttttgtcctacagtggtgaggagtaaccttttttgtgtgtgtgttaagttggtggattggtagatgcttgctacttatgtaactagcctgctttcactcctggatatacacccaagttgcctggctttgagtttttccttgtgagctttagcttttcatggccgagccatctctccagccttggcttgctttttaaatgttttggtttttcaagacaggatttctctgtgtagccctggctgtcctggaacttgctctgtagaccaggatggcctcgaactcacagagagccacctgcctctgtctctgagtgttgggattaaaggcacatgccaccagctgggtttggttttgccttttaaagagaagggagaaatacagagttgagtgaaatatttgatacacagagaagagaatgagaaaagggaggcagaagaagaagagggggaacagaaagaataggattaactcaagggagttttaactgagaaaacaatgcccaccaggatgtgagcagcctgcagccccatcccacgcccagggttctggaccaaacaaaaatgaaaacaggagaaagcaagctagacacaacatggctcccctctctgcttcctgatgtgcccagatgtgcccagactctgcagccaccatgcctccctcaccaagatgaatgccatcccctgagccatgaggcatagtaaccctttcctgcctgacagatatttatcacagcaaggagaaacagtaataaaggccgatgcagacgctcagatatggctacacaggacctctgacgtacagggatttcatacaccgtctttcagctttatggtggtgttaacacgccttcataaaaaccactctgtttgtccccttcagtccagccgttgataaattgcatgaagtatgaacacgtggaatacgtttgtgttagaactctttgcccgggtgtagaccaaaatatgtgttttgagcaaagctgagggtagactgggccaagccctggtgttttgtaaaaccagatggattaagtgcatctttgacttacggaatcttcagctcatggtgggtttgccacggtgtaactccatcctatgtgaagaagcatcagcggattgtaattttggtgggcgcagtttgaatggagactgaagcagggatcctgcctggactctcacagtgcctacggttcctgtcagggactctcctctcagctaccgttgaccttgctgctcattactggcttttaattcattcttcctaactagatgggaggtgggaccgcatctttgtgcacgtcacaggttacaggcatatgacagatgtatcggtaaatactgagtgtaaagatgagccaactggttgattagtcagaactgttgcttcctcttttcacgttggagggacagttctggggaattgctttaccacatcaatccacctttccctctgcaaagagcttgggactcattaatgtccattaacttttaaaacgggataatccaaataagagataacagctaatgtatgtttatctacttagctagagcctcacgtataccaggctggcctaaaactcactatgtggctgtggtggttggaataggtttggtccccagagactcttgtgtttgaaggcttgacccatgcatggggactggcactattaggaggtgtggccttgttggagtaggtgtggccttgttgggggaagtttggcaatgtaggggcaggctctgaggtctcctatgctcaagctctgcccagtgtggaatccagtctcctcctggctgccttcagatgaagagatagatctctcagctcctccaatcccatgtctgcttgcatgctgccatgatgataacgaactgaacctctgaaaccctaagacagccccaatgaaatatttgcttttgtaataagagttgccttctctgtggtattgccttaaagcagttagaacccaaactaaggcagtgatggaggatgaccttgaactccagatcctcctgcccataccactaaaacactgaccttatagatgcacttcacaatgccaagtgtgtgctggtgctgggactttgtgtgttaggaagccctctactaactaggctttatcttcaccccaacacccactccattgaggaggactttacttgctaggaaataataggacatcgaaacccaggttactgcagacaagccagttgacagattcctttagatgaattctctcgaggtaaggaggatataaccggcctggctagattcagggactgtgtcaccattattccattggtgtcttgatttctctctatttttatttgcattaatattattatcagtaaacatctttgctcaggtggcatcttccagtttcaggtcagcttctggtagcctctctccctggccaatccagagaactcctagtttcctccactttatctggggtctgtggttatctctgaatcagcccgatggcccatggatgtgcatcttattggaaacttgtttgtttgtttgttttatttagttgcaagagacaagacacctaattcagactgccttagcctagaccactgtttccctaaaagcctaaggtagatcagttgcatcaggagattgcatgttcgcccaaaggagccagttgtggccttccctccagccttgcccagaaacaatgactacacagagaggtctggtaggaaacggtgtggctaggagggaggtctgagctgtatttgtatagtatccaatataaaactgggtaacaactatatcaaaatgggggagcctaatagatattggggagatgaaagggaataaagaccccttagtgcccccacgccaatgcctttcctgtagcatatttattttgtggaggaagtagtgacccagaaggacacctgtcacctagccatgatccaaagtaggccttggagaagagcagctttaaggacacattttcaattattaggccctgcacagagatgagtttagcgttttcaaagtcccaccagaggacacacagaggtttaatgctccacctgttccctgttttctttcccataaacatcagatcctcatcttaggggagaagcatcatgtgagccagttccccagtctccagctttgatctctgtgtgttgtaaaggtgctgctggcttttctgggatggagaatcatgtcctacaggagtgattcacattaccacggagtttgtggcgtgtgttcctttggagtctttcttttttttcctttcatcagtgttgtgagggaagtgggctgatggtggcggggaagatggacagtgatgtcattagggcttggtctgtttctttccattcacctgttcccccctgcaggaagacttacgggtaaaatggagaccgattcctccctgcaggcaggcacgcacgtggagacctgcttgtccggcttggcgcgtggacttccttccctccctgttggtctttcgatctcagcatttgtactctatgaagacttgaactttttctttcacttcctttcttctatgggtgatgacctgctgtctctctgagaaggaggccgaaggtcactgagtgtcaacattgccactcctttctgatttaagaggaaagagggcgggggtctgcccccccccccaagggtatggagacctgtgtgtgtctatgtgtgtgtgcaaatagttctcagatgccacacgcatttctgcctgagacaatccgcctttgagggactgtcatattttatctagagtgttctttactatctacttctgtagcagggtgggaagagagcacggaagctggccctggagtccttgaggaagaaggcctttggaggtttggcagaagtcaggtaggctcactgctgcgtcctgtcaaagggaggcaaaagcctgctggagttgggcaaagagccctggctcaaactgggccagccactgacaacaacggtggcctcagggtgcagttccacttcaggagctcgttcattcaccgcatggcttcaggacgtcaggacgctttggtggacagtgggtagggattaaggcttccaaacgccttaaacccccgcccatgctcctccgcggaaaaacaaaacaagcttgcgagatcctgcagcgtccgaagacaccactgcgcggaaccctcgctctggatttgggggagagcgcaccggacggaggaggatggttcggcgtgggctgagctggaaggggttctctgctcatccggccgccgccttcgcgtcgctgcctcccgggctgtgtagcattttgggggtggcggccgcaaggccgagcaggggatgcgcttacataaccgctcgccgtgtcctgctgcctcgcgctctcgggagccgcgggcggggcgcgccgccggaccgcaatgctgccgggaccagcgcggcggggcccgggccggccccgcaggcggaggagcgcgagcatcggcgggaggagggcgccggcggcgggggagnnnnnnnnnnnnnnnnnnnnnnnnnnnnnnnnnnnnnnnnnnnnnnnnnnnnnnnnnnnnnnnnnnnnnnnnnnnnnnnnnnnnnnnnnnnnnnnnnnttccgcattcccgacccctccccgccactcagggcccgctatatagccggggctgatgcaacccgtcccgccgcccgccacagcctgcgggagggacactcggcggccgcgacggggggcgctggcggcagcggacgctgcagcggcggcggcggggctggcgccgcggcggctcccgggccgggacgggcctgggcagcgggcggcagcagcgcggagtgggcaccgcgcctgcagcagggttctgggcccggggccgccgcctccgccagcggcttctgcacggtgggttcacggaggggggaggcggggctgcgggcacctggggtggcctcccccggagtagctaccgctggggctcccgccaccccagggccggaatactctatcggatggctgcagccgctgcccaccggtggttccccggctgggcaggacagtcctgtctgtggccgggacagcggggcgctccctccttgctttccttccccagtgctcttgctgggaggctgtgcacagacggaggagagggcggggtgagcgggagaaaactgtgccggggactgcgggggactcaagggggcatgcacgccccagacctgctgacaggtcgcgcctcagcctcttccgtagctctctttgcaagacctggaggggagggtattgagaaaggcatctaaccaacagggcttccttcgcttaagagcattgctgcggcgggctctggctgggttaggagggaaccacggggcagtccccagttcccttgggatcccgtcaggcacatcaggttatataagaaggtaagcaggcttctttaggtaacctgcccagtttagaaggcactcttcctcccctcttatccaagaaggctaggcttcctggacccttggagcggcagaaacaggctttgcctgggtatctggaggagctggcaggcctgggatgccttgactcatttgcagaaatggatgggccatttggggatagaggtggagaggcgggtgcaagaggggaatcaatcgactatttgagtcagctccccctagaagattgtccagcccttatgtgttggagtggcaccttccaggggactgtggcacaggtctgtgtattgttaaatcttgggccactctacccaggatcttaattcaggcagcatgggaaacaggctctgtaccacagctgggtacctgcctgtcccaaaggctgttagcaactgtcttcctcgtccctcgacctcacccccaagtctcccccaccctccagggtttaaaaatcaccccctcttgctttccctgcttttcagcaaatctggctggcttcagcttggatggcgggcttatcttcccgtgcaggtttctagggaagagtttaaccggggatcaggtgtgagcagggttctttacagaaacctgaggtccggggatagaaacaactattctcctgcctctaaggcgccagaggtttcactttgcctaaagtagtagggaggatggatttctcaaagactcctctgtttcccttccacgttggcttcagttcagaggagctctagaatcttcctgaagagctgggtgctgggtggtttgaaaggttgcaggaaggactggggggagatggcctctgaaccttttgtcaataaattggttacagtaatctccaaggagacaggtctatcatggtgacggtgtcacttaggaaaagcttcggtacatgtgtcccttactcatccactgacgccttttgcactaccagggaactcccctgtcttcctggtctgtttatctttcccacctgttgacaagatatcctttcccactctttcagcttgcagaactgggcctcctgggcctcggtttgttatggaggtacaactggtattacaattcatagccctgcttcctcatcccatctccctcgctccctcttcctaattatcccccccaccccccacacacacacacactggaaaggaagaagccagcacaaaccctagagcacagacgctaggctggcctgccttgtatccattcagcactaactctccctggtccctctaaccctccagggctggggataactcttattcttttcttcagcagaacgcagactttctttccacgggaatgagttatgtttgagacccaaagtgggaagaagagaaaaggagtaaccgtgcaggggtttgtgtgcgaatacccctgcaggcagggggagagcaacaggcatgctatttttttccattttcctttaattaaggctctgtggaggtgtgtttgaaaacagagggtctcctatgcctttgaggagggtgagaacactcttttggctgcgtcccgggccatatgcaacgtatggtggccaatgaaactgggcctggctctttctgttgcttgtcttggcagtcagcttcatggcttgtgttaccagctctctgagctcaggggctgccaagctcagtgtgcctgtgtatgtgtgttcgtgtgtgcctctgtgtgtgtgtggtttgtcgagactcagcagagacaagtgtctcagtgacctaggcttggaatttctagtctttctttgcgctcactggtggtgggaggcctggctagagcccaccattaagtctgattgctggatatagtccatggggtttagtggtagggcttcacttccagaacttggctagccagtgcctcttttctcatagaccaaagccaccatacaccatggtgtctataccctgcattgtccctgctgagggaaggcaggagaggacagatagagaagtaggtcctcttggttcccaataaaactctctgggttctggcagaaatgatttggtgtcatttattaagcctctagcagaggatagagctgtatttgcaggcagagctctgtagaagacatctttctggtctccagggaagacctagagtctgttgggaaatagttgtggcttcttccatggctgggagtgctctgagagaccattcctgccagcttgctgtggcttctcctgaccccagctgcctctctccatcttctcatgactacccagggagtaacccctaatgaccagccaaagaggtaaaagatactggcactctgttttttttgatcagggccagagccctagccagtcagtggtgcccgtggctaatagcctgtgccgctgtagtctggcctgcaagtttcaggacacttaaggagaaacagaggaagctgcaggtgccaggcttcctttctgtcctgtggtagccagtcgtgactcagcacctttcctttctattcctgtagtttactgtcaacatatgctatggctctgcgttcttgggaagagggagagcagggagccctaagaggagactgtttgtgactagggaaagggagaccattgttagatagaagtgatctagaggttgtcttgaggggtcatctagtcctggcatgtccgcaggaaggaagaccgctaccctgacttccctgctcatcaagtgaaaggttgttccacgttctttgcaagagctaagtactttgattttctctacggccttacaaggcagatgatgtcactgccactttatagtggcgaaagtgatacataagagaggtcatagaactgtcttgggtcacacagagagcaaagtttcacactcagccatccggctccattgactcccgctcgcctgcctgtagagttcagggcagccttgcaagagcggcatttgtggtttgggtggctgtcattcaggcgctttctctactctttgctcctcgccctctgggtcgctttggtttcagaggctgtttggcagtgctgttcagatcacaggaagtaaatgaccgcctgattttgtggctccaaggaacagctcggtgtcacttgctagctgtgtgactttgaccaaattccctaacccctccatgtctaactccctctgagattcctaacttttggtcctgcactctgcgggtctctggcttgccaccttctgttccccttccgtggggtcctgtgctacatctcctccctcctgggaatcttccagaatccagctcccaagtcttcctgattctgggtcattgctccctgctggtggctttggttccactcttgctcctgggattctaggcaccctcactcattgcctgctctgtctcagacctgaagtcatcttgcacaccatttgcacaccatcctctatgccggtccaggctgcctgcttatctggagagccctgtcttcggggccccgggagttcacattttcttctgatgttctagaagttaggtcctggggtcctctcctgtcatctttttaagtgtttttgttattctggatgaagatgctggtgtttaaggggagacctttacgaatgtagcttgccaaagtaagaccgcgacctacaggcatacagaaagacgtggggtgttgtattgcttcccatatgataaatgagccatatgataaatgctccccatatgataaatgagaccaggggcggggaatgagtaaatcaccaccacctttattctctcgagtggaagaattctttgtgttcgtctctgcactgggtatttttggcctggaaaagctttgtggctttttattctgcacatccaacgcagcacccaactgtgttcttccaagtccccgaggaagtcagcacagacatataaatactagatacttcctccacgtctttgtccttgagcccatctggcccgttttcttcaagctagctttcagggcgctgtgccttctctcctgttaacttactccacacatcgcaggagggtccctgggactttctgagccttttctaaaagtcttcttcatactgggctttccgatctcccaggttttcttttttgctttgttttttgtttttttgtttttttgttttctgttcttttaaaaattattttggttttgcatacagagtagtgggggcggggtaccttgatatgtacctggctttctttctttccttggctcacttccaatttacccaaacaatttcccaaatcaccaaagtcactttggcagtattgggatgatcctagctactcataaagacatggagggtgtctgtctgtactgcagacctcctaggccccgaagggaaggaaatggcaggtcttcctcagcacccagtgtgtacttctctctctctctaaatcgcttccgtctggaacaagcatcgtggagggtgacttggcctcatgtcatctttcctgtgtcttccttgaagcaggaagttcctcctcactgtagagttccatctccagtcccttttgctcttatagatttcctaaatcacgtggaactgacttgtattctaaaacaccaaagctgccctttagccttagatagcaaaccggtggctttgcagttaataggtttccattttgccgccttgtcttggccctcctccctccccccttgcctccccagacagctgggatgacttctccctggtgaatgtcagctgcggctgtctcccaggaatggcatgtattaaggactttgtggtttgcctctgagcagttaggggcttccaagtagggggaggagagactcctttttgcttctacaaagaaagcctggtgcgtggatctcttgaccaaaacttgtctttgggatggattcataggggaatgacaagaatttgggggacagctcttcctggggggggggggttcttcagtagcagagaagtcattattcgttgcgagcttttgttagtgtctcatgtatatcatctgtatgaacataaacagaagctgcaaacagagcctgctgttcctggaacagaatgaagtctggcttccgtctcgaagggatggctgaggcaagagagcatcaaagcccttgggactttctctctcttgggctcttcggttggactgaatggcctggaggggaaactatagcttgacagagaacctggaagattctatcccctaaatactaaagcccgttgctatgagtttgctgttgttcatctatctacatattcactcattctacaaggctttcttcattgttctttggctgccagaaatgatagttaggcagggggttgcctgtaacaagcagccacggcctgttaccaggtggtagaatagctgagcactggtctagcgttgccataaagaaggaggacttggtatctgccccttccctgttcttttagggagatggcagcctgcctagggagtgggggttcctcatgactcctccaactctaccttctgaacaccacagtcttgctggatgccatcttgggcctagggtgtaggagaggcctcagaactgttttacatgggctcctcctactcaagctgctttggagctattagggggaactacttagaattgggtctccataagacacagagtgccctagactgactcctacatgtatgtttgtcactaggagacactgccttctactgaaggtgttaacacctcctgaaccccctgaggggaaatgataagagtcagggtcctaaaactagggaccagagtctagtcttgattctgccctcatctggctgtgtgaccttgggtaaatcacttagtgtctctgagcttcagtctcattgtgcaaaacgaggatgtggtttagcccagttcagggccttcttcatctctgagactgtcatgttcaatgtgtatcgtctcaggtccttttctgaggtggcccagggcacattgggttctcagggggtgggacgagcaggtgtgttgtacccagggagccaagggaccaaatgttgagagtatattagtggagctcagataaaagagcctgggtacaaataccaacctggacacaaaggcttgactctgtgtagatgatttgatggacagaggccatgtggggaaggggagaatgaccagcccaccatctatgtggttcttaacctgtgggtcgtgactcttccagagtcaaacaacccttgcacaagggtcatataccaatcagtatttacattacagttcataacagtaccaaaattcaggttatgaagcagcaacaaagatgattttatggttggtcgagcatgatgaactgtgttgaagggtcgaccactggaaggttgagaaccactgacttaaagtaacattcattggagtctgtagtttgaaggtgccaatcacttgtgttttttaagaaacaagcccaagggacttgagagtctcagcaattaagagcactggcttctcttccagaggacctgggtttgaatcctagcatctccatggtagctcacaattgtcagtaaccagtcccaagggatctgacactttcttctggccttcaagggcactacgcccacacagtgcacagacacacatgcaggcaagacactttttgcacatcaagtaaaatgaaaaataaaaataagtaagcccaacatgtaaggaagcagaagtgaagtggagactgggctttgtattcatgactatatggcttcccaagggaccctcgtcttcattctagatatgagaaattgaatggggacagggtgggtcactccctagggtcacttacagatgaggatagatagccccagacatcatggccttatgagtacttgaactctgacagccgagaagtctggcccagcagatgtccatctcccctgtcctcatctgtgtgtcctctacagaaagacagatgggtgtggaaggatagaacacatgcatgttcatcaactgcccatcaaccttgatgtctaagactgtaaagagtggattttatgggcttgggcagactggtggggaaaaggagaaattatttccctcacagcactggaatgcatgaatggtttttgttttagaatgttccatacaagaatgctttgaggctttgaacctctgacagctatgttgtagtgcctgttggctcctgatagctgttcagtaattggatgaatggaagaattataagtggatggatgggtgggctggagggctagatatatctgcatttattgacagacttctgtcctatctgtgcctggaaatgacagtctcgcccgtgaaagtccctcagtaaagggaaggaagaaataagaattccctgggcgttcattcccattttgcttctatcttgtcttgtatggggctctgagaatagagaattcttgaagaaattttctggtggtgcctggagaaagtacatgcaaattaattccgtcttctttaccccagactcttccttgggcttcagacacattcacagtcacctttaactttgcttaggttcatcttgtattcatgctgtcttaacaagtgtgcagagtaggatgtgtgatttgaggggaggcaccattccagaccaaaaatagctgcctcttgaacaggtgtgaaggtgcttcagattccatggcgatgctctgtctctctggaggctgccactgctgtttaaatccagcccaccagctttaactgtgcagcatcccaaggagatctttctatcttgcaaggaattctggccaggtctggtgaggtgggtgggaagactacaggcagtctggggccaagccagggcccgataaatgttgcccacagttgggttaaggatgcctttaggaagggccaactctcctgcaagccagagatggatggccttagtgtgagtcaattggctgagtttcctagcatcacagggacttggagcttacaggcaggaagagaaaggaatcggggaaccctgatgagagaaaggatgggccctggcagctcacagagccttttctcctcaagctaaccttcccatcctgctttctccagcccctccaggccggcctgccactcctcctgctatgatgcctgggcagatcccagacccttcagtgaccgcaggctctctgccagggctcggccccctcaccggacttcccagctctgctctgaccacagaggagctgaaatacgctgacatccgcaacattggggcgatgattgcgcccttgcacttcctggaggtgaaactgggcaagaggccccaacccgtgaagagtgaggtgagacctttgttctccagacaaagcccacgtttccaggtttggttctaagcacacctaggacccttggtcttgctcctcaacctgtggtctgagaatgagcaggagagacaggggctcaggctccaccccagacacgcgctgacagaacctgtatttttaccaagctctgggggattcatgcatgcattcaagtttgagctgccactgggtcagggcaggaggcttaccctgcctgtgggtctaggaagtgagaggagagtgataattctgagcatgaatactatctcagcagtctctctagggtgctgggaggaccaacagaggtcatggagatgtgcatgtattttgaaaagcataggggggattgagttctttataaaaattgatgccactggccatatcacgtcttctgcccttttgggccctccatctggagctgaacaagggaacttaggaaaaggatggtgtggtcatcctttcctctttatcgtgcaaagatgggcatggtttcagtccccagcatcatctgcatgaagcggggtcttgcagaggactgattaatggagcgccccatcctcagttcttctgcacctgctgctctcaggattgccctgtgtcagggcagctgttccccagtgactagtgagaggcagcagtgcctagcatgggtaccagtataccagagaggtgtatgcctcaggcatttacccagagctggtgatttgttcagaggcctatcctggttagggcttatgcagagctatttcttccaaaaatctaccacctggaaggagccaggggtaggaggtagaggaagctggagtgggctggaagtagggagtggctgtgtgtgtgtgtgtgtgtgtgtgtgtgtgtgtgtgtgtgtgtgtgtgtgttcctgcttggagagtgtgttcacgtgcagaggtgagcctcaatggagactcagcttggaagtctggaagctatggaggcgggggcttctggatgaagaaggtgtcaggctgcacactgtgtgtgtttactgatctttgttctcctgttccctctctcagtgtgagtaccatgcacacagcagagaaagagcttctgggggcgtgccctgttagcaagctttctctctgcacgatggatttggctttcagatgtgtttggtttggcctgcttggtgttttaaaagcaacccaaaccaatatttcacttaaaattttcaacaacaacaacaaaaaattggcaaatcaggtcacacgctgcttcggccaggcatcacaaaggccaggcaaatggagagagtcgtttcacgctttcgatttttgggagttcctttgtatagacacagttatcctggaactcactctatagaccagggtcttgaactcacagagatcctcctgcctttgcccacccgcaaccctcccaccccgagcgcaggattaaaggcctgcggcaccatcatctggctcactcttatttatcgtagaccctccctagaacaccgactctgcttttcctttggagtcacctatcctcccactagctgtctttatgcccctctgcagcacagtccctgctggagcctctggacttgaaaggcacagattaaagacatcagaggtgtctactaatgtgagaattgactattcctccgagttcactttcagtggatactgtgctattagtcgcacttctgcagtggaagaccttgtcttttggcccctctgctccacaccttcctaggccagttgtctgaaagtggtccttctggatggttctgctaggagagccgctaactgaacttggaagccatgatgagcctctgatgagcgttcttccagccgggtgtgacctgccgggggaacagagctttccatttgtcatcgtccccaaaggccttggaggagcttcctttttttgggtaggaaaaagcccattttggagttgggtatttttacatttcacagccacccccagcctggtggcatatgccctgtacctgatagtgacgctctgtcctcacaggcacccacagacatgtaccatccaggccgtgaagatgacaagctgtttttagggcgtatttgcatgtcccctctctcactgtcaggctgcagcagtgtgggggcagagaggcagttggacctgctgagttgtgcctcccggagggaaggccagctgtgcctctaaaacgtacttacagatgttccctaggtcacacagaggggtttgaagccctttcttggatctggtggagaacctcgcagctgacaaagctctgcggaagactgatttgtgtatggcaaacagcctttgtgggttttcccactggcatttgaggctcatacaactttgttcactgatgctaaggcaccaacttacatccatggaccaggctaggccctgtgcggagttcttgccacacttgacctttcatcccttagctagtcatgtgaccatgtcctccccataagagaacaggaatttgaggtctaggatggaggtgatgtgacttaactcatgccgttgagcaagggcatgccaggtcctggacatggtggctaagctatggtcatcacaactccatctcccttgccctgaattaggccgcaggcatagtctttctgtgaggctccccgcttgcctcacaggcccctgtcctccctttgctctctgtgcgcgcgcgcgcgcgcgcgtgtgtgtgtgtgtgtgtgtgtgtgtgtgtgtgtgtgtgtgtgtgtaggtgccatcatgtcgtggcttgtgttcagaggtcagagggcagcctcaggagtaagtcttccacattccatcttgaaacagggtctctgttgtttctctctgtgtgtgtcaggctcgctggttcggaagcttgggacgtttctctcatctccacctctcacctccccacaggagctatagatgctcaggctgcgagtccagattttacaagagttgcagggattccatctcagaccctcagacctgtacaaaatgcttttacccactgagcctgctccccagccctgaagtcacgattgctattttcgctatagctatataatagctataatataactatagtaggtgagatctaagctgagtgacggccagcatcacccactatagttgcttaggagaacaaataagcaatgtgactttggaacttaggggtttaaccttacacagtgctgtccccttgtcccgtgtttctgccaggcttcaaactaagccctctcttggcctgaggatgccagatacacaaagtcctaaaacactcatccattcaaagaggacagttcagtagtggcagtgtctcagggtcccaaggaagcatgggccaagccctgtgcatgtagctctgtcagaattggcttttgcatccaccttgcaaagactagtgctctcttggaccacatccaaacacacacagaatttcagttagagaaagtcaaagggacctaagcaactggttgtggattctggagcattttgtgctgatgttgccagtattagcaggtgacatgatattagaatggtttgtctgcagtccgtccactaagtatctcgtgcatgctaaacattgtgttatgcaccgaggctccaactatcaacaaaggagatagacgcctccctcttgtggagctatttattgctgtgagcatcaccaaaaaggaaggctgttaattcagagtataaaaggccaggtagtggtcagtcatcctcatctggtgaaatgctgtatgctcattctgatgactggccagggactctaggaacatcccgtcctgttgagagggtgtgtgtgtgtgtgtgtgtgtgtgtgtgtgtgtgtgtgtgtgtgtatgtgtgtgtgtgtatggtgtgtatgtgtgtgtatgtgtgtgtgtgtgtgtatggtgtgtgtgtgtatgtatgtgtgtgtgtgtatggtgtgtgtgtgtatgtgtgtatgtgtgtgtgtgtatgtgtgtgtgtgtatgtgtgtatgtgtgtgtgtgtatgtgtgtgtgtgtgtatgtgtgtgtgtgtatgtgtgtgtgtgtgtgtgtgtgtatgtgtgtttagagacaatgcttctttctgtctctcccttcttttcaaggcaacgttgctttctacaagtctgtagattttttccctcttattttatgtcctgcatcctctgatggggctaccccttggccagctagtcccttctgacctggaaatgtcaccctgctacagtgggcagatgtggcctggtggcctagaatgcatttttagttgggagggaagaaggccagatgcctctcccttgcacactcagccatatacaaagcactcacttcccctagctggacgggaccctccagccagtccctgactgctccgcaaggtctggaggaagcttaaagattcagaaggagtctggtctgggtgatctagaacaggggctgtaaaccatcgaccaggctggcctggaggtcagcctgtagactgagtcttgttagtgctgtgaactatctaaacagnnnnnnnnnnnnnnnnnnnnnnnnnnnnnnnnnnnnnnnnnnnnnnnnnnnnnnnnnnnnnnnnnnnnnnnnnnnnnnnnnnnnnnnnnnnnnnnnnnnnnnnnnnnnnnnnnnnnnnnnnnnnnnnnnnnnnnnnnnnnnnnnnnnnnnnnnnnnnnnnnnnnnnnnnnnnnnnnnnnnnnnnnnnnnnnnnnnnnnnnnnnnnnnnnnnnnnnnnnnnnnnnnnnnnnnnnnnnnnnnnnnnnnnnnnnnnnnnnnnnnnnnnnnnnnnnnnnnnnnnnnnnnnnnnnnnnnnnnnnnnnnnnnnnnnnnnnnnnnnnnnnnnnnnnnnnnnnnnnnnnnnnnnnnnnnnnnnnnnnnnnnnnnnnnnnnnnnnnnnnnnnnnnnnncttcctttattttgatatttttttcctaagctgtggcctctccctatggagtccaggcttgaaatcatgaacctcctctcatctcaacctgggcattgacattttagtgactcccctcaatgtatgcaagcatctgtgtctgtatctgtgtgtatatctctctgtatatgtagctgtgtgtgtctgtatctctgtgtctgtatctgtgtgtatatctctctatatatgtagctgtgtgtgtctgtatatctgtgtctgtatctgtgtgtatatatctgtgtacagtatgtatctgtatgtatgtgtgtgtatctgtgtatctgtatgtgcaactgtatctgtgtgtgtcagtatcaatgtgtgtgtgtgtgtgtgtgtgtgtgtgtgtgttgaatgggttgcaataattaggtttatcttttaaagtagccctctctggccactccaggctgacacccttctatgcacaggcacttttcatgtcaccatgtcccattctgcactgccccctgtgctgtctggtatgagcccacttcccactgttctcttagcagcagagttgtgagtgtgtgctgtgggttcgggtgcaggctctgatcttacaccccttctgtctggtcctttagcttctcacagggattgtgtgtccctcaccttactggctgcacatgaactgcgttgattttctctgtgctctgtcttcaaagtcttactttccctgggttttctatttcttaagttaaatgggggtggggtgggggaagagaaagtgaagagagagagagaatttaaatcaaaataactattctcaaacttggtcgatcgtccatatagcttgggaggcttttcctaagctccagtttnnnnnnnnnnnnnnnnnnnnnnnnnnnnnnnnnnnnnnnnnnnnnnnnnnnnnnnnnnnnnnnnnnnnnnnnnnnnnnnnnnnnnnnnnnnnnnnnnnnnnnnnnnnncaatacctgcaacatcccagtcctccctactccagtgctggctctgccccctcattactttcacagcaggagaggaaatctgctattggcagatctcacctggtgactccccaccatctccaggaccctgtgggatatctcaaagctttctcccattggatggaggtgaattggagtctgtgggcccagggtgacctcagaagacagttcactctccagcacaagtggtcctctagggagtattcacaaaaggaaccaagacataatccttctagcctgagcatacgaagttgcgtcaagccagctctgtgctgggtaaacattggccccagcctgctagtgtttttagaggcttgaaacgtaaaggcagtccgctgacatttttagcaagccttgcataattggtttttaatttgtggctctttggaataggcttggccttcttcccctggctcagggtttcagtttttttttttttttttttttttttggtctcatacttggttggcagagaaagccagtctgtcctttctgggaacagacactcccagttcatctttaaatcttgaatttccactttggctccatagttttgtgagcatgttttcagaagtagttgactatttaaaatgtgggtatgtacgtgtgtgcttgtatgtaagcaggtacacgtgcgcaagtgtgagtgtgcagaggccaggggataccctcagatgtcatgtttccttagtcctgagccatgttggtttttgagaccaagtttcttgttgagctgtagcctcaactgcggctaggttggctgaccagtgagctcacggatcttccttctcctcctgacactggaattacgagcatgcgccggtgtgcacaactttttgggtatgctatgggggtcagtctcaggtcctcgtgacaagcaggcactttagtgacagagctgtatccccacagccccagaaattttgtttttaagcaattaaattttgtttttaagcaattaaattagttggcctctgtggtcctgagtctaagctgatatgaaaccctgagcatgtacaaggctcgtggagtttttgtttttgtttttcctgaaaatggtgttggggatcgagggtacctcagtggtaggctgctcagggtcctgggttcagcccttagtacaaacacactggtcatagctgctgtcctgacacacagtcctttggagagatgatggaagatgtggacgaatctgaattttcttggaaaaaagtcagatgcttttgaaaagtttgtggtggtggtttgtgtggtttcttcacgccttaagagggtcatggttacgtcattctcttagggtttatatgatccagtgaattaatgtaggtaacgatttcccaggatgcctggcatacaatagaagacacgcagccgagtgttgattgtgcaagttcatttattgattaagtttgtctcatggactctcatttcctcgaaagtcctttgtccctgaaagtcctgaacagcctgaatgtttggaggtgcccaggagtcaagggagcagacactctcctggcttcctaaccacaggggctactcctgggatctgggaagaacacttgacttgagtttatgcgtctgggtttaaaatggaatgccactcctttccagtgttactttgggcaagttgagcggtaggtagattgaggaaacagtctcagaaatactaatacgaaggttaagtgagacactatacaaagacggccttgaccgcagaatgcactgtgctgggggggtgacctctcctgggaatgaatgcgtttgctctgactcaactgtcctggcggtgctggtctcatgatgtgtggagcttgtgacctgagccgcagggaagcagcagaccttcctgtttctggctgttcctgccctaaagatgcagctggagtctgtcatcttcaggcactgtgggtgaagaggtgctctagccctttgccacctgtgtgtcctctcatctttcttcctgtggtgttcaggtcactgctggatgcctactggccactgttttttgttttgttttgttttaaagcagccttgtaaagtggccttcatccctttcgctgtccccatatccatggcaacatggatgctaggctgggaaactgacttatttcccaggtaaaattcatcaggctggacagcatggagccactcaaggctctctcccctcacagctcccacagagcaacttggcttcaggttggagcggaaatccctggaaagctgtgtggatggattaagatggggctctgtgggcacccggagtgggtttagctgccctggatagctgctgttctctgcagcgtcagtgtcccgccttattgagcccagggtgtgggcttgctgtgggtggtaggacctctacagccttcttccctgcctgccacccaacctcagtgaagaacctagttctgtggcaacggtgcagcgaagcccacgttgctgctgctgctgctgctgctcaaggggctgagctctagtgaggtcatgagacacccttagaggtgaaaatgaagaatgtggtgagaaacaaattgtcaacaagagagggaaaagcgaccaggatctgattggtgctgctggcgctaaggaggagatgacagcccaagtacatttgtcacagtgactggggtctccggttataagtctgtcttattcaccagcctggactcattttacacttaaataccaacaagatttttttctaaaaggaaatgataattatatcattagaagaagcaggatacacatttttatgtccttggactagttagtagtttcttagacacaaacacacacacacacacacacacacatgctcccctacacacaggcacatacacacatgagcatgtgggcacacacacttacacctcagtattacaaagaagcaacccagtttaaagaaatgaacagggacctcaatgtatgtttcttccaagaacatttttattttcgatttttaaaaccgtttgaactggaacataggaacaattggtttcattatgacatctgcccacatccgtatcattttcttcgctcacatccctatggtcaccttgtgctgttcccttctggtggctccgtcctttcccctctgtccagacccctttaccttttatatcatatttatgtttaaattgagattttttttgcatgtgaaagaacacatgtgatattagtcaaagaaaaaattaaatggctaatcaatccatgaagatgcttgacaactgaacctgtgaacaagtgacctgtcacatcacacccagtcatcatgaagtggctgtcatttaaaagatattacaaggatgcagagcaatggccatcagaggcttctattgggagtataaatggtgcctcctttttagagaacagtctagtactttctaacagactgataacagttaccagaagaccggaggtcctactcattagaaaagaaaccacgtggggctgggggaaccactaggtaggtaaagcagaattcccaggcagggtggaggctgcttgtaatcccagcactggggaggcagacctgagatcatcagagccaaggagctagctagactatccagagtcggtgagctctgtgttcagtgggagactcggcctcaatgaaaggagtggagagcgattcagaagacgtctaacgtccactttgtgcctcctcacacgcatgcacactcttgagcaaaccgtaccatgtagcaaaatgccgttggaccacaaaaaggctgagggcctgtacatcggtgtactgaggagaagcagccagtcacacagaatcaaatgtcccgtgatgtgtgctgctcagaatagtcaagtagacctagaactgttctcctggtcaccttagggaggcaggaggaatggggaggagctgtggcagggctggggctttggggcgtcacaggaagggagtataaaatgtataaaaatgtaaaaatgtataaagttggctatggttatgcaagttacacaactcaggctgacgagagctactaatcacatcgcttggtgcattagttctatatgtgaactttatctcaataatacaaattggaaagcacggtgtctgtctcacagggttctgcggaggtgtcatataacagttctcccagcatgcagcagtgtttgggaatccacagccatggctgttaaatcctccgctggggctggggagagctaagtggtgcttgttttgcagagggcccaagttcgattcccagcatctacatggtggctcacagtcgttcctagtccctgttccaggggatccaacaggcacacacacggtgcatgcaggcaaaacatccgtgcacataataaataggtagatagattagatagattagatagattagatagattagatagattagatagatagatagatagatagatagatagatagatagataggtagataggtagataggtagatagatagataaagacaatcaaataaataataggataattaaataaatcctcctttggcgccaacagcagtcaaaaaaagcccagggctggtgaaggtcaatattccctcctccctttctgttgctaatggctgtctgagaacagccagcattgacaggagtttgtgcagaattccaggaagtggggtatgctgggtgactgctgctaactctggctacatagctggatccctagttctgattcatgcagtctgagtgggactgacaggtgctcccaactggtgtctattggttgaaaccctcatcacggtagaaagcagccgggtctctgtgtgtagggcaggaggcttcctgaatattgcccttgatggtcagtaagctgcttttgcagacgtcagcattcatctgctccaacctcagtgtgagggaggtgagaggaccatccgttgtcagaggatggagactcaaaaagaccaagccaccagccagagcctcacttgtaagcatgactttatcctacttaaaagaaagctgtcttttggtattcagatctgtctatacagttacctaacctaaggatttctggtgccagggcgttctgctttgcatacatttcagaataagccttcctcagacttgtctttagcggatgaatacccagagaggcaggcgggcatcgctttttgttgttgttgttttgttttgttatctgtccacccatctgcttagctccctagctcccagcccactgatctgctggtgtaagttcagagtccaacccttaccacttcctcagctaactctgagtttgatactttgtatcaatcaaagcatcccttgccattcccactgattacgaggattgatacagttaggggcccttgaatgaaattctgccgttttctagatttagcttttggggtgtcaaacagacaaagggcctttgttgctaaaaccgtcctggaatccattggttggtactgctgctcatcactgcgtggtccacaggccagtgtgctggcagccaggagtaggcttgaagtgccatcctgggttccttccaagctgactttgcaaagggtggggtccagggctccttcaggcaataagccatcaggatttggatgctgttaggtgaatttgtcttccagccctgcctggcaagttcctatctgagaaatgactgacaagaatctaaaaccacatttttcttctaatttacttccagcttcttgcaaggatccgcctgccctcgggcacttagtaaagcatgcgcgacctggatctgtccaaccagaggttggtctgactcagcagttccaaaccacttatttccatgtcctgagatctctggcctgacatcagcagcgtccacaccctgaggactttacccaattcattaagctggctcctttggttgttataagagggacaatcagataaactgttcccatgtccaaggagcctgcatttgctgtggctgcccttgagttcttaactgttctaggactagggaggagtcactccatccctctggcagggacagttgtctgccatacttcatctgtgttagtacccaggcccttccttgcccatctgaactgtcactctaatggtataatccttctgtcctccaggccaggcatccctgactgtgacctcatttgaccttgtcacgtgcagaattttttattagccagcgttcagttccctcgatggagaggtggccgttctgctgagtgatttgtcagtgatctatttcttgcgcctgagagaaattggctgaaatctgtggtttggctgcacggcctgcatacagatgaaacggaactgccttggtggagaataattaagctcgggaccttgtttttcaccttcacagtgaaagacaaatgacttccaaaggctttaatgggttggcacttgaaaagggcgactttggccaactcaggctttctgagcctccctgttcataaatattctatgcagtgcctgagcctccctcgaatggtatagggagtcagtgcgtgagagtttatccctcagtttgtaggccagtggcttccagacatttcacaccacacaccattgttcagagaatccatttttggaactggggagatagttcaatcaatagagtgcttgttgcataagcatggagacctgaatccgatctccggcaccaatttaaaagccagatgtagtggcacaggcctctgatcccagggctgaggcggcagagactggagggtccttcctcagtggtcagccagtctagacaagcttcaggttttgtaagaggctctgcctattaataaataggtaggtaggtaggtagatagatagatgatagattagatagataaggtaatgagctattgaggacgacactcaatctcaacttctggcctgcacacgtgtgcgcatgtacacacacaaacacacacacaaagtttcaactagattattaacttttgagaagaaaagtgttttttccgtgccatttgttttcggtttcgtttgcgtttggtggataatgagaatcatctcatctttggaagtaattgtccactgggggaaaaaatagattgatgggcctagagatggggaagcagaccaccccccctccttaaaccataagtgtggaccaagcctgaaatagtctcattccaacaaaaatctccgctctccaagcactcttcctttataggactcgagggccagctctcctctcccgtattagcactggtccctgtctgtgccaagatggctgttgctgggtctcctctgtgctcttccctggtagccatgtttgctctttccctaacagtgaatgggtgtcaccctgctcagcctggtttcgcaggctttgttccaaacacaatgctgtcttttcttagccttggaaacaggctgttctgagtggcttttttcgaaaatggcccttccctcctgtgtgtgctgtaaatcagcccacgcctagcagccttttgttttacaggttctctcttgacccagaggagatttttcccccctgtgggtagaaggccaaggacattacttcttggtgaggggtagtgagaagatacgttagtttaatgggtgagtctgtggcactggtctaacaactcataaaggtctactaatttgtaaaaaaaaaaaaatatatatatatatatatatatatatatatatatatatatgcttcttcccagaagacagtagccttctgcctggcctgccagtgtcttgcccgggacctgggcatgcttgcttcccactctgagcatgcggcctcatgacgcatggagatatagaattttaggggtttgtctgttccataacctcaggctggggtttagtgtccagccctgtgttcctctctactgttgccagcaggtacaggcaccagctgtgcctgggcactggggaattcctgcagggcatctggtgcctccatcagcactcccacagagccttctcccagggttgccaaggggccctgagggagcaaggcctggtgcttgtgtttgtcatggttacatcctggttctgcagacagcaaagtgcagtagcaaaacactggagcaggagtcaggcaggaatctcgggatcttgtacgagggccatagggctggtccccgtcactgtaaagggggagaaagttcccaggttcctgtctagattgaatttcctctccttttagcaaatgttgagcagtctactgggcacacaaaaagccaacaagacacaggctttgtcttcatgaaactcccagtgttgtggagagagcctcggagggtagaaagcagcacagcagggccaagggtgagttcagcattgaatgggagctctgtgcagagggatgcttctcagcctgagggctcagagtcaaggaggacttcctgatggagatgatatttcctgccccccacccccccaacgtaagctagaacatgggatgggaagaccaaaaggaggctcccagcagagtccggcagggtccggggacagatggtacagtggcttggaccaaggtaagaaacaattcaaggtgacacagagcagtcaagtagccgaagaggatgagcccagcaatgtcctttgaacttatcctctaggacccagttcctgtccccaagtgtgaacctggaaccagcctcagtttcccatctgtacactctaggagtaggtttagatgtttgccatttagtctgtgaaaatagaaacgtcttaaaagagatctagggaatgtcggtgtgcttcctgccatgtgaccattcctccaaaggacagaatgaatgagcccaaggaggatcacagaggaggtctagcccagtcagccacgacagaggcagccggccggcacagaatcggctagtttccctgcctggagagctacaagcgacttttccctctgcagactgtggtttgtccactggtaaatgagaccctctcgggatcccttgagggtgctcttgaaggtcagagagaagtgggaactcttgcactggctaagtgttttcatgatccaaagaggcgagctgttgtatagagttgacggtggtgatgagaccccaggtgtctggtggcagactccactggaggccatgcaacccacagatttgtttgtttgtttggtttggttcaagtggtattcggttcaaagtggaattagttggctgcattacagatggttgtgagccaccatgtggttgctgggaattgaactcaggacctctggaagagcagtcagtgctcttaaccactgactgagccatctctccagctcgaggttttacttcttaaaaaaattatttctttatttttatttaatgcacattggtgttttgcttgcatgtatgtctgtgtgagggtgtcaggtcccctggaactggagacagttttattcccatgtaggtgctgggaattgaacccatgtcttctagaggagcagtcagtgctcttaaccactataccatctctccatctccaagaggttttacgtttaaaaatcttcagctagtcttgaaaacttgaaagattgggcagcattgaaactgcttggctgatgctaatctgggcatccctctgcagacacagccctgtccagtccctctcccttattaaccattaattagccagcctagctcttaaaggtggcttcggtttgcagcccctgtcttcaacagccattcatgtgaacttgctcatgaggccctgcccagaagcaacagagattcagcccttagccacttgcactagatggacttggctagggaagaaaggtggccaagggcaggtagttttcagtactcaacctttggaagtgctttggagggccagaggcttggccctggaaggctttagggagaccctgggatttcctcatccctgcaggagaggtggtcggcccagcctagctggcctgggctggccaaagtttcacctctggactatcctactttgttggtagggagcaggggaacccctggctcagtgcagccggtttatgtggggaatgtctggtatgtttgtcatttgggtgtttactttccagggtgctcacggtccctggtgttgaaatgtggcttctctgtgttggaggggagtcttgtgggcctggctagtggctctaggcccagagcccagcaaggctcttcccccaacactgcacccctctctctcttttccatgccaaggaggaagattgaatgtgcctctagagcatgtacggtgtcttagttaccttgtcacatgcaaaaaaaagatgcttgcagagcctttcctaagctccaggctctgggctggatggagctgtgtccttccaaacccactctgtgccatccctgtgcactgaggagtcaagattcagagaggccacgtgactcgcccagaagcccacagcctttctaacagagcatctgatctccgaccctgaagaatggtacagcttgtgccatgcccacatgcccaggcctggctctctctgtgtgtgctaccgtcctaagacccttcagattctagcaatactgttagcttctgcttttcactgtgcccctgcctgcctgctcttaatgttcctttactgctttatccatgttaccttctgtgagagagtcagtgtatttcctgcaccttgggttaaacgtgctgttttctttcttgttctcaaaaaaaaaaagagagagagagagagagagagagtctcacgtagcctaagctgaccttggcctagatactgtagccagcgatgactgaatttctgatccccctgcctccactttacaggtgtgcaccaccacgaccagttcatgcagtgctgagggtgaagctggggcccttctgcaccataggcaaacactgtcactgagtcatagccccagccttcaagagacataattttgaaactgctttggaaatgtcagatgtcacacgtcagtctcatgtggccaccgaggcaaagtgtgtggcccgaggaacatgatcaaaggtgaagactaagctgaagagagcgggaggggcccttccattagctctgcagctctgcagctgttaccctttcctcttcactgtacgggcagtggtttttttggtttttgggtttttttttttttaatttaaaaagacccaaagaggagaaagcagaacgaacattgctgtcagaagtagaagcttcggttgtgactacatgttcccattgtgagaggacatggctgaaaagactgtgtgtgtgtgacacatgtagaccataagcctttccatagagcataaatgtttgggccccaggggcaaaagatctagatttgaaccctgaactgtcaccgatcataccaacagctttgtctataaagggagaggtggtagagagctgtgctagagaaccccaaagatggagaagtaaatattgtttgtttgtttgtttgttgtttgagacaagatcacactgtgtagccctggctgttctggaacttactctgtagaccaggctggccttgaactcacagagatcctcctgcctctgcctcccgagtgttgggattaaaagtgtgtgccatcaacgactggcaagaagtaactattcttgatttaattcatgaatatacattgaaggccctttccttccacagggtgttcatctgggtgaaggcagtagagagagggtaagatatttatgtaggtagagtaactatcaatagattgataacctcagggaaaagtgaccagagacagaagcatacgtgagagaggtgagcacaagtcatcaaaagcccctggaaggaaacagacaggaagatgataagaagaaaggcactctccattgaggtggcagtgaaatgtagagcaaggagtcccagcagaagggacagcactcggagaacctggggacagggaagagcactgtgctctgatgatgagacaggaggccccagttgctgaagtcaaaggtcaaaagaagacaggctatggaagagccggtcagagacggtttccttctcccactgggccctgtaacagacaaaggtctgtgctataggtaatggaggctgtggagggctgaaagcagagatgactgacattttagccaggggaggcctcccgggagcctttgcggtggtgaagggctcagctgggagggtctgattgggagaggctgtggtgatggtcatctgatcctctggtgcttacaggcaggatccctgcagactgttaaatgggctgccgggtggggtggggtgggattaaggtgatttcaggtttgcatttggttgaacagtcaggcagagggcagtacttacaaaaagagcacaaccagaagagaaatgtgtttgtaggaagactggccaagggctcaccatggccctctgagcaaactcctatacccacaagtccccccgggaatcagattacagacagattccagtcgggcaggtctgaggtggagttcaggaaggaagcagaggacaggcagatgactgtccgcagacctgctctctgagacttagggtcctggagcctccacccttaccaccagcctcacagtgcctgatggcaactgtccagaaagagttaacagtgacggtgaccccagtccctacattgtgtcctgcctgacagctctgcgtgggtctgttattgcgagtgggtttttgtgggtggtggtgggctatagaactatgtttgggatatttttactcatccggtagatctgtgtctaccttacctgcttgtgacccatcatagcaaggaacgttacccagtatcccttggtttgagcttggccagtgggaagcaccaatagggaggaagaattttttttttagttaagttttaaggtatttttaagtaagatttattttgggggtgggtgcagaatttcaatcatgcacccagtgtgttttgaccaagctagccccatcccctccactctagctcctctcctagcccccacagtgatttcttcccaacctcagtgtttatcgtttaccaactgagtgcactcagggctgctgggatgtgtaaggaagggtgcagggctatctactgcagcaacggtgtcctctcatgggccgcatccttgaggtatgctgaccctgcttctctgaacagccatcagtggctcgtagcgcctgcgctagggtgggacgtgatacccacctcctgtccccgagctggcattttgtctgtcttgagctggcctgtgctgtcatgacggttgtgagtttctatgcacagatgctcagatgtgtcctgagaacagctttgctgcagtcatgctccatctctggctcttccacacgcttcaccctcttgcactgtgatcccgaagccagggaaggaggacaggagggaggacgggagggaggacgggcagtagacatcccatctgggactgagctctccacgtgcagacccactgtgggctttgttagtcgacatctgctgcacataggatcttctcggttgagggctgagagactcattaacactagtataatgataagctgttaggagtccatctagcagagtagtaggttggaagagggaattttaaaagccagttcttgcgatccatctctccccagtagcacagtttgcttgcttctgcagatgcttgtgcgaggggcctctgcgtccgtgttctggcactctgagaggctggttctagagacattactgctgggcacctcttcctgagatgactggggaccaccttctggtcctcctgtatcacaaggaacccctgacttcatgaggggggaacctaacgtcacaggcatcctccaatagcaaatgatagagacctccctccatcaaactcactctccgtgccaaaggagagtctcaagtccaccctgaactccaaaggcaagcagcgtagtcaggagtcaggccacctggtgggatcaagacgatcaagacaccttttctgtctgtgtgcttctgcttgcctctgtctgtctgcctgcctgtctgcggtctgtctgtctgtgtctcccatttatctccagctcttcatttgtctttgtttctgcgttctacatgtacctgtttctgcctgggactgtctctcaggggcactgccagggcgagcaggtgaggggcctagacttcacagtgaaggacatagtccctccctgctacccatcgtgtgctttccgagaccccagggtgagggtctcctccagtgtgtgccctgagcaccttgctcaccctccttggtccacagttcttctctatgcctgtgactccctcctgcagacaagcagttccctccgtgcctcttttttttttttttaattcctgtatatttcaactgcctgacctttctgccacaggcaacggtggaagttggtgactctgcacatctcctgtgtcccacactcaggatcttcaaataacaatacagcacagctcatatcagccgttcctaccttgtccctgtcagctgtacaggatctgggacctgcctattcctcagcagggacttgagaacaaagatgggacagggtaaaggaaggacactaaaggtggcaggtccctgaagcatctgtcccttcgatgcagggtgcagttgaggagcaattgtcactgaatgcagctgtctttcccttgggggcttctggaaattgaggggtgatggctgaaaactataggctcccaacccccaactccatcacactattccctaaatgccttctgcctcctcctcctcagacatcccagctcttccagctgtgtctgtaaggagccctgccagtccccatttggggttctggttttagatggctgctctgtgtgtggtgagaacagtcagtcagatgctctgtcaaacccaggaagtatcagggaagagggagcccagcttgctctggagaaaagcaggcagaagatgggtgtgggtgtggggggcaggagagtagagtttctgtccagtcagggacacagacatctcaggcactgatacagtgtgacaagcccagtgcctatggagtgcagaaggcagaggccccatgagcccctggcccgtttctgggagagctttgccagctatatctcctctggactcctccaaagcaacagttgtgggtgggacacattgaggagatacaaccccattctgacggggaagatgtggtgaactcttgggccacatctcgactaggcgagatgtcatttaatgagaaaggttgctcagggtgtgcatgggtggaggagtggctgggggcactgctgtggcagctgcagaatggggggctctagacccaaatgcacacccatagggtctgaacagacctggcagttattagtaccctgcaccccaaatctagatactacccttagtcgctctgtttctgggggagacaggttccagacttccagcttcctctagacaggtaagaggaatcctggtggaacgggtttcctgagtgcagggcagaggtcccatagatgccagtgcagctgctgacatctctgtataggtggcatccatccggtctcgcagttctctacagtctggtattccatgacttagctacctatctagcagggaagaggtggaattctgtagtagctcaggggattctgtcagggacagcagaggggccttcctagaggaggtgacattgactcttgaaggatgagaagcagtttaccaagtaggaaaggagcgtcttcttggctgaggtgggggaggatgtggcctccagactagaaagtattgaaggaagggtttgatgggctccgagggcggatggaacagttcagtgacctgggtgtcaaactggcctgggtgacttgttaaactgcagccacagcccctgaatgtgttactcccagccctctgggcccgggccttgtgcaggcgttacctggtaagaaccgggattgggggacaggggctgtgtctcactggcctgcttagggtaaggcccggcaggggcaggctgcacccatcaccacggcagtttgtgggcagagcctcttggcagaggggagattgcactgccagccacttcctccggttccttccctttgcctgatgtcacggttacctcggcctgctctggggtgaggccgaggtcgggcggaatcaatgtcagccaggtttctgtatccctgatgcaggtcagccagaggagctgccacttctggttcggtttcaaagaaggctcgggcatgggaggtgtcgggtgtggaggcatcgatgaggcacctctccagcagcctcccagagggccagtgtggcttaaggaggagtcttaaggtggtgtggcgggaggaaggaggctgtgctgccaaaatcaaaggccagggcgctggtgtgggtcctgggctcctgaccatgccagaagtgcacggagagaggatgctgactttcctggctggtgtccctttggactgagactttgtcacaggctgtggattgccagagtcaccccttaaccttaccccactcaagaagtgacagaattggcaagcccggtgcaacatcccagctcgtggtctctgacttggagctgtccccagcccagctggcctcccgaggactccagatttccctggttggcaaggacagcccaaggcaccccaacagaaaaccctgaaggaatgtggctcagttggcaaagagcctgcctagcatcaggccctaggttcaattaataaattgagtgtgatagtctacagttataatcttagcactcgggaagtgggggaggatgcttataaactcaaggtcatctttcactacataatgagttggagaacagtcttggctacttgagaccctgcctcaaaaaaaaaaatttagaaaggttgaaacttataaaacctgagttcacaatccagctcagcctggctttgcaatgaatgtctttgttgaatgaatggctgcagataacatgaacttttaagcctcagatttactgcctgcaaaatgggacagtaatagatagcactttcccatgcgactgggtctggagaatggagtggtgtgtgttgaaaggatctgtcaaggtaagcaggaggcagcagctcttgttattacggacagtgagaacttatcaactgcggggcagggtgggtggtgagcttttacccctgctgtgttgtgggtcttgctttatgagtcctgagttcctttgagaagacaggctatcttgcagtcagtctcaggagatcctgagatgtgtccatccaggtgagaaggcagagtcactgtgacagcctggggaaatagatcagcagtttgggggacagagagaaggagccataccggtgggaagatgtggtgagggttggaaaccctaacagaagaggtggggtgacaagagtctgggagaagtgggtgcagaatgagaacctgggtctctgcccaaggtgtttttaaaggaagtgcctgggagctgctggcctggaaaagaatcacacccagagggcttgagcagggcaaagcaggttgccccacccacttgcagggagccgcctgcctcagggagaggactggcctggctcccagccccagatattctggctgagccaggtggccctgccctcaggggacacgggctcctccccaggatgcccacctgctccgaggagtatcctgtgaccaggagacctctccgactcagcagtcacaggtgtttgctgagatgtgggtgagaaagggggatctgtccccctgtctgtccatgtgtcaggtgggaagctgtgctcagttccacccatggtgtctaatcggtggctctgtgccctcacagctagacgaggaagaagagcgaaggaaaaggcgccgggaaaagaacaaagtcgctgcagccagatgccggaacaagaagaaggaacgcacagagtttctgcagagggtgagtggggcagctgcagtgtgtggcgggaagctgcggtgtgtggcaccttgtcctttgcaggggctgatgtactccgcaaccagggacatgatcggacactgtacaacccagagaaggtagaaggacctatgttttcctccactgagcttagatcccaggcactaattaacccagtggctcagacctggaaccatccattttggtcctttgtagctaacacagtgttctggagtacatgctaatgaagtagagtattggagcgatgtcatatctgtgggcaatggatttagctcctgggctggctaccacgaaaaactccctttagtgcaatgcttcatccacactgcataccccactggtctgcccttagccccattgggcatgacccttgactcttggctgctgcccctaggaacctgaggtctggccagtatgtgaaggtcagcctccaggagctgcctgttgtctcctgacgtcatcagccagtgtactttgtgatatgtctagcagggtgcttgctctctcttagccctgagtcctgtcgctcagccctcgtctttgtctcaaaggtggtgtcagggaaggggagtccgtggaaagctgactagtctcccagtagtcggcaacaccccaccccagccattggtttgctactgaacagtaatagcggtaaatgtactaacctaagaggcggccattactgttctacaagccgcaatgatgagcagcggtcatgaacattgcaaagccaggcacagtactaagtgctgggtgtgatctcatttcattgccagagcaggtggtgaagatagggatctttgtggctccctttctgcaagggaggaaggcacggtgacgatgtgaccctagccgctaaaggctaggactgatgtcagtgtctgctgctaacctcaagtctccatgtccctattcccgctctgaccctcagttccttagctggttcattcattaattcatttatgaattgaacaagtgtgggaaatgtttagcggtacactaggcacactgttagaggggcacagcaagagtggccactgctcttctgtggaagatgaagaggtaaggctgagtggcctgatgttctctgaccccatggactgtgtcttcttgtcatctttgccatagcagagagctgttctgggctacaggtgtgaacagtgtgggccatctggagacccttagctatgggcgccatgggccggacactgcttatcaacaggactgagttgccagaggctgggagctcctagagggggtatgcaacactagactagattgttcagcagtctctaagataaaggccttaaagatgagggttgtgtcctgtgctgaacgcccagggcttcttaggagaaacttcccatatgactccagcttcctggagcttgtcagccaatcggcagaggccacaccagagtctcccaactacacaccagtcctacacccactgcatccctagatgtcagtatcagatgaagttgtcaaatgcctactgtgtgccgggcatttcacatgattacaacatttcaataaggtaacacaaattcttcccagtttagaaagtgatctgtggttcagagagaccaagttgcttgcccaagcaacggtgctagcaatttcagggcaggaacttgcccatttctttgtttaggtggtaaccaagggcccgctgcactatgggtcagtgggtcctgttctcttagtggacaacagatagcaagtgagagccagtagccagcaaggagtgttgtttcagaagccagagtgctgtgggggacactcagtgctgctgaggagagactcttccatttgtgagatcaataggggaagaagtaaaagatgaaagacgtgaaggacatcggggcagacagaccctgagcctcgtttgtagagtgatcctacaaggtgggtgtcagaaatggaccagcgtaaacagactagtgtgtccacattgtcctggcatagtttctaaggccgccttccacgtacatgagtgcccccattctatgataacatctatggtcatggaagccatgaagagttcaggaggaggagggcaccagccagaggagtctcctgactgtgaagcaggcctcaggttagggcagctgaagtagctctgttatcccagtaggaaatgtggctgccaaggtggagaaaaggatgtgaccttgggtctgggaagcatccccatgtgggctccagcccagtcctcttctctggacacccctccccatctgaggccttggaagcagaagtagggtgtgaggtacactaccgtgctgtcagtgcctgaggacttgacccgctcttacaccctgacctctggacactcacatacaactctaagaaagactacctcccagagagttcgactctttagaccagtcaaggccaacttgggtgggtctttgggtggaccagttcacaccccacagaccttgggcctaccccaaagcctccatctgcagtcaggaacatcagcctggagtgtctcttctgccatgccactgtgcctaatacaaagttctctggtccctggaggcactgaagccattttacattcctaagacacagtgctctgtgctctctccatgggcactgtccccatgatggtctcactggccctgggagtgtgagagggccccccctctgctggcaggttcctgatgggggtgagtgggtgggcttcctcagctgcccagaactggattcagtgtgtttgcccagactctcagaaatggggaaagctgctcccagtagcatagctagcaaacagctagaatttagcccagacacaaggtgtttcacaacccttagagaatgctgatggaaccaatgcccccagggcacttgaaaatatacgcctttaatcccagcacttgggaaacagaggcaggtggatctctgtgagtttgaggccagcctggttttcagaacaagttccaggacagccagggctatacagggaaaccctgtcttggggtgggggtatatagatataaatgtaagatgtagtatattttaggggatcttagtgcttacagtttccctcactaaccattttgtgtgttcatgtgtaaacggaggcctctgggatctgtaacttggacaaagtcacatagctaggatgaaaagtgcctaactctgcaatgtctttctactctgctgatgacagtgtaggagacaaaatatttttttttaagattttatgtatttatttttatgcatgtgagtacactgtcaatgtcttcagatacacggcagagggcatcagatcccattacagagggttggaagccaccatatggttgctaggaattgaattcaggacctttggaagagcagtcagtgctcttaactgctgagccatctctccagccccaggagacaaaatcttaacttacaccatttctattctaagccaacaaatggctgcagtttttctggtgcaataaagatccgccagaagtcagcacagaaagcaaaaatcaaggcagattcatctccctggaagtgaagttcaggaagatccaggcccaggtcgctccttgtttcactaggcaaacactgctgctagaaatctacaaaccgttacacagaggaaccctgtcttaaaaaacccaaaagaaatctagaaacctctgcataactgtatccccagcacttgtgagtctgaggcaggaggatcacagtgagaggttaatctaggctacctagtgaaacggattagcacaagtgtgaggctagcctaggctatctagtgaaaaggagtatcacaagtgtgaggctagcctaggctacctactgaaaactgcctaaaaagcaaacaaaaaaatgtttaaagcagcttttaagatcccaagatagccattggtttttcggtttttgggttttttttttcttttttgcttgtttgttttggattttttgggatttatggagatagtttctttgtggagccttgactgtcctggatctctgtcttgtcctggaacttggctggtctctctgtagaccagattagcctctgactcaaagagatccacctgcctctgcctcctgagtgctgggattaaaggtgtgtcctgctaacaagccactgttataaatatgttttaacaatattcttctgagcacagattctgtagttgcacaataaataactgtgagcaccagccagtaatttcttgagcacaggagggagtcacaaaataggaagaggatagtggtcctatgacagccgggccaaattgctccaagcatcacctgtgtgtgttttggagtccatctgtgcggtgttgaattcttcaccaagggtttttgttattattttgttattccagtgtctcacgtagaccaaattgacttcaagcttactatgtagccaaagctggtcttgaacacctaacttcctgcctccaatttctgagggctcgaattacaggctcctgccactatgtttatgttcaactagccacgtccagcttgaacttcaactgtacccaagcccaaacttcttccagactccatttagcactgtctagctcagctcccctctcaggtagtagccatgctgcctcccacctccttcactctccaagcccaggtggtccccaagactcactgagttgtctttgaagcccctttcccccactctttctgctcagagagaggtataaggagggatcccccgagcttctctagcccttcagttttacattgcaagttccctgtgggaactcttccaatcccagggaatcatcccctctacctgacaagataacttgctctagactcggactctaagcatggctgccatgtggctctgccctgctttttctgccttgttaccctactgtgtcctagagagcagtgaacacagtggtccctgctgtgtcttcacatgtggcatcgtgccctgtctctccttctccctgaaagtttctttcttcttcttcttcttctttttttttttttttggttttttgagacagggtttctctgtatagccctggctgtcctggacctcactttgtagaccaggctggcctcgaactcagaaatccgcctgcctctgcctcccgagtgctgggattaaaggcgtgcgccaccacgcccggttccctgaaagtttcttacccagagttccgcatctcctacattcaggatggcggacagaggacagtggacagcaactgggccttgctgtgtgctgagtgaactctcctcaggagccctagggggtggagttgggggaggggggagggtcctttacaggctttggattccccaaagcattcatctcctttgcaggctgaggcacatcctcagaggtgggtagatggccctggggcttctcaataccaaggctgaggacaatctgaagattgtgttagcagcccaggctgggggaggtgaggaggatggaggaaacactagccatctctcagaatcctgagaactgcagaccaggccggcattccagtcttgtctcagcctgtcccattaaaagccaccatagatgcttctttctttctttctttctttctttctttctttctttctttctttctttctttctttctttctttctttctttctttctctctctctctctctctctctctctctctctctctctctctctctctctctttctttcttttttatatttccccctcttggcatcttcttttctccattttgaagctgttgctctgggtgcctggtcctaaagtctgcctccctcagacgtcctgtgttccctgagagcccatacgaccacctctgagaaggttcccaaggaaaactctggcaggcttgctgatagcttccctccaccccgccccaaggttctctctcagagggaggctgtccccaactacgccccactgggcagaaggacctgtcacacatgcagctgcaagttagcctgctctggactaataatggtccctcagcatctgaaccattggcgtctgaggctgaaagggtcctgtgagggttgtgtgttgcaatcacagcatatttattctctgtccctcatctgccagtcactcttccttagccatgacagccaaacccttctctagaccctgggacaaagttattcccagtggcctgaggttcctcagcttatacacgcgtgtgcatgcgtgtataagcacacacacacacacacacacacacacacacacagagacacacacacacacacacacacacacacacacacacacacacacacatgagctttcagttacagctgttagaaaagcaggaagagcccatcactgtgttcttccggcctgctgtgtgagccccaggccttgaacagacatgcttgtcacctgtcctcgctgtgaacacacaacctcacaccccatcacatcctcggcatcccttctcccgctcagggcttcgggagtttcatcagacgtcagtttgaaacctcatttccggtcctacaggttgattgccggtctggggtcaaagctcctagatggtggggcatcccgagggaagaggaaacattctaaacaatacaagctaatggccatggggcacgtgctttagggggaatggctcacactgagtttatcaatcccaccatacctttgctgcatttcaaagcacttggtcttgtgtgagccaccttgtaccctctgtctgatcttcatagagcaggggagctttcggtgtgttctttagtcaacagcaagaaagctgtgtggctggaatgacatagagaagggaataagaagggatttgaactgtactagctcccacatctcatctggtcccatcctgctgtgacagaggctattgccgtgtggcacagtgctgcctgcaaagagtcaccccagatgctcagccttcagtgagacctggcaggcagaaaagcatgccagcagtacaggtgccagccataatggctgggcatctctcaggagcaggctggcagtgaccgctagctgatggtgtgtctctgtctgtacaggagtcagagcggctggagctcatgaacgcagagctgaagacgcagatagaggagctgaagctggagcggcaacagcttatcctgatgctcaaccgccaccgccccacctgcatcgtgcgcacagatagcgtcaggacgcccgagtccgaaggcaacccactgctggagcagctggacaagaagtgactgaaggcctggaggaggcatcagaggaagaggaggaaggggaggagcataaaagagaaagaggacgagcaaggtgacagagggcccctcccaggcacgtgacaaactctatgatgaggcttagcataactagcctccagctggctcttttttgaaactcagccctgccgcgcaagagcaagagcggactgaagaaaccagagggaccaggtgctgagaccaaggttgacccgcagataggggctgtcccactccagggcccagcttgaagagcacctgagccagagaggtgccaaaccaggtagtagcctcaggcactcctttggcctctctgccaagacccccacccaggggactactgagcagccaagaaaagccatgcattgcaaacacagtgtggcccgcggatggaactcagcatagactgcaatccacctccccagccctgcccaagcccagtggaagggggtgcactgtggggctgcaatggcccagctggagttggctgcggcacagaggcgcgggcgcccttccaaagcacatacttaatcaatgaatgtttacagactggctgtcctggcggggcttccaactgcacacggtttttatactttctttctttttctttctttttttttttaatattttttacaaaaaaaaagattttatacaagcaatatatatatatatatatatatatatatatatggatttctataatcactcgatgtgacacagtacaaatatgctatggtctgttatggacatccacccaccagttaaggccattgtaattcctaagtactgtaggctctgggtgttggggggtggccaggcgggtgaggtacatttccatccttgtaaccccttcctagtacccagtcctgtatcgttcagtaaacattgctcttaattacccagctgcctcgagtggtgtctgcccaggaagagggcatagtttccatacctgcccttccaggtaagcctacatatggccatttcacagatgaggagcccaaggcctagagatgttaaagaactctgcatataccattttgagagtacttgcttcatttatttaggccaagtttttttttttttcttttaatagtttgtgtctgggtgggggtggggtgagtaaagcatgagtgtctttgtgtagatatgtgcagaggttagagaatttggatccctaggagctggagtttcaggctgttgtgagccacttgatgtgcttcctgggggttgaacttgggtcctctcttctccagtttccttttgagtgtaccaggcactgcagtgagctggggagtaaaccagccttggtcttgcacggtggatcccgcaataggtttattttgtgcttgcttgtctcaaacctgtctcccttcatctatctgcgtggcagccttttcaaagggcagctattgtctgtcccccagttcatggacggggatttagaaactcagggagaagaaatgaagtcactacttgttgaagccttaactgacaaattcgagctcccgtttgctacctacagtagcacagagcagaccttctcttgtacaaacagctcaactaaagctcggagagagcatgtgtgacttacccaaggtcactcagctagcaagaaacagagctgatatttgaactccacctccagagaaacagggctttccccatcaccggctgtctctgctcttacaaatggatgtcgcctccctgagaacaggaagtgtaggggtgaccactataaatataaggtgggagaaagccctgtagactctagaacagtggctctcaaatgtgtggtcatgacctcttgagggagtcacagatcagatatcctgtatatcagatacatacattacgattcatgagagtagcacggttgcagttatgaagtagcatcggggatgattttttggttgggggatcaccacaacacgaggaactgtggtaaagggtctgtagcatgaggaagcttgaggaccactgttctagagagttctggatgtgttgcccgagatggtgtaatgaagcagcgatcccagccaaggagtacatgacctggggatacacatatctcttatctccacagtcagacttcctgctctgcagagctggaacagctcagagtcattcacacagtaacctgcctttactcagcaagctaggtgtgttatctcaggttctgtccgggctccgtgggacaggcaaggtagttgtcattagctgccttctacccagaggctagcccagcttcaagtttacccagctgcagagaaacgggatgggagcagactcaaaaaatgaaaacactgcttcctggaaatgtacttcttcccggggctgggtaacttcttgatgttgaagtgatctcaatcacagatgaagcctggctgggggcggggatggagcagatgtggaaaataggtcactgataaacagttggtccctctcttcttctccctgagttccctccatccaatctgcgtggtgtggtctgtctacacagagtcccaacctggagacctagcctggccagcttacagtctgccatggcaacacacagttgcctgtgttccttcaaccctctttagccaggagaaagagcaaagtgagaatcagtaaaaagcctgtagatgcccctgcagggttactgttcacccccggctgtggctcttctagttccctgctgggatgccaagagctggccttttttggagccagccctctttaggctacatagatggctgcttccccagaccggtgacctgaactgctgtccctgccatagtttcactcactggcttcaccatcagagagccagctcaagggtgtttccttgtgtcacacactgcctgtgttccagctggctgacatggccttttggggggggggtccgtcctgcaatctcagaaagccgagacagagagaggaggacctcacccaaggtcacagacctgctaggtggcagtgccaggatgctattgtaaactcctctggtagatagcagctgggcctgcccctccctgggaaaggaaaagcactcgccgtctggtttgtctgtaatgagacctcagcagctagaggatgattgcaggagccatggcacaaagcttcatgtgctcacagcacactccgagtctccagtgatagcttatttctctgctgctaaagtgagccaatgtaagccatattagatgatagtaaaggcaggtttattgggaagctgcaatcgagtgaggtcactcaccccaaggaccaaggccagggaagtcaccatgggaagggggtgggagagaagaggaggaggaggaggaggagagagcaatatgtctggattataaatatagggagaagcctctaggggaagggcagctcagccagccctggttggaaagttcggggttgggggcagggtgtaccaggtaggaactgagggatgctgggagaacctggaagccaggtctgtttggtatgtaaaatattcatctcagtcccttgtcctggggtctgaaaccaaatacccagctctaatgcttatctacaaatgagagcttaatgtgaatacacacacacacacacacacacacacacacacacacacacacacacaatctataaaatgggtcccagtcttgggtgggggggatgtcgtcaggatcaaagaagaaatggaagtaagtggtattatcctaccttctgttagtgatgctagttggtatttaccgcatagcattctttgaatacctctttgtcttctaaaggcaagctgcacagagtttgtgttctgaccacgacttgtccccatgacgttacagatgcctaaggcccaagactccacagctcctacagctgtgtcaggttcatcattcctgaatgtccaggacaaagcaaatcaattttgtgcagtcacacatcctgaaaaggataacagagacacagtcactgtcaccagagtaggatggtcagggtgtcggctgcaggaagtgtccatcttccctctgcccatgggactctggggagaggaatgtatgtatcgattcagtgaggaccagggtgtcagaactttttctctgacctagtagttcctacctgagaatggacttagcaggagctctgtcacagactcccccaaaatgcccaagaatccactgatgccctgtttatgcccaaggaaaactggaggtaacctaattccctgtggaggtaagacaaacaaatgatagtgtttcacaaaattgagtgttagcccttagaaatgagctgtccatcattatagatgaatctcagaaacagtgggagagtgaactacacatggatgtcatgccgggaggtttttttttttcaacacgtaaaatggtacattcgttattaaggacacacagagatccgggagcaggcagaagagcaaatgcaagaatgctataaataccaaaatcagtgacagggactgactgtgggggtgggcagggaccagcagtggattctacaaggataagtaggacacgggtttcaactgtacctgtatgtgtgactgttcctttcccttttagtatagtcattaaaagtagagtgaccccagacttgtcagaggcgggctgtgtgctcctaggcaaggtttatattctgcctttgtctggttggtgtttcctgataaaagagagcaaattgcgatgcaattagaagatttatggttgttggttttttgggtttttttgtttgtttgtttgttttaggattttttttcctgtcttttgtttttccattctttccttagcaaactcaggaaataaaagccactctgaaattacaatggattgcaacacttgactttgtgcaagttcaattgcatatctggagggaaagggaagcaattcagagtgtgggacttgttggccttgccctggggaggtgttctgagggtgttaccctggaaagcatggctgcgctctggctcagcagctcctgatgcccgagcacgggggtgggaggagagctaaggtgcattcaaggttaatccctgctcactagttcataccctattcccctaatgctgatttcgcaacccaagcctgtgtgcaaagactccaaagtatccttccctagagatgccagggtgtggggacagcttggggaagacaagagcccagtggatcctgctgcaccgcttcctgccgctgctgtgacattaccacagggaggatgacttcgaagagcatgtatctcatcaactctcagctcaggacttcagaagtgtaaaatgcgtatacctggctaacgccaaggctttggaaggattgacctttctgaagactaagggggagaatccttggtttttccagagctgatgctcacagtccttcattcagagcctcttccctctccaaagcctgtggtaactgctcaagtccttgcatgccctgtccccctcctccgcccccagctccccccccatcccccatgccttgttcttgcatgtcaattgcagtcaacccctctgctgagttatgggggggggggctctacagtttaaggaacctcgtgatgacatcgtttccacccagatcacctaggagaactattttaaaggctggttaacagccttatctccaaatgcaaacttagtttctcctggtttttgacaataggctccaaggattagaatgtggttccctaatcattgtggccagaagggctggctattattctgcctaccactgaggaaatgaagacttggagatccttcctgctgccaggaaaaataggctatactccctgtaagtaccacaaatatgtggtatagctccaccccacccccaccccacccccacgcccctagtgcctggcacacagacctgtgcataaactgacaggtgtgtgaaacaatgcaaacccgggcatggccccgtacagagataaacatgtgggaagccgttgcagagtggcagttggctactgctggccaccacacatacataggcagtgaaggttcttttgccaagacaagttaaccaatcagatgtgagacacgcctctcctaggcctatataagcagcaccagttctgggctcggggtcttttcgtctctacaatcaagctctcccaataaacgtgtgcagaaggatcctgttgcagcgtcgttcttcctggctagttgagcgcgcgcaagataaacacacagaacaccaggacacccagggttgttcacaggaaataccaaatgatgaggctctcctttcactccttcatgttaccttctgagaatttgaaaacaagcctctttatcatactggcatgacttcatcatttgagaatgcctacatttggttggttgagctgggtgcgctgtttcagattaaaagctgtgagacctacacaaaaccaagccattcaatattccagcacggagcagagaggggctcagataactctcacccctagctgaggagcagcttttaacagttgctttgaaggcaggaagccatcttatttaggattgtggcccctggtaggttggccatgctccagtggctgcctgcacgcatgtgtgtatgggcgccaccaactttttaaggacttgaagcgttgggagtgaggggcaagtggatccagaggaatgaggaaggagtagaggcttgcatatggcccaaaaatgttatatgaatatgtaacattctcaaagaataatataaatatattaactattttgagagactgacttcttgctaggcttctaatacagcaaaattggatatgctctatactgttctaaaggacagcacaccctgggccgtctcttggacacctagtgtttccagtcctgactctgcttttttctataacccactctgagcaggtatgaacaactccacacaggcacatgcagatggcgcctcctacaggtgcaggccctaaaagtcctgcttcctgtcctggaagtcatctgtgacacacacacacacacacacacacaccctacaaatccagggagtcaatgcttctagagccttctgtgattgctaggggtgaagagagtgtggagaactctcttccctttcatcctccagatacctggtcctgaggaccctcccgccgtccctggggaggtcttacagggttaggaaaggcctgttacaggttgctgcagagaggagatgcagagggaaattgtagaggggaggtgcagaggggagctgtagaggcgagttagccgtatgacatgtgtcccggttgtctctctctttgtcctactatgtccttcctgctccccctctgcctcaccctgagcataaggctttgtttcaggatgtgctttgcaagggccaggctaagctgtcagaagtggtgggcagtggggagcacaacacctgacttgtgtggagcacagctgcttggatattctacatggactgacatgtgacacaggtagtaagggcactcgtggcacagtgctctgaaggccagtgacaaagctggggttgatggttaccttttgtcaactgttttggaagtcagctgcccataagtctacaatttccatgaaagccagaattcaccttggtagtgttcaagggcgcccgtggctatatagcatcgtaccatgctgtgctgagaactaagcccagagtcagattgtaaaggcaacagaccaatctatgaatggatgactcttgatgaagttcctttcaagaagccactgggtgtggtgatgacacctttaatcccagcacttggggggcagaagcaggcagatctctaaattcaaggccagcctggtctgcatagtgagttccaggatagacgggaatacgcggaggaaccctgccttgaaaacactaaaatctaaaaaggaagaaaagcttatttgtttgttgtctgtcttcataccacagtttgcttattgagctcaaagaacagcctaaaagaatctgttttcttccaccatgtgggtcccagggatcaaatccaggtggccaccctcagcagtaagctctctcacctaccaagcacatctccccgtccccttgatgaattcttttatacccaattcagggccctaaaaacaaacaaacaaacaaacaaacaaacaaacaaaccaccctagggcaacagaccctaacacctgaaattaggagggggtgtttgggtgctatagaaagcaggcagaagcccagcggcgtggtggcacatgcttttaatcccagcactccagaggcagaggcagaggcaggcagatttctgagttcgaggccagcctggtctacaaagtgagttccaggacagacaggactatacagagaaaccctgtctcgaaaaaccaaaaaaatagaaagaaagaaagaaagaaagaaagaaagaaagaaagaaagaaagaaagaaagaaagaaagcaagcagaagccatgaggaacaagtcagtaagcagcacccctcagtggccactccatcagtgactgcctccaggttcctgccccgccttccctccgtgatgaacagtgctatggaattatacgctaaaatgaaccctctcttcctcaagtcacttttggtcacggtgttgagaacgacagtgtcacttttgagagggatggcgcctggccccagcctgccccacagtggcgagttacagtcacatccttcctgtcagtgcttgccaaactggaaggtgtgcacttgggatgaagactcttggggactgcagagtcctcacgttcgttctccagactcagtggcttttggtgggaaaaagctgactagactcatttaaaaccgttccatcccagcaagaaatcagaaatgataccacaccctctgcacgggcaactgcagagaaagagcgcctgaagccagaacccagaggatgcgggtgatcgtggtcccaacagacccccattggactcactgacccctgagaagggtggattgcagagggtgatggttgactactgtgattctagactactgttggcagtgtgctggggggtggtcactcaggcaaggcattcttactctccatcaacaggtaggataaataataatagtagttcactttaactggtaccattgcttggatgttgaacatcttccaaaggcccatgcgttagtgacttgaacctcagcctgtggtgctgttaggaagtggttggactttagagaagtatagctatgtaggaggaagttagttcactagtggtgtgtcctcaaagaggatattgggaccccagctccttcctctcttctttgggttttctggttgctaggacatgagtgacttcctgtgccatggtctctggctcatcacaggtccaaggccacagggtcaagcaacttggaaccaaagcctcagaaataacagactaatcccaagtgcatggttatcttggatattctgttggagcagtggaaagctgactaataaatggcaactgttttcagttctaattggtaaatgtattcttctcctgtttcaccaatgggagggtctaaatcagcttcctctcacatgggaaagccagaagcatccgttcagtgtctagcttaggggttactttgactctcccgctctccatcctactgtgactcatgggaagtttgggcctcttgacactccatagtctcctgaggctcccactggatgggtgtcattatgctcacgagaccctcagagcaaggagtggcaatcaccagacacctagtaagcacagaggtgagagacaatgggaaagaaaccctaggtggatgtgtcgacctgccacgttgacaacattctcaggtcgccattggtctgaaatctccaaagcgtcccttcaaagcaagactcaagttactgcatgttatacctgccacagagaaggggccatggccttagcagacctctgggtttggagacaacatagtttaagtattggggatagtgctctagcccatgccagtgacttggaaacctgacagtttccaggctctgcagattgtccaccctgcagctgtagctcatccgtcatctataccatataactaatgagacaccagagccaaaaaggccatggcacatttggcctcctctagatggttccactagacagagcccagggtagtccacactaacctatacctggtgttgggaagtcctttgccatctcttgcccagagacactcaggatttaaatggaggccattcaacccaacagtttcttgaaatggcctcctcctcctcctcctcctcttcttcctcttcctcctccagcttgggcaggggagggggtcatgcagaaagcagcagcccctccctcatgctggggtaagagaggatgtggtcccatgtggactctgttttgctttgcaaagctgtgtctattcctccatgctcagattcccaaaccaggtaaaaggataatcaccctaaaaacagctctttctgcacatggtgacctgctgcaccttgctgtctctgtaaatgcctcaatttaaaaactcttatttttttttaagatttattattatttttaagtacactgtagctgtcttcaggcacgccagaagagggcatcaggtctcgttatgtgtggttgtgagccaccatgtgattgctgggatttgaattcaggacctttggaagagcagtcagtgctcttacctgttgagacatctagccagcccctattttattttattttattttattttattttattttattttattttattttatgtgtgtggatgtttccttccttcttacaacgaacatgtgctgtagcttagggaaatttgtcgtgtgtgtgtgtgtgtgtgtgtgtgtgtgtgtgctaacattccaatatttgtacagcagctctggtccctgttccccccatctctacagtacaggtgccatcgtccctcagctatcccagagctgtttcatctagggacc

SEQ ID NO: 318 - DNA, 1558 bp, Mus musculus
gcttccttcgcttaagagcattgctgcggcgggctctggctgggttaggagggaaccacggggcagtccccagttcccttgggatcccgtcaggcacatcaggttatataagaagcccctccaggccggcctgccactcctcctgctatgatgcctgggcagatcccagacccttcagtgaccgcaggctctctgccagggctcggccccctcaccggacttcccagctctgctctgaccacagaggagctgaaatacgctgacatccgcaacattggggcgatgattgcgcccttgcacttcctggaggtgaaactgggcaagaggccccaacccgtgaagagtgagctagacgaggaagaagagcgaaggaaaaggcgccgggaaaagaacaaagtcgctgcagccagatgccggaacaagaagaaggaacgcacagagtttctgcagagggagtcagagcggctggagctcatgaacgcagagctgaagacgcagatagaggagctgaagctggagcggcaacagcttatcctgatgctcaaccgccaccgccccacctgcatcgtgcgcacagatagcgtcaggacgcccgagtccgaaggcaacccactgctggagcagctggacaagaagtgactgaaggcctggaggaggcatcagaggaagaggaggaaggggaggagcataaaagagaaagaggacgagcaaggtgacagagggcccctcccaggcacgtgacaaactctatgatgaggcttagcataactagcctccagctggctcttttttgaaactcagccctgccgcgcaagagcaagagcggactgaagaaaccagagggaccaggtgctgagaccaaggttgacccgcagataggggctgtcccactccagggcccagcttgaagagcacctgagccagagaggtgccaaaccaggtagtagcctcaggcactcctttggcctctctgccaagacccccacccaggggactactgagcagccaagaaaagccatgcattgcaaacacagtgtggcccgcggatggaactcagcatagactgcaatccacctccccagccctgcccaagcccagtggaagggggtgcactgtggggctgcaatggcccagctggagttggctgcggcacagaggcgcgggcgcccttccaaagcacatacttaatcaatgaatgtttacagactggctgtcctggcggggcttccaactgcacacggtttttatactttctttctttttctttctttttttttttaatattttttacaaaaaaaaagattttatacaagcaatatatatatatatatatatatatatatatatggatttctataatcactcgatgtgacacagtacaaatatgctatggtctgttatggacatccacccaccagttaaggccattgtaattcctaagtactgtaggctctgggtgttggggggtggccaggcgggtgaggtacatttccatccttgtaaccccttcctagtacccagtcctgtatcgttcagtaaacattgctcttaattaccc

SEQ ID NO: 319 - protein, 173 aa, Mus musculus
EAPPGRPATPPAMMPGQIPDPSVTAGSLPGLGPLTGLPSSALTTEELKYADIRNIGAMIAPLHFLEVKLGKRPQPVKSELDEEEERRKRRREKNKVAAARCRNKKKERTEFLQRESLELMNAELKTQIEELKLERQQLILMLNRHRPTCIVRTDSVRTPESEGNPLLEQLDKK

SEQ ID NO: 320 - DNA, 61739 bp, Homo sapiens
agcatccaggcagtcttactgccagcagcttgtcccttgaaaaaagtttcagcctctcctcctaggcaagcagcagcctgagactctgagccaggctgagttttaggagccatggctggacatcttgctgggggagggccaaaccacagcatccaagagctgccttcctgagcccttactatgtggtaagcactgttccaagtgggcaggaactcattaaaccttcatgacactcctatggattgggtattatcatacacactccattttaatgatgatgaaattgagcatgtagaggttaagtaacttgcccaaggccacacagctagtaagcatcggagacaggatgcacacagaggcagtctagtcccagagtccacactctttatttgccactgtatcctactgccttgtatgatacattaatcttaaaagaccagacatgcgaaaactgtgtaaatggccaatctgagacaccaacagggccagtgggtctggaagaattatggctgggcagtggagtctgaaaagaccccctctagctctgaaactctgacctgtgggaagaaggaaaggtagaaggaatttctttgccccaaaacaagttacttaggatgactttttattctttttttgccccctaactttttaaagtttattttttgtggagacagagtcttgctatgttgcctaggttagtctccaactcctgacctcaaatgaccctcccaccttgacttcccaaagtgctgaaattacaggtgtgagccactgtgccaggccatgtaggaagagcttttaaaagggtaactgctcctgtgccagtggagtgggatagtcccagggcaccaagctgatttgattaagagtttccgacaaagggaggaaggctggttccaatggtttttatttatttatttttaactattattttttaatttttcttttcaagtttccaatgatccaattgtttttctacctgtctcttaacacccctcaaaactcccttttatgcttataattatttagttaattagctaattattcatccacctaaggactgggccagtctttctcatcatttcatgatgctgtgagccctgcacatagaaataatcaaatatttattgaatgaatgaatgaatgaatgactgaatgaaggaatgaataaaaatccaactctgtggtctgaaatatactctcgtacacggcagggcacaaacataacaagctggcatttgaggaagtatttgaaaggaaaggctggctttaaaaaggaggaaggagaggattaggaaggtgtatttaagagatagagaaacgctggcgggaggagatgggtgggggaatcgtgggcacaaaacctgaaaggaagcctgtgaacctggccagggctaccaaagaagcccttgtcccaaggtcccctccagaggccttctgaccgccctcagcgcccacctcccacctccagctcacccctgaggccagcgcagaggtgtctcctcttacaggagtgcattctaattgcaaaatcatatcctcgttttttaaggagagccaattcctccagttccgagtgtgggggccttttctggtctatggggacctattctggtctcagggggtgagtttccaggagcccagggactcagcggggagggcggctctctagaaggtacactttggctgacttagggcagggtgctgagacatgcaggtgtcaaaacctggcccggattgcctggagctggaagagccttccaagaagtgaaaatcccacccctcccccgcctaggcccacacaacagcccagtcataggggcctccttggctcctccctacacctctctctaccacaccaccaaattgttgagtgtaagaggaaacgctacctcccgcagaaaacctaaagggactttttttccccttcaataaacatttgctgaaataactttttattggtggttgttttaaaatgcatagcagaaaaagagtcctgagaattatttccaccataacttttgttcaatgagatctgtgtcatcagtggggacctcaatttcctcatctgtaaaatatggcctcttccttgctttaatattctacaagtttgtgctgcataaggtgtgactgataattacatctctgctcaacaagcatctgttcaacaagtattctttaagtgccaagagcccagactgctttcaacattatcagggacacaaaagaaatgatttccttccatttttatttaaataaatgcaatcatatatttggcacattgagtgccaaacataagctcagcacatggtaggtgctataggagtttaaaaattttaagatactgtccctactgataacttcaagcatgttggaatgataatgcatatgtgaaataaggagaaaaattttaaatggcatatgattagatgttagaagggaaatgctagttaaggtcagaagagggagaaatccctgtgggtttgacccatctgagaaggtgacaaagtaggggacttgagctgactgaaccataatgttgatggttatgatggtgatggtggtggtggtgacgaacacagccaaatgtattgggcttgtggcaggtattgatatggtgcttcataagatcgtatttaatcttcacataaaccctctaatgtaggcaccattattgtccacatttaactgttgaggaaactgaggcccaaactcttttttattttttttgagatggagtttcgctcttgtggcccaggctggagtgcaatggcgtgatctcatcccactgcaaccttcgcctcctgggttcaagctattctcctgcctcagcctcccgagtagctgagattacaggcacctgccaccatgtctggctaatatttttggtatttttagtagagatggggtttcaccatgttgatcaggctggcctcaaattcccgacctcaggtgatccatccaccccagcctccaaaagtgctgggattacaggtgtgagccaccacacccagccccaaacattttatggaagaatctaaccaacctatatagcaacatcttctgggagtgggagacggggatgaagaagaaagaaaaaagtggagaagggtcttcggttttcctagaagcagcattgtgtgagtgcaaagtgaaaacatctttgtagtataatatctaatgcatgtattttcagattaaaccctctcttaaaaataacttgaggcctctctagactgtacatttttatagctataatgtactctttcagatctgagcaaataccacaaactcatctcagatcttatctctgacaacctggtttgaccttcatgatagttgggaagcctgtgttaaaggagaagggatttgaggagacttgcgattttgtgattgtgcctttctttctttgatcttctaggacaccttttgtctcctaactcctttatctcctaagactgagttctagactagcttctgtttatttatttatatatttatttacttatttatttaaagcatagggtcttgctctgtagaccaggctggagtgcagtggtgcaatcatagctccctgcagcctcaaactcctgggttcagatgaacctcctgtctcagcttcccaagtcgctgcaactacaggtgtgtgccaccacacctggcttgtttttgtttttgttttttgagacagggtctcactctgtcatccagtctgcagtgcagtgataaaatcttggttcactgcaacctccgcctcctgggttcaagtgattcacccacctcagccttcccagaagctgggattacaggtgcgtggcacaatgcccagctaatttttgtattttttggtagagccagggtttcaccatgttggccaggctagtctcaaactcctgacttcaggtgatccacctgcctaggcctcccaacgtgttgggattataggcgtgagccaccgctcccagccacgatgggctattttattttcgtagaaatggaatcttgctatcttgcccaggcatacctcaatttcctggcctcaagcgattctcctaccgtggcctcttgaagtgctgggattacaggcatgacccactgtgcctggcctcactcattcattcatttattaacccaagatttatttgttaatcacctatgatttaaaatttaatatgactaaaacatcatctttcatctaaaaaagtttgatcaggatttacgatcctggtgtcaacttcaggaaccccctatatatggatgacctacacaatgacatcctcaacctgggccttttatcctctctccatgtgttttcaggacacattttaaaacataatattctggaagcagaatgcatatgcatcgggttttccctaaatcactcgtgtcctcatttccccattttttatgaatattattcatcttcttgggcctctagtctgtcatcctttatgggcagggatgatctcttcgtttttgcttggcctcctcaaatagggtggcacgtggtgcatggctcatagcaaacttcaaacaagattgtctgactaagtcatttaaatgactaactgaatcctgagcggtgagaaggcactcagtacagttctgtatttagtctcgcagaggttgagtggcatgtgatagatgaggcaagaatagcaaaccgataaaattccatggtgtcagttgagcactcctttataagcttgactttgggtcattttattcacgtattcttcagcattcttttattgaccattgtcagaaaacctgactcaaaccaccttagcaagaaagagaaaggcgctatattaactccaatactgtgaagttctaagaccaattcagcatgttttcatggcatattagagattcaggaactcaaatgataatctcatgcctatttctctttttccatgtcttggctctcttttactctctgtgttggtttctttctcaggtaggcttttgtcacatgacagaaaaaatggccatccacagccacaaactaccttcatacactggtattttaaaggaaaggaacccctctcttccttggtatttagatgtcaaatctcaaggaacactctaattggccctgtttgagtcatgtgctcatccctgaaccaatcactatggctttggatatggactactgtaattggccaattcaggttgcacccctcacatctggatgggggcaatgacgcccctccagggccacagggaagagggagagaagtggttctccaaagaaaggaatgctgagaacaacatatatcaactatactcctcctctccctaaatccacctgccccagcattttttttaatagagatgggatctcactgtattgcccgggttgctcttgaactcctgagctcaaacaatcctcctgcctcagcctcccaaagtgctagggttacaggtataagccaccatacctggtcttttttttttttttttttttttttgagacagggtggtctcactctgtcacctaggttggagtgctgtggagtggtcacagctcactgtaacttcagaccttcagactcctgggctcaagccatcctcctgcctcaccttcccaaatagctggactatgggcacatgtcaccatgccccatttttttgttttttgtttttaataagttttgttttgttttgtttttgtttttgtagagacagggtgttgctatgtttcctaggctggcttcctaccttggccagctaaagtgctagatacaagtgtgagccaccacactcagcctgctccagcattttaaccagagaagttaccatttcttcatcctccaaaaactttattgtgttaggagattaaagagaagacactaggcttttccaagagatggctgcatttgtatggatgctgatttattcttaaacctttagacatattttataacattctcattggtggtcattggaagagaagccttcccattcctagctcacaagttttcttctcaaatattttagccttgaatatttatatagacacacacatctatatatatgtatattcatatatatatataaatgcttcaaaatgttaaattagacatccccccgccccccttcccaagtcactaccactccagggaagagcttgggaggcttgtttctcctggtgggtgtttgattgatggagggaagagcaacaggaagaaatcaccataaacaggtttatgtaatttgcagactacaataacagctagtttcaacttcatgtttgatttcatgataccatcctgcttttcattgtaagaattctgcatgtcataagtttttgtctcaagcagagcaaaacatttgtttttgaaaactgtgtgataactccacggatcaccagggacatctgaaagactgatattgagattggctttatctttaccaggacttgcaaaatcaaatgcccccaagggctaggcaggctgggtggagactgtcaaactgggtgtttaagtcccatttcaaggggcagcttctaatgggctccagcctattgttgccataaggaagcgcgtgccgtggcagatattaattgtttgctattttctggttcctttctcctccatggtccatgggaggactgagattccttgcatctttgaaattaaggatggccatgtgacttgctttggccaatgaaacgtaagctaaagtgatgtatgtcacttcaggaggaaagatttcactgctagtgttcggccctctctacttctttttctctgccatggtggctgtaaatgcacttgttgatatgaaggtataaatactgaggcatcatctataagacagctgccctggagaatcacctcaatccacagttgtcttgtgtgagtgggaagtagcctttcttttgttaagccaatgagttcggggggatatttgttactgcagcaaaacctagcttatcctgactattacatatgcccaatgttgcctgactttgatatttttaaaagagaagtttgaaatctagatttttttatatgaaatctttgctatattaaaaaaatatttttttctacaattatttttttgagatgggggtcttgctatgttgcctaggccagacttgaactcctgggctcaaatgatccttctgcttcagtctcctgagtagctgggactacaggtgagcaccaccatgcctgtcttttttagaaaaacaaatttaaggttgaagccagaaaagccagattttcagcctgccagctacgcgtttgcaattttggtctatacaatttgagtagagactggagcagcaatcctgtctgaactcctacagtgcttatagcctgtgtcgcatcattagctcttagctactctttgtcttgctattcattagtttgtaaatcatttttcctaattagatgggacatagaacaggtgagaaatcatgtcttaaactttgtgtaccttaaaggtgcacaataggttttcagtatatactaggataaagactaattgattggctgattactcagaactatcactttctcctttgattttggaggagcaggtctggggaattcattattttacctcaccatttcagttttcccctctttacaaagagctcgggattcatcaatctccattaaacttcaaaatgaaatagtccacataagtcagagatgcaaaacccactgtattaattaggacttttctaattgcaagtaataggaaacccaaattcaaactgccttgggtaagacataatttactgattcctatagctaaaacctgcagaggtcaggatgatgtcaggcatgactgaattcaggaactcaggcaatgtcattggaacttgatctgtctttccctccgtggcttggctctacttttcctcccattagcttcactctcagtagttccctttcacgtggggcttctggcagcttctctttccagcagatccacaaaattcccagtcttgtgagattttcttgggatatgtgacgatctctcaatcagcccattgactagggctgggcgtgttaatcaggacttttctagttgtgataggaaacttaaattcaaactgccttaggctgagtcacttgtctgtccctaagagccagtggtaaatcagctccatccagcatccaatgtctgcataaaggacccagtttatggcttctccctctagccactcccagaggcagtgactacgtagaggggcctagtagggagtatgtggcggaagggaggccttgaagctgtgttcttatagcgtcctatatgaaactgaaaagcatcaatagcaaataacagagaagatctaatggagattatagagaggtagaggggactaaaggcctcccaagtcaccccttggtgccacccctgtaacatatttaatttgtgggggaagcaaaggcccagtaggactgctggtggcccagccacagtccaaaacaggccctagagaggacgcgctctaaccacacaccctaattattagtccctgaatatagatcagtttagtttatccaaagccccagctgaagacacatcaagtactattgcctctgttccatgttttgttccatataaacatccagacacaggtctcatgggagaaacatcatgaggcagtttcacagtccctggctttgatctttacgctgtagtaaaggtgtcattggcctttctggggcgaagagtcatgctcttccacaagagtatcaaattactgctcattttccaatgtatattctttcagggccttgctttcttcttacctgcccacaccaatgctgtgagggagactgctgatggcgaaggtgaaaatggtcaggcaatgtcattgggacttggtctgtctctccttccattagcccacttcttttatccagaaagatttcactgcactggggaaataaggagaataaagtctcatgcactcactcacatgagagagacatgcatgttcgggtttgctcaatggcacccatctgtctcaagtcttgttgtttctttcactctgagcatctgcactccaagaaggcatgaactttttctttcacttcctttcttctatgggtgatgacctgacatcactctcagaaggaggccgaaagtcgctgagtataaaaatcgtcactcctatctggcttaggcagaaggtagggggctcgatgggtacccaggagctctggaggtaggagatgccatctagggaaccccgttctacctgagggctctgtgtctctgcctttgtatactggagggcaccatggatgtcgccttccctctggagtccccttcaccatttcctctctagaaggatggaaggtgggagtggggttggctattgaagctggaacggggaagaaggccacttggggtctgctgagggctgggtctgctcactgctgtgtccggagtggaaaggagaagcccgctggagcagggtacaagcccaagggtcaaactgcgccagcagtagagcaagccgcggtctcaggctgcagccctagcagaggtcaggctggtgcagccagccgtctcggggcctaagggcgctggcgggggccggtgggtaggggtaggagtccccaaatgccttcatctcagcccatccttctccaccgaaaaataaagcaggctggcgagatcgcctcctcacccgctcagtcctgaagtgtccaaggatgaaactgtgcggaaattctccctgtcgctctcagtttgtgggggaagcgccgggactgaggtacatggttaacacaggctgtgcgtgaaggggcttttgacttttcccccggctccggcctctcgcgtctctctcctagggctgcggctgctgctgcctggcgggcacaagccgggcggcggtgcgcggggggtgcgcttacataaccgctcgccgcgtcctgctttctcgagcgctcctgcaccgtggggtggcggagccgggggactgcatggaacccgggacgcccccgcggggagaggagcgcgagcggccgcgggaggagggcgcccaaggcggcgggggaggttaaggtcagtgggtgtgaagcgccggctccacaccccctcctccccggtcccctccttcccttcctctccgtccccctctgacgtctggagctggcagctcggccggttccgcattcccgacccctccccgccgcccaggggccgctatatagccggggctgatgcaacccgtcccgccgcccgccacagcctgcgggagggacgctcggcggccgcgacggggggcgctggcggcggcggacgctgcagcggcggcggggctggcgccgcggcggctcccgggccgggacaggcctgggcaccgggcggagctccgcggccgggcggcagcggcgcggagcgggcacggcgcctgcagccgggccccggccccgggggcgccgcctccccccgcaccttctgcacggtgggtgcgagggcgcgcgctgggggcgccgggacgggcggggcggggcagggcgcggcgcgggcacctgggacggccgcccccgcacgggcggagcgcgaggagccccagcccagccccgcggggaggctcccgcagcccagggacctcgagctttccccgcgccgggcgctgcagccgggcccctcccgcgaggcgcccggcagcctgaggcttccttttggttcccgccccgggacgggaggctccgtccgctccctggacagccggggtgctccctccttctccctcccgcgctctcctcccccgtccgtttgcagggaggtgctctcctcgggcggcggggaaggcggggtgagtggggagaaaagtgcccgcggagatgggctgtgcgggtggaggtggagggtgaagggccagggaggtgcggggttggggtcggggttagattgtggagggatgacaaggacctcctggcagtgaggaagcgcgactcccggaggacccggacccggaggagagtattgagaagggctcgggatttccatccaatgaaggcagcttctctcatggccattgcttcggagctctgggctgggaggggatctaggggtggccggggtcccctttgggctctcctgtctcccacgccaggttatataaggaggcaagcaggctcctgtaggtaaccagcctctcccttgcccagcccagcttagaaggctctcctctgctcctcccttcaaaggaggttgtcgaggggtaggggtgcagtggggggtgggagagtgtaggggtggattgggccttccacctggatccctggaccctgggatggcagagccaggctttgcctgggtcagtaggaggagcagggaagatgaggaggctggggaagatggggaggtcctggctcttttgcagggatggagaggctggtggaaggagaaatcagccgacccccttgggtcatctccagttgcaagatggcgtggcccttgcccagggtgctgccctccctgttggaatccagggcatggggctatggcccgaccacgtgtgctcagggcaaatgtgctcaggtctatatctcagaaagggcttgcagcctgcttaggcgtgtgtacccaggcttaaatcttggtggtctctccctagggtcttaattggaggagcatcaggaattgggaagctttgaaccatgtttgggtacatttgtacccaaacgtcctttaagcccttggtagaaactgcattcgcgtatcatctcccttccccccaaccttccttccctgagggttttaaaaaacacttcccattgcttttacctttccagcaaatctggctgcagcttggatggatagcttatcttcctttgcaggtttctaggggagagtttaaccaggtatcaggtgtgagcatggctctgattttgtataaacctgaggatcgaggaagagaagcaaaatctattctcacacctctgggtggttaaggttttgccttgtttagagcagggaggatggatttctcaaagactcttctgttcccttctactttggctttggttcagagctgcaggcagctccagaatcttcctgaagagctgggtgctgtgtgatttgaagggctgcaggaagtcatgggtgtgtagacctctggcttttctcctaggtgggctgcaggaagtcatgggtgtgtagacctctggcttttctcctaggttggctgcagccacctccaaggagatgtgttgcaaagtggtgacaatgccccctaggaagggtttggataagggtctccccactcatccactgcctaacttttgcagctaccagggaatgctcctcctgactccctgggtttgttgtcatctccctacctgtttgtaggatgtgtgggcatttttttccaacctgcagaatccctggcaggaataggctctctgggccttgtttgtcgtggggctactggtgttgcaatgggctgtctctctcgagtgtctgtttccagctccactctggaaagaaaggggccaacgccgactctaggccggcctgctctgtattcattcagctccagctcaacttgagcaatcagagccagggttgagggcaagctacattcttttctgcctttctgctgcaggatgcagtttgctttttttccatgcgaatgaattatgtttgaaaccgaaatgggaggaagagaaaaatggagtgagtgtatatgggtatgtgtgtgtgcatacctatataggcaggggagggcagcaggcacattatttttccattttcctttaattaaggctctgtggaggtgtgtttgaaaacagagggtctcctatgcctttgaggagggtgagaacactgttttggctgcgtcccgggccatatgcagcgtatggtggccaatgaaaccgggcctggctcattctgttgcttgtcttggcagtcggttccgtggcttgtattaccagctctggaacttaggggctgccaagctccatgtgcctgtgtatgtgtgtgtgcgtgtgcatgtgtgtgcacatgcgttcttgtgtgtgtgtgtggtttggcctctcggaactcagcagagacaaatgccttagcgacccagtcttggaattttcagactgtgtttctttacttattgctggctgtgggaggcctggccagagcccaccattcttagttgttgttgttttttagtctgttttcttgctgcagcccacgggatttagttgcagagctccatttgcaaagcttcagctggccagtggcattttttaaaaaaaagaccagggcgattatcacaccttgtgtgtgtgtctgtattaggtgtggtagtgttaacccctgccagccaccaaggaccagagctggcgtgaagtagaagggaaaatagaaagcttgtccaatggttgtacgctcccagcttcctcttgctgcctgggttaaagattcctggcagagataacttcatatgtatttattgagcgcctacattaggcagaggacaaagcgatgttataggcaaggccttggaagcatttctctggtctccagggaagagcaggagttccctgggggttggttccaggttcttctatggctgggatggctgtgcagggatcacggctgccagtgttcagtggcttctcttgaacccagctaccgctccttgtcttcttatgaagcagtgcagggatggagtagagggcacaggagatgctggctgtctgccttggggcagaaatggaaacctagttcttgatggcaccttgttgccagtgtctgtgcagctgtgttctggcctgcagggtggaggagaccttagaggaaaccgaggccgagggcaggtgctgggccccatttctgcaccttctacccagccctgacctggcaccctttgtttctgttctgcagtcaactgccaggatgcaagatggtcctgcccccttggggtttagagctggaaagtgggagagcggagaatcctctggggagaatcctcttcatggctgcaggaaagagagactagtccagaagggaccttgaggggtcatctggcactagtgcccctccaggaaggaaggccctggtggccacactgacttcactcttactatgtgcaggcactgttccaggtactttccaagtattaactaatttaatcctcttgacagccatacagggcaaataacattgttattctttacagctgaggaaagagaggcacagagaggttagggaacttgcccaagggcacacagctagtaagaagggacagagctaggattcacactcaggtgatctggctccaaaaccgccactcttaacccccccttcctcttggcctgcagagctggggacagccatctgaagagggccttttgctgctcgccttcactctcagtcttggggccttccccatcatcttgcttctcgccttctggatctcctcgacttttggaagccgcgtgacctacgtcattcagattccaagagagaggtcatcctgggtgattccttagctccaagaagaggcttggtggttgattctccaagattcatggtagcaggtactatgcgccatgacccctggcctggcacctttctgaccttctctgtggactcctgccctccgcatccggttctgtcctgggaatcttcccaggctctggctcccaaggtcccccacttctcttgttgagtctcagtcgccattgcccatgccctgccgtcgacttccaaccccttatttctcatggggcttgcccctgtaaactccctccctccttggcttgtcactctcacctccgcattctcccagcaccaaaccttgaaccttagaccgcacccacgtgcacacccattcctattcctcgtggcagcccaagccagctgctggcccggaggggagcttaccttctcaaagaggcccaggagttttatagcctccttgaaacctttgtttctatggacagaaagttcatgatgcagatgctaagtttctcttaacctgtttctttttatttacctttgccattctggatgaaaatgctgatcgttgggcactttctagcaagaacggcccttgtacctttgacccataaaacaagactgttatcatttatagacacttccattaaaaaaagatttaaggaccgggcacggtggctcacgcccgtaatcccagcactttgggaggctgaggcgggtggatcacctgaggttgggagttcgagaccagcctgaccaacatggagaaaccccgtctctactaaaaaattagccaggcatggtggcgcatgcctgtaatcccagctactcaagaagctgaggcaggagaatcacttgaacccgggaggcggaggttgcggtgagctgagattgcaccaccgcactccagcctgggcaacaagagtgaaactccgtctcaaaaaaaaaaaaaaaaaaaaaaaaaaaaatgtaaggggttaggttggtgcaaaagtaatcgcgggttttgccattatgctcaatggcaaaaaccgtgattacttttgcaccaacctaatattttacagatttacacacaaaaaatgagagaggaaaaccagaggaaaaagcttaataagttacctttagcttttcttttctctgaaatgacacttcatgttagtatctcccaggagggtctattttctagacttgacatgttttgtggcttttcttctgcttgtacaatgcagtgtcctaactgtgtgcccacaggtcactgaggaagagtagggagtacagctctcagaccttttttttttttttttttcaagttctttcctcttggatccatctggtccccattttcttcaagttggctttcagggagctgcatcataatcttaggatcaacaacagcttagggtccacggtgaccttctgaacctcgtctgtctgattcatgccttgctagtcagtcgccatcttggatgtgtgcttcacccagctttccttcattggctggcttccaacttattcctggtcagtgtcccgcattgccagtcttcttggattccaggcctatattttgaggcataagccccttttcccaatgttggtgttctgccaatggatagaacttaatccttatttatgccccctagttactcatggagacactgaggatgtttatctgcctttcagacctcctgggccctgaagggaaaaaactctgggttcttctgaagcttttagtgcgtagttcttcttttcctactaaattgtttccgtatggaacaaccagtgtgggagatgatttcacctcttgtcatctttcctaagtcttccttgaagtgggtaagttccttctggctgttactggttccttggtgctgccacctccactgccccccactcccccttttttatagatccctaaatcacatcaaattgttttatttttcaaatcactaaagttgcctttctgccttagatcgtcagccagctctttgcagttaatgaggatccaattatgaaaggcagctgctcagctcctccatcttctatcccccacccccagaaatgtttaggatgacttctggctggtgaatatcagctgttgtggttgtctcctaggaatggcatggctgagggctttgtggtttatatctgagcagttaggggctcttttgcagggggaggaaagacagggggacttttgcttctacaaaggaaagactagtgccttgtctcctgggtgaggcttgtcattgggatggattcacaggcgagcagaaatggcaaaatttatggggcccgtgctcccagggggtggccgctccttcagggggttccacagtagcagaaaatgcattatattttgggatcatttgttagtgtctcatttctaccatctgtatgagaataaacagaagctgcaaacagagcctatcattcccggaacagaatggggtctggcttccatctcccagagatggaaggcttaggcagggaaatacacagaagcctctggagtgtttttcttggggtctactgtgggaatgaataacttggaggtgaaattacagcctgataacgagcatctaagcttccagagatggattcttacaccatttgctgaattttgctctgctgtgaatttgctgtcatttgttcattcatttattcacttagttattatttcaacaagtattattgatgatgctttctgcgccagaaatgatgctaagcactggggtcacccgggcaacaaccagccctgactgctgcttaccacctggaatcacagcgctgctggccgcgtggccacatggtttgttcccggcacagttttgctacaaggaataggtcttcctgctggccccttccctgttctccttagaggaggccaggggagacgtgcagctcatctacagggccctggagcggcctcctagcgtggcaggctgcagccctctctgcattgcaggttccattccagagggctgagagggagctctcttactgccactaggctccagtccagctcagagtttgggggatcagagaacattgaacacccacatgcgagaggtctcaggggctatttctgtgtctgggctcccatgcaggctaccgtggagttattcagggaacttcctaaacctggatctccatggggggtggagggtcctctgtgcaagacaatgaccctctactgtgggctggtgtctgaaagcccaccgtgagaaagtcattccttctgctgaaggcgtcgttacctattggaccccagaaagggaaacaaagaaggaagggtgagaaagctttggtctagaaccctgggaccaggagtcgagccctggctccaatcctctccagctgtgtgaccttggggaggccatttagcctctctgagctttagtttcctcctgtcaaaatgaggatgtggtttagatgagcacagggcctccttcagctctaaaactgtaactcaatgtgattgagcctcagatctttttctgatggcccaggggacacggggtgaaggaaggagagaaaggatgtgagtgggaaggagtgctaagaggaccgggtatgggaggcacagtaggtagagcacagttagaggagcctgaggacaccaaataaaaactctggggcaagccagggagctatgggcagaggctttatgacagatgcagcaggcatgctgaggatgaaatggcgggtccacttcccattcccaggcacctcgctttagacaccttgctttagacaaagtgatggccagtggaaacctttgtgcttgagggtgcaagttactcacatgctttttctcttagagaaatagaacttattgggaaatagactctggacttggacagggaaccaaatttcaccttcaaaagtgaaatgtagatggagaatatggcttgcactcttggccaaaacaggttcacaaatgcccctctctggaatgatctagacctgggaagctgaatgggggcaggtggttgtgggtcaccctccaaggccactcctgcaggagacagagagcccaagaaccatgtggccatctgagtacattaactgcccaacggagaagtattgtccgatggacatcagatcttccctcttctgccaaatacatctctctccatgggaagagacaggtaaagatggaaggataggccaaagattttccctcaggagtgctaagccagcgaatattttgattttatggccctgggcagaaaggtgaaaagagggagaaatgatttcctttccaggactagaatctaagagcagttttgtactaacatgctacttaaaaggctgcttcaaagctaagactgcacatctgacctccatattcctagtgcctgctggcctatagtaggtggtcagtaactggatggatgggtaggtaggaggagccctttaagggactggctttattggcagaccagctttcttcactgccatctgtgccttgaaatgaccatttcttacccatgagcttcccccagtaaagggaaggaagaattcccttggtgttgacctgtctaatttacatccttcttccatgtctgaatctgtcttcccttgtacacctttttggttgggcagagctggaatatgtgtttgctctgagaatgaagagaacatggaggtagccgggcgcagtggctcacgcctataatcccagcactttgggaggccaaggtgggcagatcatttgaagccaggagttcaacaccagcctggctaacatgatgaactcctgtctctactaaaaatacaaaaattagctgggcgtggtggcaggtgcctgtaattccagctactcgtgaggctgagacaggagaattgcttgaacccaggaggcggaggttgcagtgagctgagatcgtgccactgcactccagcctgggcaaaaaaaaaaaaaaaaaaaagcatggaggagttttctggtactgggttccacagggaaagcacatgctaattaattccacctgctttgcctcagtcccttcctcatagatagcacacacactcacctttaacttagatttgcttcatctcctactcagggtgtcttaacaaatatgcagaataggatgtgtgattggaggggaggcaccatgccagaccaaaaatagcttcctctgaaacaggtgtgaaggtgcttgaggttctgccgttataattcgctctcttcagagactgtatgctgccattgaaatcccagctccaccaattttaactgtgtacaaccttaagcgaattatcattctaagcttggctacttcctctgtgtaatgacctctgatccagcctaatgggactgcaggattaccatggggcctggcacataccaaaggctgaatacatgttgcctatgattgggtcaagcattgccttcaaaataaaaaaggcagacacttctggcagtgccaagggtgaccttggtgtgagttaattgagcaacttttcctctataacaggaaggactttacggcaggaagagcagctgggtgggaaagggattcaggggaacattggtgaaagaagccacagtcctggcaagacgagggacttgagccctcctggagcccccaacctggctgactgtcctgctcttttcctgcccactccaggctggcctgccactcctcctgctatgatgcctgggcagatcccggacccttcggtgaccacaggctccctgccagggcttggccccctgaccgggctccccagctcggccctgactgtggaggagctgaaatacgctgacatccgcaacctcggggccatgattgcacccttgcacttcctggaggtgaaactgggcaagaggccccagcccgtgaaaagtgaggtgagcgagccttttacccctggcagattccaggtctggccttaaacccaccatgggaccttaaccttgctgttcaaagtgtggtctgaggaccagtatcatccgtaccaccctggggttatcagaaatgtggaatcccaggcctcgccccaggccttctgtatcagaatctgcatcttaacaagatcccccagggattcgtggacgtattaacacttgagaagcactgggccaggggaggatgtttaacctgtctctggttctctggggggcggtggaagagtgataataatgacagtaatgaatagtaatatcttggccatctctctggggtggtgggaggattggggagataatgggaatgggaatgtgtacatgttttgaaaagtagacaagagaatgccaatattaggttatcttttaaaattgttatcattagtcacatcgtgacctccacccctcttggccctttctgcagctgaaccagggaacttggaggaagagtagcgtggcctcccttcccaagcagctgccagagctaggcatggcctcggtcagccagcagtgtccgccttagatggcgtttgcccgggacccacacgtggagcacccacatgtggcatttgcaaggaattcctcctcaggtcccttgcacctgcagctctcatgagccctttttctcggggcactggtgagcagcagcagtccccggcatggctgaggatctgtgcagggcatgcccccggcgacttgcccagggctggccgtttctctgaaggcctgtcccagcaaggttcccagcagcgccgtttcttcagaggcctgccagagtagctgccccctggaaaggaggagcctgtggtgggaggtggggaagaggctgggatcgggagggcgcaggaagcagctgagcatctgggaatggtagctctgcttggagggagagttcacaggcaaagatgagcctggggggagctcggagggctgaagtgctggaagtgctggagagaggactttcttcgtggagaagggtgtctgggtacccgtaggggagagctggggatattaggcaactatctctcagctccccttctcctgataggtacctaaaaactgcagaggactgctgggggcttggctgtggtggcaaactggccgtggtggcaaactggccatttgcaggctggacctggctctcagatgtattttgtttggccggctcagtgttttaaaagaaacgcgaacccccatttcatttgaaaattttgattaaaaaattgtaagatctcatcatacactaccctgttctggcatggtaatggctaagtggggtggacagaggcacttcactgtttcctctttccagtgggccacaggcccctgcacctccctgttattcgtgatcctacttacattgttggttttgcttttgctactaccatctgccttcatttacctctactgcctggtccctgttagccatttgtgctcaagacacgtggataaggtccatcataggtgcctactaaagactgtggattacaagctgtgagttgatggtgattacattcttctgaattgatcttgtaagccaatgtgtcgttggggcacatcccggcttatatagtgttctgtcttcacgatggagggtccttgtcttttggccctctgctcctcaccttcccaggtctgtaacttgagagcatctgtttctggatcattccacagtaaaattgccatttagagccagtagctgagcagtttcatgggggcactaaggctgcgcatggggttgatgaagagccaggtgtcttgggcagaggtcgtcaagctgggattcgcctggggggctgagttaacacctctctcctctgcaaaaggcactggaggaactcttccctttttttattttttatttttggaaaagccacttttatttgggttgggtatttttacattttacagccacccccaaattggtggcatctgccctgtacccgacagtgacgtgctgtcctcacaggcacccacagacgtgcaccatccaggccgcaaaaataacaagccgtttttagggcatatttgcatgtcctctccctcgctgtcagactgcagtgttgtgggggcgaagaggcagatggagctgcgagattgtaccgatgtagagagatgccagccctgcactgcgaaccgacctccaaatgcttcctaggtcagaccccaggggcgggaagagctaattcttggagtaactaaaacctaaagcggggtggggaaagaaacttgcagctgaagaatctatggtctgaagatctatttgcatatggcaaactgccttgagcggattttcatattggcattttagactagtaaaagtttctttaataataatcagatactagctcattaagcatttaatatgtcccaggacctgcacaaagtgcttaacatgcatgacttcattcattccttattcagtcctggagtccaggttacccccatagtagagaagagtttgaggtctagggagggggttcagtcactcagggtcacactgctgggaagtgatagcgctggggcctggtgtggtggacgatggctgccgttacagccgggtctcacttgtgctgagctaagccctaggcacggtactaggtctctttgtgaagtaccttgtttaccctgcacaagtaccctctgaagtaactagtgttgttgctgttgttatacccacattacagatgaggtcaacaaggctgagggaggtccaaggtcactggctgggaaatgagctcaggcagtctgccttgagcccaagctttaaccacatgccgtgtggcctcccatgcctctataccccttccaggcttctaaccagagctctgttgagctggggaggctggatgaacctggccgcagaatgttcgatcattttgatgacattgtctgatgagtgctgagccctgcagtcctgcagccttactgtctcctagttccgagagagagagagagggagagagagagagagagcgagagagcgagccggctgagccgctgtgcgggcagctctgtcagagctggttcttgggttgtttgccttgcagaggccagcagtctcctgggctctgtccaaacgcatggagcaattcagtaaaagaaaatgggaggaattaagttcaacgacaggttttgtgaattataaagtgctttgtgctgatgtcattattattacatggtcaacacatgacgttaaactgttttggtgccaactgcttgcctgcagtccctttgttcaagccatatttgttaagcatctactatgtgctgagcactgcaccaggcactgggaacagagctacagataaagcagtcaaagccttacatctctcggcaccgtatattgcagtgacggcatccaaaagtaagcaaattaatacacgatatataaggtgagttagtggtcagcaccacgaagaaaaattaagcagaccaaggacgtggcagtggtaggactgctcattctgatggttggccagggaccctgggaacgtcatttcctgggttgtgggatttttaaagctgttgcttctttctcctttcttttctagtattcgctttcaggacagctttgctctctggctttctccagagctttccttccttgacttttcctctgtagcccctcacagctggactcctccaccaaccagtccctattggcctgaagatcttggcccttcccaggtcatctcccagcgagctgtggctgtggtgatcacaccctgcctctgggtctggaatgcattttcagttgggaggggagggaggcctgaagccccacccttgcacacacacatagacacaccagacacttactaatcaacctgctagacaggacccctcaccctctcgccacgtctcggtgctctagaggggactcaagagttcaagggagactaaactggatgacctttcaggaaagaggctgcacactgtcgttaaggggcaggagtcggcctacagatgaatcttgttcacagggtggtttgctttttctttcttttttaacaaaatcacagtgtggttttctttttcttttttaaaaaattgaatgaattgccatatttaaaagccgggaaatgtggactctctggcttcttttaaaaaaccagaatatctacccacttaaggccacacccttatacacaacaagaggttggagctgaggggcagatgcctgctgtatttgtatacagccttgagttcaccgcattccccactactcactgatgtcttacccccagcccgcttcataccatctgtgttgccagcctgattttgagtctgtgtcccatgtttatgtcccacagaccttgcttgtttgtttgaacattatgagctgtgtcaacttggcaagtcacttaaactttattccttgatcgctctacctcccaattcttatctccagccattgttcattaggttttgctatttccaaatttcgttgacttcaggcagaaaaaaacaaaatacaacaaaaatcaaaccaatcattcccaaacgtggctggtcatcaaaacaccttgggaaacttcttaaaaagtataaatttctagacctcacccaaggtccatggaatcagaatatctgagggtagagtcctgggaagctgtatagctagtaggctcagagatgactcagctacttttgggaatgtgactctttgcggtttcttcctctcctcaggctcttctgatccttgtcagggagctttctgggggtgtcaccccgaggaatcggtgcatacgtatcattgtggactgccctttccaacgtagggcagtttcctgtgtgtattccacatggggaccggatccgtgtcctcatcattttcagagctggagaggagacttaactgtctgtggatttcacattggcgatttcccatcttctccagggtccctggagaacattgagagggttttcccgttttggatgaagtgtgaataggaatccatggaccagagagcggccttggaagccatgttcactcagccccaggtggtcttcccagactttgttcataacagagaccaagacgtgcatccatgtttagcctgagcagaaaaagttgccccaaaccagctgatgtgctgggtaaatgttggcctaagcatgcttgtgtttttagtgatttgaaacgtaaaggcagcccactgacattttttagcaagctttgcataattggtttttaattgtggctctttggaatagcattggccttcttccccctgactcagatgctttttttgtctcatacttgtttggcagagaggtccaatctgtcctctcttggaacagaatctcccaactcatctttgaaatccgtaatttccactttagttccgttactttgttagcacattttcgaaagctgttagcttaaaaaaaaaaattaaatttgagggagaatgagtgatagttaaaggcagctatgagtgtgtttaacattggcccctgtggtgttgagtcttatttgataccatatccagagcattcacaagggttctgaagcttttatttaaaatcagaagtcggtcacacccactgttatcctagcacagggtcccttggagaggtggtggtgaggacgtggctggatctctatgtccttagcagaaatcagacacctctgaaaagctcaggaagtcttacagcttcttaggttttctattaatatcttaaagtgaggataataataatacctacctcttagtgttgttatgaatttttttttttgagacagattctcactctgttgcccaggctggagtgcaatggcatgatcttggctcactgcagccttgacctcttgagctcaagaaatcctctcacctcagcctcctgagtagctgggactacaggcacatgtcaccatgcctggctaatttttgtattttttgtagagatgggggttttgccatgttgcccaggctgtttttggactcctgggctcaagcgatcctcccatcttggcctcccaaagtgctgggattacaggcgtgagccaccaacccctgttgctgctatgataatgaaatgaactaatgctgctaaaggtttcacatgatgcctggcacttagtaagacacagatataaggtaggcttgtgactcacttttcaaatgtgttgatcgtgcaaagtagtttttataattgaatcaaaaacctgtttcttgggcttgtattgacctgagggtattttgtcctcggagatggtgggtggtctgaggcgttgcaggagcagggcacatccaggcttcctaaccagaggggctacttctggggcctgggaagagttctgggcttgggtgcaagttctgggttcaaagtctggctctctcgctcattcccagcacaaccttgggaaagttagctcgtttcctcatctgtaacaggagaaaatccaaactgccctttccaaagtagtacagtttcctgcacatactgcacatggtgactggatccacatcctcatcacagagcttcatcgcgaagattaagtgaggtgctgtgtgaaagatgaccttgactgcagtgcagtatgtccgtaaattacctttgttagagactgattccatgtgtagtgaactacctattctgacagcactaacctttctgaagtattagcctatgacctgggtttcagggaagcaagcagactttccagtttctggttgtttatgcagtttagacgcagctggagttttaattatcataacaaactataaatgagaaggcttttcaagcctctgttttcccctaagctgccttctgtgaccccttatcttgtttcctgtggtgttaatgtcatcgttgtattcccatcaaccaacaatcttttagcagccttaagaagggctgtcaagtcttctgtcaatcctaccatcttactttgatgtttccaggtccaccggcaacatggactcagagttgggaaactgagtcctctcctgggtgaggctcatctggctgaacaactatgaagccatttaagtctgttttccttctactgtgcccaaaaggcacaaggcaacctggcctgaggttggagcatggagatctagaggaactcatggatggattcaggcgggatgtgaaagtgctgggagtgagggcctgggcctcctctgggtttagccacccttccaggttgtgtacaacctgccatatgctggggctcattgactgtgctctgctctgtggctacaggatccccttttactgagcgtagtgcatgtgtatgctctgacaaactcctccgtggtttgcctctgtagtcctccctacaccctaccaactccccagtccccgcgaataaaaacccttgcctttttggaggcaatgtagcaaagcaggactgctgcattggaatagtttggctctggagagttcactagatgtttgaaattcagtttcgtcccttgtaaaaataggggaaatagacccctacctagtacctagtaccatatacatatattatctcaaaatggatcgaaggcctaaatgtaagagtgaaaactagaaaactcttagaagaaaacagctgtaaatctttgtgaccttggattaggtagtggtttcttagattttatgccaaaaataaaagcaacaaaataaaaaaaataaattggacatcttcaaaattaaaaactttggtacttcaaaggacacaaagtaaaaagaaaatccacagaatgagagaaaatgtttgcaaatcgtagatccaataagggacttgtatctagaatatataaagaatgattacagctcaataataagacaaataacccagtagaaaaatgggcaaaagatctcaatattaatttctccaaagaaaatatataaatggcaactaagcacatgaaaaaatgctcaacatcatagccatcaaggaaatacaagtcaaaaaccacaatgagatactactttgcacccactaggatgactatagtgaaaaaaaagagataataacaagtattggtgagcatgtggagaagctgtcgtcatgaattgatcgtgggaatgtaaaatgatgcagccactttggaaaacagtctggcagttcctcaaatggctaaacagagttcccatgcgatccagccatttcactcctacatatatttcctttcccaacagaaaggaaaacatgtccacacaaaaacatacatgagagtttacagtggcattattcataatagctccaaagtggaagcagctcaaatgtccatgaattggtgcatgaataaataaaacatggtctatccatacaatggattattatttagccataaaaaggaatgaagaactgatacatgctgtaatatggatgaaccttggaaacattatgctgggtaaaagaagccagccacaagagaccacagagtgtgtgggtccatttagatgaaatgtccagaataggcaaattcatagagacaggaagtagagccagtactgtggttacctaggggtggggagatgggaggagtggggagtgatggccaagggatatgaggtttcttttgggggtgatgaaagtgttctaaaattgtagtgatagttgcacaactctggatataatacaagttggtgaattgtatactttaatggacaaattgtatggtatgtgtgagtttgatctcaataaagtgcttttaaaaatggagaataataatatctgccttacagggttgtggggaggctgaaaaggaataatgtatacaaatcccccagtatgtaacaatgttccagaattagtagctagggttattaaaacccccttttagaccagcggcagtgaagaagccttttttcctttttattgctagtatctatccaggagcaaggagaacaatctgataggatttaatatagaactagggaggatatatggtatagaatagcagtttctaactctgactactgattagaattccccggaaagtctttcaaaaatattgatcctgattcagctggtctgagtggggctggcaggtgttctaacctgtagccattagctgaaaacctggtaatccagttaagaaaccagcccagttctttgaaggagcgaggacatctgtgttcaggtcagaagtcatacacaagcaatgcactttatagtttgcaaacttcttttgtagacgtcatctctgatctgttccaacaaccctatgaggtggtgttagtagtatgagttgttagagagctgacgctcagaagattaagtcacttgccagggtctcattttttaaagcataattttatctattattaaaaaaaggcaagatccacacacatgctcatacctattagttatcagacctaacaccttggagagcactgccaaggtgacagctggtgccaggttaatctattttacatagacttcagcacaaagctcttcctgctacttcgcattaactgatgagcatcctgagagtggaaagcaagctgatgaggcactatctattatctatctatgttttttattttttttgagttggagtctcactattgcccaggctggagtgcagtggcgtgatctcggctcgctgcaacctctgcctctggggttcaagtgattctcctggctcagcctcctgaatagctgggattacaggtgtgtaccaccatgcctggctaatttttgtatttttagtagagatggggttttgccatgttgcccaggctggtctcgaactcctgagctcaaagtgatccacctgccttggcctcccaaagtgctgggattacaggcgtgagccactgtgcccggctagctagttagctagctatcacctacctaccatttgtaactaactactaaactgaatgcgcaagaaaaacaaaagacaggaataatttggatacgagattatcagaaacctgcaactatctcagataacctctgagttaaaggttttgcaccagccaaaacatctttttgttctcattgaatgactataataaggatatgatgcaattgtaagcccttaagtaaaatatataccgccttaacctgttgagtattttgtggtatcatttgaacaagatgtttctgttgctgaaaccaatagatgctacttaaagtggggtcagcatctgggagcttgttagaagtgcagattcttgggtcttaccctaaacatactgaagcacactctctgaagggtggggcccagaaatccatgatgcaataagccccccaggggattctgatgctctctgcacatgtagagcatgtctccatggtcaccccttccagctctgactggccatgattctatctgagaatggttaaaggatctaaaaccacatttttctcaacacctatctcaagcttcctagatggatccacctgccattggatactcattaatgcttatggttccccgaatctgtgtaaggcaggggttgctttctgaatcagcaaacaccttagcgtttccaaaccagttatttccatgtcttgagatgctcaacattgccacgtccacgccctaagggacttcccaattaattacgctgccgagcttgtcaataggctggttccttcattgttttagaaggaagaatcagagaagctgttctcatgccaaaggaaccctcatttgctgccactgacccagagttctcagcagttctggtctgataactgaggatccactccatagccctggcaatggggagctctgtgtcccactctatctgcctcagtgtggcaaagcccttccataccttctctctgcacctaaattgcatccatctccttaaataaatcactcttggtaaaacccctcttccatcctccgggccagatatccctggctgtgaacggtttggccctttcacctcggtagggtttatattagctggtgttcagtattcttgatggggaggttgcctttgctgggagatttgtctgttatctgtgccttgtgcttgaaagaaattggatgaaatgcatgttttagccacacaccctgcatacagattaaatggaactgccttggtagagaataattaagccaaggaccttgtttttcaccttcatgatgaaagacaaatgacttccaaaggctttaataagatggaacttgaaatgttctcctactttggccagcttgggactttcagaacagccttgttcataaatattctgtgcaacgactgcattttcatttaattgtagatagagtcattttgcaggagctcttgtctccatttttgacccagtgtaatcaaggcatattacaccatttgttgttgttaaagagtcagtttcagctgtattattaactctttgagaagaagacagatttttccctgccagatgcattctgcttctcaccagtcttttgggggtgatgagggtcttgtgggggccaccatttctctccttttctcatcttttgaagtgactgtcaattggacaagaaaacagattgattgcctagtgggaaactagaccccactaagtcataaatatgaaatgggcctgaaatagacatatttcagcaaaagacatccttccccaaatagctcttctctagcaaaaggatttcctagcaatcatcatcgctttttctcttcagtgttaggttttctgtctgtgccaaggtgatttttcctgtgtctcctggattctttctcacttttgtaataacagtgtttgctctttccttagcaaaaccggctgtaaatgggtgtcaccctgcctagctggctttctcaggctttgttccaaacacaatgctgtcttttcttagccgtggaaatggggctgttctccactggtttttgagagaatggccttttcctattctgttcatataaaccagcctcacacctcggcggcctgttgtttttggggttctcttaatgcaaaagaaggtttttactatggacaaggggagttgggagggccctggtcagagacatgctgcatctggctgagatacgaggagactgaggagtcagtttggaaggatccacctgtgggctctgatgccccacaaagattgtagggtgtcaggctttcagttcatacagaaggtgtcccctgcctcttcccagaaagcagtagccttccagttggtcctgtcactgtccgacccaggaccggggcacactcattccccttctctgaccttgagttcctggcctgaggatgcagccaggatctagggtctctgggtcttctcagttgcagaatctaaggctggagcttagtttgcagccctgcttcccacactgtttcctgcagatgctgtgcacacagggcaatggcttatccacccgtgcccccagccatgggagccgagtgactcatcttggcaggtggagccattgcctctgccagctcttgttcagagccttcacctggtggttggctgagctgatttgagtgagcacagcgtccagtgtgtgggtttgttcacaggtgaatgtgcttgattacatcctgctgttgggggcagctgaagtgaagtggaaagaaccttggacttggagtcaggagtgtctgggttcttgcccaggtcaccagctctgtggatcaggcctcccttcctccctaaccacgcaaggtgctgagcacacaaaaagtcaacaagatgcagactttgccctcgtggaactcccagtttaatggaggagtcagaaactgtgaatagaatataatacagtaggggccaggatacgctcagagcagagggacacctcctcagcctacagggcgtgaaaatcagggagggcttccagtgggaggtgatgctccagctgcatgtacaggagacatgagaagtaagccaaggggacagcagggcaaaggcatgaaggccagggaagtgtatggtatatggcacctcagtgtttcaggagcatagagcggaaccctgggatcaacaggtggtaagaccacagcaggtggggccaagtcccagcaacctcatttgacataggagcttgggcctcatccggagggtaaggtgcacagtaactgggccagatttgcattttagaaagatccttccgatggctgggatggaggatggttgtgcaggatctggaggcctcctggggggctggggcagtggtcaaggagagacagtgggcctggaaagtgacagtgggggtggatggggggagcaaatctgacgaagatttaaaatctagaattggatggctggcgtgatcaaaattggagataacaagagggacgggggtgtggggaggcaggtagtgagccctcagggacatccacgttgagcgtctggcccagctggcacttggatatttgggtctgcaaatccagatttggttggcattagtgtatgggtggtggctgaaaccacgtgagtagatgcaaacggagatccacaggccgtgcgtatcgagtgaggagagtagcaggccaaggatgggacctggaaaacagcccggaagggatgggaaatagcaggagactggaaaggcaaggtcagaggatgggcaggtgcaggggagtgggtccagggcatggaaaattcaggaaagagggatgatgcacagtcaggcagagcctcccaggaggatggaccaagcagtgtcctctgggctggtctgtgaagacccaatccctgtcttgaagagcaagccatttccttctctgggactcagtttcctcatctgtaaaatctagggattagccttggtgcttccaagagcccctggcactaagcgtctgtaaaagcagaaacttcttttttctttttttcgagacagagtcttgctctgttgcccaggccggagtgcagtggcacaatcatggcttactgcagtctcaacatcctgggctcaagcaatcctccagcctcagcctcctgagtggctgggactactggtgtacaccactgtgcccagctaagaaacttcttataagaaattagggggcacccttcctacatccctcaatcaggcccacgctgcccttgaaggctggatgaatgaaaacccagagaagtcagagctggaaaggactttgcggagattttagtccagcccaccgtgtggaaggtagcctgatggaatggagtcaatccctgtcttttcccagcttggcagccttgggcagacactccacctcgctgagcctcagttttctcacttgtaaaataaggcccctgagacccaccttgcagatgtgtttgaaggtcagtgagaaatgggagctacttgtgcttattaaagatgagccccaggaccggagaggtgacctgattgactcgaggtcacagagcagggcactgtggtgaccagagcccaggcttctgaggacaagcccactagggtcagctgactgccagaggtcataaatcagcagccgtgggccagtgcagcccacagatgtgttttgtttggctcatgcggtgttcctttcaaaatggaatttgttgctgacattcaaaattgggagattttacttcaaaaatttatattttcttgaaaacttggaagaattagcagcactgagcctgcatcccactggggctagtgtcccctcccatggcaggaggggtggccaccgccccatccagccctcccccctcactaatggtgagttacttgcttgacccctgaggtgatgtgagtctgcaaccccagccttagactgaccatttgtcttgaattttctcctaaagccctgcccgctgttcactgaaacagctcaatatttcacagctgaggcccagaccttggccactgagtaagaaggcctggcaagagatgacgggagagacaggagggcagagagtttccaacagctcagccccatgggggatgctgggagggcctggcccctgcaggctgccgggggtcagcaagggagttggctgagggcccctggggtttcctcattcctccctcctggagtgggaggaggctatgggcctagccggctgggcaggctgagatcttgtccctgaattgccctactttgttgatgggggttgggggagtggggagggactgcagcccctggcttagtgcagccctgtttatgtaggggaatgtctggtatgtttggtatttgggtgtttacttcccagggtgctcatgggtccctggtgttgaaatgtggctcctccatgcagggggggccctggtgggcctggctggctgtgtgaggcctgaggctagatttggaggctgcggggctgttactccaggcctgctcactgacaactcagcacgccctgaactccccagcctgctcctccctctccgcagtactcctttctgtgccgcattctgcccggaggcaggccagtgtgccgctgctgcaatagcaccacctccgccttgcctgcgaaggaaggcagggaagctggcatcacggaactcttcctgtgctcccggctctgggctggaactcagtcctcattactaccatgtgcggcagggctcagtaccttcctgtacaagtgaggaatggaggctcagagaggccaagtaacttgcccaggagcacacagctggtctacagcagagcttctggaggaactcaggtcttaaagaccaccccccaaccccaccaaccaaagctcacactgtcaactctgatgccacaagtctcagattagcctggttctgtctgcccaggcaacaattcttagtatgagacagaaccctcagacttgggctactctggttagtgctgggggttttggtttttcttttgtgtccatttttgcttatcacttcctttatttctttgtccatgtgagagtttctgtattttcagcgccttgggttgagaatgtaatttctctttctcattctgtctctctgtgggtcctgcaagctatgtttttgaaaacgcttatgaaaagtcagaattcaaaatcacatctgggctgctgtttgtcacagtggaaatgccgcgccacctgcagacggggcctgagaaacacggaaatgggtgagggttaggcccgagaggagctggtgacgtcccctcctttaagccccctcctttaaaccatggagcttgaatgttacaccttcatgtaaattgtgcaataatgttttttaaaacatgttaaaaacttctaactctaaaggcagtgatcatgatcagaccacccaccccttgaagagcaggacgtgctcaggccctgcggcccaaagacctggatacgagtcctgcgctgtcactgagcatctacgcagccttgatgttcttagtttcctcatctgcaaaagtggggaagctgaatagagctgtgctgggtgacttactgagatggcaaattaaatgtagttaatttagttaataaacacccattctgtgccatgctcagctctggtggctgagtgacagtggtgaaggtgatgatagactgagatatttatatagattaactatgaatagattaaggttctcatgggaaactgacaacgggcaggcaaacatgcatgtgaaaaagataagtgctgttagtgaatgcaccttgaaggaaatacacagggagatagtaacaggacagggcttttagtttggggtggtcagtaaagacgtcaagaaggagcagcaagtacaaacccgggggacagggaagaacttgtcgttttgagggagaggaagaaggcccattgttggagttgaggggtagaggagggcgatgtagtggaaggtcagagaggcaggaggagccaggttttctcggttctgtgggccacatgtgttggaagctgttggagggttgcaagcagaggagctgacttgtgttttagccaagggagagccctttggagccactgcagccgtccagtgcagaggcgacgagggcttggaccaggctggaggcagcagggatggagaatgtggtggacaccttagagatgtattttgcaggtggaatcatgacaacctgctaaatggactgtgtgagtccttaatcggctccagggcaaacttctctgggcacacaaatctgcgtgcgcatgtactgcatacagatcctgattcagtaggtctgggtggccttcaagactgcatttctaacaagagcttgggtgaggctgattgtgctgttggccaaccacactccacagtgcctgactcctggcaaacgtccaggaagtgctcgctgtggggatgaccacgagccctgtaggaatctctcaactgttgctgtcattgactcctgcctgcaggccgtgactgggtccaggactgggggtggacttatgtaaatcacagagatagattcatacacgagatagtcttgtttgcctatcagatccattcccgttttaccctgctctgtgccccaggtggctcatctcaatggaccacattacccaggagtccttccactctggcttctggttgaacttggccattaggaggtaccagccttagaaaagaatttgggatattcattcccctgatccctccctgctgggcacccattgggcagtggtgtgttcctctaccaaagagcacagctcctgtctggtgaccctctgccatggctaagtgacagctctccctgggttccaatcatcactcctgaccctagcctcaggccggaggtgttcgtgactccactgctgctggtcccgggttccctaagctctgtccaccccctgtaagtagttccctcattaatttcctttaaataaacccctgtttcctgctgggatcccctagtccaggggctttggtaccgaccgaggtgacccacctctgccttttattggcggctgcttaagggcccttccgcatccaggctctgctgctttctcagcggttttaggaatgttgctgagggtgggatttcacccctggtcactggggaccatcttcagctcctccattagcccctggcatcacctgacctccaagggtagaagcttggtgtcccaggcatctttcagtggcatgtggcagaaaccttctcaaactcccttcaagccaagggaggaattttgacagattcatagtcccaatgacaaggagcatagtcagtcctcaccagggtggcatcaagaggaccaagacagcgtctttctctgtgtgtcttctgttgattgttcctctgtctgtgccgttggcttctgtccacatctctgcatgtttctctccctgtggcactgcctctgtgtctctctctccccttcttcatctccgtgttctgtgtgtttctctgtcccactgtctctgtctgtctgcctgtttgtcgggagtgctctgtctcagggcctggtgaggtgagcaagcctgggtgaggtgcccgggggcgtggcatgtagggaggtgcttcctctttggtgctgaccctgcacttgcttaaatgtgtgccttgggcaccccacctgctttcccctgctccaggcccggcttttctctccatccccctttccctctctttgcctgtttctttgtctccctgaccccgtcttggagctgagtggttgtttctctcttggtacgtggtctctggtctctgctcaccctaaacttcacagcccgatcttcctgcctccctgtgcctgggggtgaagttggttgcccggccctgcatgacccctcagtccagcactcaggatctccctgtccaatttaaaattccaggagagtgagtacagctcggctcagccattcatgcctcgtccagtcagctgtggcaggggcttgagagcaggctgtctgaggaggggtctgggtgaggcggggctgctctgcacgagggccctcttggtcctgagtccccaggtctctccatccaatgtgaagtgtggcacagcagtacccctcactgccaggacccggatggccttgcccttgggccttcctgggaaactgcaggaaaacagagccaacactaagtttgagaacagggaaaagcatgctcccctcccaccctcagcccgcatctcatggttctttaaatgtattgagcgtcaagctgcctcctcttcaaacatcctggttcttccagctgtatctgcggaaacaaatcattatcacccagtttggggttctggtttcagatgtcagagccatgtgtggtacaaatactctctgccgtctttctcccacacatgggcaaatgctttagagaattcaagaagcaccaggaaggaggaggcagcagccctgactctggggacgaaggagccccaagaagggctggggagagtctccaagtggtccctgtctaggggtacagatggcacaggccatgttagctgtggggcatgaaggcagaggggatctgccaaatgcctgtcttgtttctggtagggccttaacagctgttttctacacctctgggcagctcttaaatagcagtgcgaggatttaggggtgatgcagcacagtttcaatggggaaggtatgaggatggggctttgggatcacatcttgcctcattgggagataccagccaaggttgggggcatgggtgcaggaaaggcctggggctgggcttggaagctggtggtggctgtggaactgggggctctaggcctcagcacacaccctaagttttttcctggcctgcttagggctcatgcagacttgccatagctgtcaggggcctgtgcccccaaatctaaactctgccttcagccagtgtgcttctagggaaggcaggctcccagctttgctggcctactacaaacagagagaagaggccaccccggcagagaaagctcccgtgagcgctggggaaaaggccatgcagatgcaaacgggtgataagtcactttgtaatgaaagaatctaagcctgtagcatctctctctggaatcctgaattccattcattcatctgagtgacatttgttgagcccctcctgagtgccacactctgtaccaggtgccgggaatgctcaggtccggttcttcaggctagcagggaaaacaggcacccacacaaaccgacgcttgtggtaggatgcgatggagactcctacagtgctgtagcagcaccaaaaaagcagcggattctttttcttttttaacttttaagttcaggggtacgtgtgcagatttgttatataggtaaattcatgtcacgagggtttgttgtacagattatttcatcacccaggttctaagcctagtagccaataattattttttctgatcctctccctcctcctaccctccaccctcaagtaggccccagtgtgtgttgttcctctctgtgtgtccgtgtgttctcatcatttagctcccacttattagtgagaacatgccgtatttggttttctgttgctgtggtagtttgctaaggataataacctgagctccatctatgttcccgcaaaggacatgatcctgttcctttttatggctgcataatattctattgtgtaatatgtaccacattttctttatccagtctatcattgagcattcaggttgattctgtgtctttgctattgtgaacagtgctgcaatgaaaatacacatgcctgtgtctttatggtagaatgatttatattccttggggtatatactcaggaatgagattgctggattgaatagtatttctgtttttagctaaaagcagctgattctatctggggagtcaaaggacccttcctggaggaggtgatgtttactctcgaggttcagttaagagtttaccaagtgggaaaggaaggatatctcactcaaggctgagagggcctggctggcttggagaagggtgagacatttggactagagggtgatgcaggaggggatgaacgtggctggagaggggaggaggagcggcccctgacctgggcctcagcctggcccagttgatctcttaaactttcttccagctctgaatctttttgcattgctgctaaagcagcttctgtctgcttctgactttctgtggaataaggccctgtgcaggatgggggtagggattgaagccttggagggcagaggttggttgctcaggggaggacacaaggccttgcagtacccaggctgcacacatcaccttggcagtttgtgggcaaaccctcctggccgaagggagattgcaccgccagccacttcctccagttccttccctctgcctgtcgtcacggttaccttggccttgttgggggtgaggttaaggttgggcggaatcaatttcagccaggtttctattttcccagatgcaggtcagccagaggagctgtcacttctggttcagtttcaaagaaggccaagggactgggaggtgcttgggtgtggcggtgttgacgaggcgcctctgcagctgactcccaggtggggtgggagtggggcagggagaagctcagaggtggtgaggaggcagaaagggggctgccctgccaaggcctgtgccgatggccatggtgctggtctcgggcccaggcgctctgtcctgagcccccagagcatgctgggagcgtgcagagagaggctgtttattttcctggcctatagccctttgggctgagaccttgttccaggccttgggctgccagagtcaccccccacaccctcctccctggctggagaagtgagagagttggcaagcccaggacaatccaacggcttctctaatggcctatgactctggtctgtccccagcccagctggtcctgggtgtccttcagattttcctggtagatcacctaccaggtaggtaggcaagaggcagcaagaggtgccacatcaaagtgctcctgatggactggggctgtaagggctggtggtcaggagcagggtgcttgaaaccagagaaatctgagtttgaatcctaatctgctattttgtagttgtatggccttgggcaaattgaactattgagcctcagtctcaccatctgtaaaatggtacagtaatagtaacttcctcataagactttgatggtgaggattaaatgacatgtgtttaaagcatttatcaaagtaggcaacaaatggcacctcttgttattattactaatggagcaataacaacagcaactttgattcgaagtctgtgctagtgggcagtgagtctccttctcccccattccaggggtcgtatttcacgcatggtgagtttattaacatgtcctgagggagaagcaagcccggaggctcaggaggccccttgcttgttccccagggtccttcagctctcccacaggtgggcatcctgggggaaaggattaaagccagatgaggaggctggggagactgttagtgacaagaggaaatggatcccagcatttggaaagggccaagaaaggaacattgggtatggaggagcggggaagatcttaaatcccaacagaaggtaagaggagaggacaaagatagtcaaggaggtgggaaggtggcagtggaatgtggaacctgtgtccatgcccaagacgtttttaaaggaagtgcctgggaaccactggcctggaaaattgtacccagagggcttgggctgggcaaaagaaaaggtcgtcaccgcccgttgggtgccacctctgtgtgagtagatttgccaggctcctggcctcctgaactcctcatctggctttaatccttttctctgcttttgcatattcttcccccagaatgtccacctgtgggagagctgagggaccctgggggcagaagcgaggggcttcctgagtctctgggcttgcttctccctcaggacatctgaacctggatatctgtcttagtccattttgtgttactatcacagaataccaccaactgagtaatttataaagaaaagaaatttatttctcacagttctggaggttgtgaagtccaatatcaaggtactggtgtcttgtgagggccttcttgctgcatcatcctagggcagaaggtgggaaagcaagagagtacaagacagcaagaaagggccaaatttccttttataacaaatccccttttctaataacaacattaatccattcattaatattgttactaaccacctcttaaaggtgtcacctctcaacactgttgcattggggattaagtttctaacacttgaagtttgggagacacattcaaaccagagcagaatccctgcccgtttgggctactgactcctccctgggatgctctgagaggatccttggactggctgggaggtatttccaactctccaggcagtgggctggcagaagtgatcacttgttcactgccgagatgtgggttagaaaggcgaagttgtccctctgtctatgtgtcaggacagaaactgtactccaagcctgcctcagtgtctaatcagtggctctgtgccctcacagctagatgaggaagaggagcgaaggaaaaggcgccgggagaagaacaaagtcgcagcagcccgatgccggaacaagaagaaggagcgcacggagtttctgcagcgggtgagctgaccgggtgggtggggaggcctgccattccttggagtgagcttgtgtactctggaccaggagaggccatcagatgtctctgtagtcaatgagcatctgctggcagctgccaaagcagccttggcccctctgctctttcctacctcctgtttcctccccaatctctgaaccaagacaaccaagggcagccttcagcagttcctgcccacacaacccctggaagcccaagaaggaaggaggagccaaattcccctccactgaggttagacccttggtgctgattgacccagatggcccaggactgccactatctattttggttccctggtggctaccaaagtcgtctagggtgggtgccaatgaagctaggtagtaacatcctgcatgtgggcactggacacagcctctggcctggctaactttgcacagagaaaagctccttcccttagctgcaggtgtcttatccagccctgcatgccatctggccagcccctcagctccactgaaggtgacctccaagctctttgctgctacctctgggaataagaggtcagctctgcatgtagaggtcagccaggggttgcttttcctcctggccctacctgccctttcatttggaatgtgccaagcaggatgtttgttctttttctcccaagtcctgcctctcagagcttccctgcatctcagaaatggtggctggcagtgagggaacatgaccagaaagctaatcagtccaggccaggagtctctggtctttccacccctaatcattggttcattgctgaataataataacgataatgtataataataacataggggcgggtcctattctgtaagtacacagtaactaacaatagttgccactatttgtaaagttgggtgctgtgctgaatgctgtatgtacattatctcattttattgggataataaccatatgaagtgggtaccttcattagtctctttctacagataaggaaactaaggaagtgtggggctgagtaatttgcccacatctctgctatattggcattcattcatttgtttgctcttttgttcattaattgattcaacgggtatttttaagcatgtactaaatgtgcatccgtgtgttgggtacactgggggcacacaggaagcagcagacacggtcctcctgtgggagctggagagacaaggctagattggcctggtgtttttggactctggagggtctatgggcatcttctcacacttgcaacaagcagagagctattctgtggtcatgggtgtagacagcatggggccgtgtatctacctccaggctgtgagtgtccagtgcagggaatggttattgtagattagagttagattcctggatctgggagcccgttggaagagatggtgctacaacattgggctgggaatcttcaggaagtttctaagacacgagccttcaagatggatgaagtgccacatacctcatttccagcaccaagtgcctgccatgagcagagctggatgagaaagcagggactagagaagcttcacgtgagatccctgccttcaagagcttgtcagccagttaccaggcaagatacgccctagcggacagcatgttagtgacacaccagtgcaataaagagttggtgcccaatgaatggcactcactgcccatcacattccaggaacactagctgagcacctactgtgtgccaggcatttcccatgttttatttaatccttataatattccagtgagataatattatttatccccattttagagactgacctgtagctcagagaggtcaagttacttggccaaggtcacactgctagcgagtggtgggcttggatgtattcatcctttgctgatccacccgtccatttagtaggtgtttagtgagtgcctagggcacagagggcaggcaggcggtgtcggcagtgggatgggaggcaggaaacaaggaaagtgacgtgtgccgagcgttatgttgggcaagcctagccagctgtgagaacacacagcaggggccctgtcctggtctaggctaaggaaaggctgcttcaattcagacataaaagaggagtaggagcagtgagatggaggccctagggggttatgaggaatggaagggttcaagcaaaggcaaaaggtgctgtttaaggatgtgtttaaggcattgaaaaggataccagctggagtttagagtaccaagtagtggggtggagaggcaggcagggcccagatccctcataatagggtgatgctagatgctgggttgcctgaggcatgcccattctgtgcctgttgtcctggcctaatgattagtagccccttccttcactctcacaagtgctgctctaggatgatgaattatatggtcatggagagtcactgaagggctgcaggaggggagacgcacaccttcaaaagatccctctggcggcaatgtggggcacagattgaggtagaaggatcagttttggaagtgtcatgttgttccagtgagacagaagtgcgcggccttggggtctgggaggagatttgggcagcattgtctgggcccaagcccagtcctcccctcacccctgtgttctcctcctcctccccagccttggaagcagaggtttggtgtgaagtttagggcatgaatgcaggcggctgtgttgacagtcagtgcctgcagacctgggggattctcttgtagtttatttttaataggtaaaatacaaggctcagagatacatatgttaattgttaataaatagtaattatttaagtaaggggatatatacagttgggacaaatatctacaggcggcctttcatagccaagggttctgcatctgtgatttgaccaacagtagatcaaaagtattcagaaaaaaaagcatctgtactgtttattccctaaacaatgcagcatagcagctatttacatagcatttacatcgtattagtcattataagtaacctagagatgatttaaagtatacgggagatgtgtataggtgatatccaaataacacgccattttatgtaagaaacttgagcatcctcggattttggtatcctcggggagtcctgggaccagtcgcccatggctactgagagacaactgtatatatgtcataggtaaaaagccaccgtcccacccttgacccctggacaaccagatccacacctggaagattcttaactgcatctcagagttcgcctgcctagactagccgaggccctgaaccccggggaaggggcaggccttgggaggggtcaggtccacaccccacaggccctggggctgcctcagtacatcctccatctgcggtcaggagcagtggccctgaggcttctgccttgtataatgctggcagcttctgtctctctgctgtcctaacccaggttctctagatgttagtagcaataatgctatctcacactcccgtgatgccctctggtcttcatagccactctctcctgatggtcacagtggccctgggaagaggaaaggcagtcctatccattgatgaagttcaaggtcacccagtggccgagtcaggacgagaacctggggcttcctctgtgccccacacaatattcaggttgcccagactcaaaagaaattaggaaactcgtttgtggaagcatagctagcaagtagcagagtcaggattttaatccagacaggtctttcaggctcaaaggggcatatcaggctgcttctcagctcttacaaaaacttagtggaaatctattttatatgccttagaatagctttttaaaaatatagattcagatggtcttttgttgttgctgttgctgtttttgagacagagtctcactttgtcacccaggctggagtgcagtagcatagtcatagctcactgcagccttgtactcccaggctcaagtgatcctcccacctcagcctcctgagtagctgggactacaagcacacgaccatgcctggctaattttctgtttttttgtagagaccggggctccctgtgttgcctaggctggtcttgaactcctggacacaagtgatcctcctacctcggcctcccaaagttctgggattacaggtgtgagccaccatgcccagccaattcaaacaatcttaatgcttaaagtcccctgggccaatcatcatattttctgggaggaaactgaggcccagagagaggaagtgacgtggccaagttcacacagccaggattaaaagccaggacacccagcccttcaccttgtattctttctactgcctttgccgaccacagtgtaggaggcagaaccttaatatgcactaattctattctaaaacaacaaatggtttcattttctctggggcaataaatatctaacagaagtcaaaacaataaacaaaaatgcagccggaggtatatgcttcataattaatgtgagaaagatcttcgctcagttccttcattaattaggaaaacaaattagataattgttgttataaagtcacaaaccacttctacaatcatggtttaaaaaaaaaagattcttctgaactcaacttatatttacacaataaataaatatgtagagccaactaataactctttgagtgtggaaggcagtaaaactaaaaggcagttagttacattctggctgggcgcggtggctcatgcctgtaatcccagcactttgggaggccgaggcaggcagatcacttgaggccaagagtttgagaccagcctggctaacatagtgaaaccctgtctctactaaatatacaaaaattagccaggcgtggtggcacatgcctgtaatcctagctacttgggtggctgaggcacgagaattgcttgaaccttggaggcagaggttgcagtgagccaagatcatgccactgcactccagcctgggtgacagagtgagactctgtttcaaaagaaaaaaagcagttagttacattctgacagccagacagtcagaattcaggatattcaatgatgtaccctaacatttaaaacccacagaatataatgttctttgtatgatagctgcatgagtaaagcaagttaccctacactgcactgatctttgtgtgtgatacagacgctcccacatagagttggtttgacacgtggtaatttctaggaggcagatctatgtgtgcagtgctgttgaattctgcctgtcagaggcttccccttgcatgtccagttttaacttcaaactcactgtacccaaaacaaactcctccttttccttcccaccgctttccagaacagctgccctcccaggcttcattcctcagaccctccattgggttcatagtcagctctctgccctatctccttccttctccaaatccagctagtcaccaagatcagctgatttttctttgagacgtcttccttctcttcctctctttcttctttatgctattctcttgcttataagttacagtaagcctctctggtttacagagtgctttttccctgtgagttcatctaatccccaagagcctcacctgtctacagaggagataactgaggctcagagaagttaagaaacttgcttctagactcagattctgaacccacaagctttccagagctacaggctggctctcaacccaccttctcactttctaccctactaagtcctaaagcgagctatgatcacagtggagtagttttcccttctaaacccatcctaagctttcccatgcctgggtctttgttcactcagggttctccacccgcaagtccctccttccccttctcaacccagcctgagtcaacccatctttcatgcccaaggtcagacccgctctttagccctctctaaggtcttctgaaccctgggtggctgttggtcacacagtagtaagctctgccttgttgcacagattgcttcttccccttacagtggaaaggccacaagagccagttgggggctcatggctcttggattccccagggcattcactgtacatagcagggcctcagcaaacactcacagatgggtgggttaccctgacaccccttgaggcaggggctcaggagagtttgaagatggaactaagcccttgggctggggagaccgtgatggtcagagggtttgtgagaagttcccaaggtcaccagagagtcaccagtgagcagggggctgacattggcacctaactgccccagcccgagggctcacaggcttccatggattcacgaggggtctctcctggccctccgagatgcgcctctcttggaattctcagaacagaggaccaggccagcttcccagtcacgtcccagcctgtggaaccaaaaaccaccagagctggtttttaatattttccccgagcatttttttttcctttagtgaggctgttttctctcagcgtctggtcacgaggcctgcccgtctcagagttcccgggcactcatgctgccacctcagagatgagccaaggaacagttcggtcagaccagctgtgggaggaagacgggacccctggagggagagggttgggcccactgagggttctggggaccccctggggaggccgctccacctgtaccctgccaggaggactggcaggcttatgggcttacgggccctctggttgtcacatacgcagttgcaactactgcttgctctttgactgatacaagttgctcaatctcttacgctatcgccattttggactaaatacttgtggggctggcctgtgcattgaagggtgtttagagcatctctggcatctacctgctagatgctggtagcacagctccctctgagttgtgacaatcaaaaatgtctgcagacattgccaaatgtctcctgggaggcaaaaatcagtcctagttgagaaccactggtctgaaactttgctggccctcgaataaatgccaagtctcaaagttttcagacataatccaagaaaaatcattcagatgctgttttactgttcaatcccccaagccttgaatcgatatgcccatctcccatctacacgatggacatgtaaccctcgccacctcccgaatcaaatcgtcaacattccttccttcccctggaacctctccagctgagccggaagttccctggaaatctcactcaaggtctattggaaacctcatttgggatccagcaggatgactgctgattccctgtctgtgggcaaagcttccagattatagggataaggaagaggctattgaaataattatagactaatagctaggaagcacatgttttaggaggaatgacatgactacactacactcactgatcccaccggccaagatatctcccacatgtgtctgtcacacatcaaagcacgttgccgttacactgccatctgggtcccctcttgggcccccccatgcttgctccgtagacctgctctaggtccacctggcctcctttctttgcccaccctttctttcttgtgcaaaggccctgaggcggcagagtatttggcatatttgagcaacagcaaggtggtcactgaagctggggtggattgagggaggggagagaggtgggacgtgagtctggctggccctagaatataacctggacatgacacaggccagtgtcaccgctgtggcaggcactgcctgcagaaagtcagttagccaggggctcagtagcagggtctgtgcttcttcctgcagaaaacaggccagtgccagcccagcgtgccctgtgcctaaccacaggcagagcctctccccagagccagtccccgtgaaactcacagcgtgcttctgtgttggtatacaggaatccgagcggctggaactcatgaacgcagagctgaagacccagattgaggagctgaagcaggagcggcagcagctcatcctgatgctgaaccgacaccgccccacctgcatcgtccggaccgacagtgtcaagacccccgagtcagaaggcaacccactgctcgagcagctcgagaagaagtgaccatgggctgggaggaggtggaggaggaggaagaggagaaggaaaagtgacgaagagagaggaggaggggggccccagatggcccttcctttggtgcatgaaaaactgtacaatgaggttcagcacagccagcatcagccgagcttttttgtgaaactcagatcagccacccaggaggaagagcgggctgaggaaacccagagggaccaagcgctgagaccaaagttgaccctcgggtagggttgtcctgcctggggccccacttgaaggaggcaggacagaggcaccgaggccagggagacgcccaacgaggcagccctgggctcttctctggcctcttcaccagggcacccatccaaggaacctccgaacagccaggaaaagccatgagttgcaaccaaaacgcggctgaggatggaactcagaatgaaactgcaacccacctgcccccagccctgcccctcgccctgatgcgaagctggagaggggcgtgctgcggggccctgatgcccccacccacctcggtccagcgcggccctgcccaggaggcggcagccgggcgcaccctcgccagccctgctggagtttgctgtgggcactgaggcgcgggcgcccttccaaagcacatactcaccgaatgtttacagactggctgtcctggcagggctttcaactgcacatgttttttatactttcctttttttttttttttttaatattttttacaaaaaaaaagattttatacaagcaatatatatatggatttctataatcactcgatgtgatacagtataaatatgctatggtttgtttgttatgaacagatagccaccagttacggccgttgtgtgtaactcctaagtactgtagtctctgggtgtcgggggtggccagggcgggggcggggtgcatttccatccttgtaaacccttcatagtactcagtcctgtatcgctcagtaaacattgctcttacttacatagccgccttgcgtggtgtctgcctggggaatgggtgcaaggccctctcagggtcggagactgtttggagcctctgctataggcctgttcattttcacaacagctctcctatttcacagatgaggaagctaaggctcagagacattaagccacctgcagttactattttgagagcagtcagagtgttcgctcactctgcagatgttttctgagggcctgttgtgtgtgccaggccctgagaattcactggaggatgaaacagacctaagtcttgcccttgtggggcctccagtaaggagtgaatcctgtgcttgctccataagttgtctcatttcgtcttcatggcagccttgccagggaacagcacttgtccccaattcacagatggcgaattagaggtccagggaattaaactcgcagacaccatttgttgaagacttattttgtgacaagcagacatagtctcttcccttctcacaagagcacaaactaggcacgattcttctcattttacagatggtttaactgaggctcagagaaggtaagcgacttatccaaggtaacccagctagcaagggatagagctggtgtttgaactctccctccagaggcctgtgactctcctcctgtcaccaacccactatgattgtcctcatggttgaataggaagcttatgaggccacagttatagatttagtttctgggaaggctggatagagttccaggttgtcccatgatcacagagtgaaccaactaccctggtcaatgtgtgtctgacccagggaagggtgtggatggcttctctgccccctcacctcgacagctgaatccctgccacccagggccggagcagctcagtggcattcactcagtgcctgctgtgtacctggcactcggcagttctcaaggcatgtcacgcatgaggaaggcgggagaggtgtttttagcttccttgtatactgaagcttgcaaaggctacagtttacccaactaaacttgactcctgcattctaatcatgtgttctttctcctccatccctggacttaggataactagttgctggtgatgacttcgtgtcaagaacagcagtgaacctgggttgcttcccaaattgtggacgaggccttctgggatgggcagaagtggagaatggtgattaacacacctgtgatccctccctcgctcactcctctcagtttccctccacccaacacacttggtgtggactcccctgcaccccgccctagaaacaggacctggtcctctcactgtcagctgtggcagaaggttgtggcagcgggttgccttctgtctcgggggtcttgaggctgtcggtccggacgatgcaggtgaggcagtgtcagttctgcatcaggaacccctcgcgctgtaatcctttgatatttttcaagccatgagaaaaatgaagtggacttaccagggtccctccagtgacctagtggatgttcttacaggactgccgtgtgccactggctgtggcttccctggtcctgtgcttggccaccgggagctggcatctccaaaatagagcctccttagcctgtgcaggtgggctgtcttccaaagtcaccacaccagtgacttgtgctgtgcggagccttcctcaccaggaccactggctgctcctgtggctagaagtcacaattataggcttcattgcaagagccagcatttgagtttcttctgggcacctgccactgtgcatgtgtgacctcaactgctttgtgcaccctgactggggggtaggtgctagcgttccaacattacagatgagaaaaccgaggcacacagaagaggtaacctgcccaaggtcacaggtgttaggtggcagagccaagatgttattgtcagtctgacttcaggtgcataaaacctgaggctgagcctccccatgagaggaaaaatgtgtttgtggtgtgacctcagttgccagggaacttgtgcaggaagccgggagagatggcacagacccacctgtgctcacagtacatgttaagaattcccaagtctcaggcaaaccatctccaagggtgttcacagaagacacaccttaaaggcaaacgggttcatgatgtaatcttctattgactagctgtgaacctcatttttcttatctgtgaagtgggaacagtaataatccaagtctttttatggagttatcaagatcaaaaaaggaatggatatacaaagtgttttgtgaaataaaagctccctaaaatggtaattattttgtcctctgttagtgtcggtagttattgatatctacatagtacaggttatttaaatatgttttattctgtaaagatgggctgccaagtttgtgttctgaccctgtacgtggtccctatggtgtgatgaatgcctgggatcgcagactcctggatctgttcagctcctgactggtcacaaccagccatgctggatgcatcattccctccctgggcctcagtgtgccctcctgccaggtggtcatacataagacctgtgccacctctgcccagggttcctatgagaatcaatcgagttgatgaatgcaaccatggcctgagaaagacaagacgctttagctatcagatgggcagaaacaagtatgtgttggtaagaatatggattaaaggttgggaggccaagatgggtggatcatgaggtcagaagattgagaccaccctggataacacggtgaaaccctgtctctactaataatacaaaaaattagccgggcatggtggcacgtgcctgtagtcccagctacttgggaggctgaggcaggagaatcacttggacctgggaggtggaggttgcagtgagccaagattgcgccactgcactccagcctgggtgacagagcgagactccatctcaaaaaaaacaaaacaaaaaaaatgtggattaaaggaaacttagatatgctgccagtgagaaactgtgcaaagcaatttggaaataaccagtaaaactaaagctaaacgcatcctttgacctagcagttttcctcctagtcttgggaggaactctagcacaggggcaaaaggaaatgtacaagaatgttcactgatggctttgtttgtatttttaaaaagttgaaaacaacctaaatgatgatcagcataagaacaaataaattgtggtattttcctaaaattgaatattactcaacaggtaaaaaagaatgaaccagagctatatgtatcaatatggataaatctcagaaacctactgttgagatggagggtaggggagtgaactgcggaaggataccacttatgtcatatttctaactaaatgtatacgttgatactttattgtttatggctacacacacatctgggtaatagaggtataaaagcctgcacaagaatgctgtcaatatcacaatcagtcatagggagtgctcctgggagggccgcggagaggagggaactagggatgccactgcaagggtaagtaggacgctggacttcaacttcaactatacacataacatttcatttatttttttaaaatccccatcaaatgtagaatgacaggatttttcagaggtgggtgatgtgtgcacagatgtgggctatcttctccacactcctctgtatatttgatattctttgcaataaaagagaacaagccacaatacaaataggaggttttgtttttattattgccttagcaaactcaggaaataaaaacaaatctgaaattacaatgggattgcagcatatgctctttgaatttatgcaaatttaattatatgcctgaagggagagagagagacaattcaaagggtggaaagaggttagctggttgagccctgcgggagggtgccccggggtgaggacaccttgaggaatgttgttctgctctacactcagtggatcctggtccctgctctctacgggaggggcaattaaggcgtgttcaaggttcatctggactctagacttcttccttacatgctgacttttcaatccaagccctgctcgaaagccaactgtactgcgcctacaagtggagctctggactggaaggcaagcagaggggaagcctttgaagatgggaacccagttttgacaggtatattcgttttctgttgctgccataataaactatcacagatttaatcccttaaaacaacacagattttgtcttgcatttctggatgtccaaagcccaaaatgcttcttactgggctagaatcaaggtgttggcaggactgctttctttttggaggttctcggggaaaatctactttcttgctttttccaggttttggaggctgcccgcattctaccttcaaagccagcaatggccacacatctttctcacccattgctatgacgctgactccctgcctccctcttcccaaccttctccatcctttttttttttttttttttttttgagacagagtttcgctcttgttgcccaggctggactgcgatggcacgatctcggcttactgcaaactccgccccccgggttcaagggattctcctgcctcagcctcccaagtagctgggattacaggtgcccctcatcacaaaccgctaattctttgtattttttagtagagatggggtttcaccatgttggccagactggtctcaaactcctgacctcaggtgatccacccgcctcggcctcccaaagtgctgggattacaggcgtgagacaccgtgcccaaccttccctattccatcttttaagggcccttgtgacaacattgggtctaccccgataatccagataatctccttattttaacgtgtgctcattagcaaccctaattccacctgcaaccttaattccccctggccacgtgacatattcacaggttccagggattagaaggtggacatcttggagagcagatgattctgcctgccatagcaggatattcagaattggaggttcttaactattaggttggtgcaattgcatttgcaccaacctaatatgacccttctcactactaggcaagacaggctatttcccatgtaagtgccatgaggatggagtccctgtgtggtgcatccctagtgcccgtcacggtgcctggcacatagcagaaggtcaacacacactatacacagacatataatctacagactcacaaactcacagatgtgtgacatgatacagacacaagcatagttacatgcacaacaaacagatacacatgtagatacacaaatacatgtattcacagatacaagcagacacacattaaatgcaaagtaatgagattgatgcaggtcctattcctttatattatagttctgaaattctgaaatcagcttgttcgtcatactagcatatctttgttctttggaaatagctaacttattgttaataaggaggttaggtaaagtgcacatactgttttggctttaaaaactaaatattgtgagactgattttttttttttttttttttttttagatggagtctccctctgtcgcccaggctggagtgcagtggcacgatcttggctcaccacaacctctgcctcctgggttcaagagattctcctgcctcagcctcccgagtagctgggactgcagccatgtgccaccacgcctggctaatttttgtatttttagtagagacagggtttcaccatattggccaggctggtctcgaactcctgacctcaggtgatccacccgcctcggcctcccaaagtgctaggattactggcataagccaccgtgcctggcccgggactgatttttttttgtttagctcgtaaactgactctttgagtgattcctaaagaagcaactactaatgctttggaacatttgtgaagtaattacatgttcgtgtcagcctctacctctctgaagcagggtacacccctgggtggtcagtactggacacctgttctgatccacttaaaatcctctgactctgttctatgaccagttctgaacaggtgagcaactttacacaggtgtaacctgacaaagcctccctacaggtgcacaccctgtacctcccacttcctgtcctcgggggcctctgtggccgcctccttggcacttgcccatatggaaagctggacatttggggagttaatgcctgtagggtctcccttgactaattgagaggtgggaggcagagacagtgaataaatgtttttcccttttattctccaggtggaggatttgtaactcttctactgccccacattgtgtaatccacaggagctttgatctccttgacattccacagaatcctgctcccattgcgtgctgcattgtgctaatcagacctacagggcagcagctgcaagcgctccagaggccctagtggcgcacgagcacgtgatgtgggcaaggaggcctcatgaggattctgggcctgccacgctgaggatgtttacagtggtgcagtgtctgaggcattctgaagcatctcattccaaataaagggcaggttattgcactttactccctatcactaagaaagaggcacgggcccagcggacctctctggattttggaggcagcatatataccacactaaggagtggtcctctaacccatttgtcagtgccttggaaagctgccagtgttttgttttgttttgttttcagacagggtctcactctgttgcccaggctggagtgccatggtgtagacccggctcacagcagcctcgacctcctgggctcaagtaatcctcctgcctcagccttctgagcagctgcaaccacaggacaccaccacacctggctgatattttttgtagaaacagggtcttgccatgttgcccaggctggtcttaaactcccgggctccagtgatcctccctcctcagcttcccaaagtgttggggttacaggcatgagccaccatgcctggccaacctgccagttttgagtggggcctagagcaaggaagggctctgtagcagatctaggcttcagtacaaactgctctgccactcacaccttgtaagacccagtagagctagaggcatccatggtccataaggttggctatttcaaatgcacaactcacgaaaaattaaaataaactttatatgtcattccccactttgaaatgtacccaataaggatcacctttcttgccccagatgaaagttccagcaacttttctgctcactctgtctgcttttctgcagacagtcctccgccatactaagcataatttattaattagaagctccagtctaagactcaaagtcccaggttttattcaatgttcaaatcttccccactccctagcttgggcctgcagcaggctagtggcctgcagtggggcagggagaacccactgtctcttctctatttctccccttgcccatctcctcctcctcccttattcccttcctccctcccaagctgtctggccagtttctgacccctcccaaggatggagcaggaggtgagagcagtggcgagggtgcaggaatggcctcatgacattgacctgttgggattctgagctggctttgggtgcactggagttggcacatataaagctgatcctttctttcataggtacctttgtgagttcttctgaggcttctatgttcaggaacctctttcctgtatgtcccaggagactgcctctcacttctagcatcttgctggtacatcccggcatcctccacgtggcgctactggacagaacccaggacagtccagcgctggctttgggaagcccttgacatcccattttctgtcccttgcccagagacatacaggatatacagacttagcccagaacaaccacttcttcacatggttccatggaggtctccttctcacagggctcaagaagaggaggcagcagcccctccctcctgcctgaaggaagtcagagactcagcaacgcaaggttctctcgaagaaattgctctaaaaatgtccccccgacctttgtgcttggagcccttcttatctcctcaaactgcagaagggtccaatcattatgtaaaaagttctttaaaatgtgtacagtctgcaagtggtgatccggcttcacatctaagccttggtgtctccatcaatactttaattcttggccgggcactgtggctcacgcctgtaattccaacactttgggaggctgaggtgggtggattctttgaggtcaggagttcgagaccagcctggccaacgtggtgaaaccctgcctgtacaaaaaatacaaaaattagccgggcatagtggcaggtgcctatagtcccagctactggggaggctgaggctaaggcaggagaatcacttgaacccagggagtggaggttgcagcgagccgagatcgtgccacggaactccagcctgagccacagagcgagactctatctcaacaaacaaacaaacaaaagccacaacactttaattctaatatcctgatacattgttttctaggctaaaaggtagatgatgattataaaggtttatggactcatattacctggctgtgaaaaagaaactgcataattgcagctaagaggatggcttccttgggaactaagggacaggtactagtttttattgagtaccaaccatatgctgagttcttgtgaggcgagtcttatattaatatttactgtcgaagaaactgaggcttagataagagacttgtccaacatcacacagctggcaccactggacttcaccgaaagtaactgagctctttccaggctggaaagcaaatatagacccaacaaaatccctgccttcagggagggcacagtctctcggggaggaagaccggtccctgtggtcagtgctggactggggcaggtctggggcgacaagagacttctacctaagctcgggtaaatttccttctaaggtgaaataaagccccactccagctgggtgtacctcggggtttggtgaccatcttattctgttcccccaagggtcactctcatgcatgtcaacatttttgtcttttgatggcagtcctggcctcccccaccccaatcccagtggtcagttcaacaatgcgtgaaccactttcttcttggccatttcatagttgcctctttcaggtgaccaagaggccatcc

SEQ ID NO: 321 - DNA, 612 bp, Homo sapiens
gcggccgcgggaggagggcgcccaaggcggcgggggaggttaaggctggcctgccactcctcctgctatgatgcctgggcagatcccggacccttcggtgaccacaggctccctgccagggcttggccccctgaccgggctccccagctcggccctgactgtggaggagctgaaatacgctgacatccgcaacctcggggccatgattgcacccttgcacttcctggaggtgaaactgggcaagaggccccagcccgtgaaaagtgagctagatgaggaagaggagcgaaggaaaaggcgccgggagaagaacaaagtcgcagcagcccgatgccggaacaagaagaaggagcgcacggagtttctgcagcgggaatccgagcggctggaactcatgaacgcagagctgaagacccagattgaggagctgaagcaggagcggcagcagctcatcctgatgctgaaccgacaccgccccacctgcatcgtccggaccgacagtgtcaagacccccgagtcagaaggcaacccactgctcgagcagctcgagaagaagtgaccatgggctgggaggaggtggaggaggaggaagaggagaaggaaaagtgacga

SEQ ID NO: 322 - protein, 116 aa, Homo sapiens
MIAPLHFLEVKLGKRPQPVKSELDEEEERRKRRREKNKVAAARCRNKKKERTEFLQRESLELMNAELKTQIEELKQERQQLILMLNRHRPTCIVRTDSVKTPESEGNPLLEQLEKK

SEQ ID NO: 323 - DNA, 771 bp, Homo sapiens
tctgaagagggccttttgctgctcgccttcactctcagtcttggggccttccccatcatcttgcttctcgccttctggatctcctcgacttttggaagccgcgtgacctacgtcattcagattccaagagagaggtcatcctgggtgattccttagctccaagaagaggcttggtggttgattctccaagattcatggtagcaggctggcctgccactcctcctgctatgatgcctgggcagatcccggacccttcggtgaccacaggctccctgccagggcttggccccctgaccgggctccccagctcggccctgactgtggaggagctgaaatacgctgacatccgcaacctcggggccatgattgcacccttgcacttcctggaggtgaaactgggcaagaggccccagcccgtgaaaagtgagctagatgaggaagaggagcgaaggaaaaggcgccgggagaagaacaaagtcgcagcagcccgatgccggaacaagaagaaggagcgcacggagtttctgcagcgggaatccgagcggctggaactcatgaacgcagagctgaagacccagattgaggagctgaagcaggagcggcagcagctcatcctgatgctgaaccgacaccgccccacctgcatcgtccggaccgacagtgtcaagacccccgagtcagaaggcaacccactgctcgagcagctcgagaagaagtgaccatgggctgggaggaggtggaggaggaggaagaggagaaggaaaagtgacg

SEQ ID NO: 324 - protein, 116 aa, Homo sapiens; identical to SEQ ID NO: 322

SEQ ID NO: 325 - DNA, 204803 bp, Mus musculus
  misc_feature (1)...(204803): n = A,T,C or G
aactagcaaggacaggaagctgcttgtctcctaggaaagataaaagaagaggtggggctgccatagccaattgctctccaacctgtgggaatgaggccctgttctagatgcagtgaagtctgggaggagataaggatgtgggtgggtaccctaaagcacaaagggaatatttcctgctatctgcatcctcccatcctagcagccactgaggaggaccaaggagaagcaacctccttggcttgaacaacaagaggcagaaccccatgcaatagtcagggattgagcccagggtcttctgcatgttaggcaagtgctctgccactcagctgccctcagatttctcctttacacactggagctacgacaagcctcagcctggatgctcaaagggatctagagctaactatgttccccaccaaacctgctgcttcctctttaatgattgcttaaacagtctgatgagctcaagtcagactactatccttggttcactttttcttgtgttgatgatcaagtttattgctcaagaaagcaatcaagagtctctttggcagcgtcagttcaagctctcactattgtcgcctaggggaaggctgctttcctgattctaaggccctgtcttccttgtctaacttgcatacagccgtcagaaggaccgtctaagtcttatgttgaaccacagaccttacctgctcaaaattctagagttctttccacaaaattcaaaagcctcctgggacaagtggcttctgaatccctatggctgctgtgtgacaagaagccaaggtggcagcaacaactgtcactagggagtagttggagctggctactgaagctatgagaataatggggcttatatgcagaagctggggggacatgcacctgatttcagacaactaagaatcatttgttaaaaaaaaaaaagaatcatttgtaagtaacttttccactcacagtgaaacatggagatctctaaagcttctcatccaccctggcacgtatgggccaggaagacatccgtctcccaaggtttcttaaaagctgtaagtgtccttttgttgtcatgcctgtatatatgaaggggggtgggcaagagagggacctgtaactagtgtaagtactcctcattgctcacagttcttgggagcacgcgtatctgcatgtgtacatgccttgttctcgggagcatgtgtatctgcatgtgtacatgccttgttcttgggagcatgcttatctgcatgtgtgcatgccttgttcttgggagcatttgtatatctgcatgtgtacatgccttgttcttgggagcatgcgtatctgcatgtgtgcatgccttgttcttgggagcatgcgtatctgcatgtgtgcatgccttgttcttgggagcatgtgtatctgcatgtgtacatgccttgttcttgggagcatgtgtatctgcatgtgtacatgccttgttcttgggagcatgtgtatctgcatgtgtacatgccttgttcttgggagcatgtgtatctgcatgtgtacatgccttgttctatttcttggcttttaagactcttgtaataggttacgagatttcatttatgagatcaccccacccccagcccaacatagcttgagagtaaagtaacaggaactaagatgatgtagaaaaaaagtgccattgagagcacagagcaaagactgagagtttctgatatagtagccgtcctcaaactggacaatagcctaactggggcctggtgcaggtgataagtgggaattgttaaaaataggccaaacattaaaccaaaccaaaccaaaaactcaaacaaagaataacaaccccccaaacaaagaaaccaaaaaaaaaaaaaaatcctcaaaaaccataagccaaccaacccaccaacagcttttcaagagtaggtggtgtgaacacccagtgatggatgttcagactgagttgcagtaaaataccccgggtcagtcagtctgctccttcagtagcccagcgagagtcacctacaaacggatctgggaagtctgtgcttgcacggaggccctagccccgtgtagctctccggcttaatgaaaaggaaatagatgtaaattcagttgattattcatactggccacagttcaagtgctctacaacaccatgtggctgatgattggccactggaattgtgggtggccctgatacaggctaattccatcactgcaaaaagagctaccaggtgagccatctctccaacgcttttaaatatatcaaaggagccatgttggaaagcattgcttactagagatattatgatgatgactaccaggttcttttttgaggtttatctttatgagtatgaatgtcttacctgtacatatgtctgggtaccttgtacatgctaacacaaaaacatggatcccttcgaactgaagttgcaggcagttcatgtgggcggtggaaatcaagtccgggtcttctggaagaacagtcagcacgcttaaccactgtccatctctccggccctatacttgttgttataaaagtataagaatactatgttgtgatagagggttatttgctaaaatacacaggcaggcacgtaaccaaaagctaagcgagtaagaccacacctggaacgtgtatgtaatctgagcatgcctcctgagtgccacatctggaacgtgtatgtaatctgagcatgcctcctgagtgccacatctggaacgtgtatgtaatctgagcacgcctcctgagtgccaggtgcactggggcacacctgggaccactgtgctcaggggtggagaatggagtgtggtggctacaagccagccaggagcacttggtaagaccttgcagtcctcacgtaactgccctctaggagacgctgttaccctctcatcactgcaacaacacgccccacaaacgcagcctaaggggcaagggcttgctttgcctcagtttgtttctctgaattatactgttttttttttttttctattttatttttgaaaatgtaactacatcatttctcccttccctttcttccacacacccctccctgctctttcaaattcatggcttctagctttcactaactacatcattatttgttacatggatgtcctaactataacttgatcatctgtataatggtgcttggatgtatggatgcagggctgaccactcggtactgaagaaccaactggggtgctctccccgggacagactcctcccactgttggttgccttccttctttggtaagcaccttcttgctactccttagggaggtggctggaaagagtcagaggcctttgggtcctgtatctacttttcacttctgggagtgggggttgggagaggacagaagcaacagcctgcctattgtgggagtctctgtacaaccaaggagtcgaggagtctcaggcctagtgttgtttaagtttttgttgggtgttcttggaccctgggactggcccgggttttgagggtgtagtccatcatggtggagagatgaagggagcaggagcttgcggcagctgtcacactggatccagagaggagtgagaaggctgctgcccagctctcatgctttttatgcagtccacagctcggtgctgcccaccttcaagaggggctttcctcctcacttgatcctttcgtgaaaagttctcccagacacacccacaggtgtttccatggtgatgataaatctatcaggctgacaagatttacccgtcacaccgaataacacattcttgtataaggaaataatattagatcagaatgattgaaacatagactttacttatgaaaaaaagaaagaaaggaaacaatttaaaagacaagtacagaggataagcttgcacaccactataaacaccggggagtaagggcaagaattttggggggcattcagcaaaggaagggggaggaaggctgggaagtgagcctaaagacgggggaacatgacgacttttaaagacaggcagcaaagctagggaaacacacagttaaaacaaaaggaaaaccgagcaccgagctgaacgtttagtgtagaatgagcatgcgtgcgcctgtggagaaaaaccttcactctgctggccacgtggacagaggtcagatggatctgtagactaggaagtaaaagccgaacaaaaaagaacttctccacggatcccaggaatcgggtgaaacaagatgggtctgatgggagtgtgtgggagagtgtgaagacctgtgtgactcacacacatgcaggcacacctccagtatcaggccatgagtccaggcagctctgtcaggaatccatgttggacaatccgtggagcacatgtgcacacactcattccactctggcactgaccacaggagaatccctgagcagggtgctgcttcctctacgaagattggcagggtagggtcacatgcagcccaacagtgcaccctgtggtgaaaactccactctaaggatctctgagcttattaagaacttatttaatacgcatgggtcttttgcctgcatgcatacagtgctcatggagggctgcagttacggtgtgtgagccaccatgcaggttggctcccctgggagtggaacccaggtcctctgaaagagaagccaatgctctttaactgcagagccatcttgccaggccctttgttaaacatttgactggtgccatctgggataaggccctaagtttttgtgtttaagccttttgctctggcttcctgtcaggttttacatggtcatttctcagagtttatgaaaatatatgtgttctcttcctgacaatattttcatgactttctttgtcatggtacctctagaattcacttacaggttacatgtcatctgtgagaataaagctccaccattataaagttggttggagcaaaaagatagtgaacagaaaataaagtcaacctggcaaaacagctgtgctgcagtcagctttgggaggggagtgacctttgtcctaattgtatgtttcacattatagatagaactataatgttcataagagttagcggcttggcctgctcttcatgtgcccagtaatcagtactttctttacctggcttggtgaagggcaccctactgtattccacacgtggccataagtgtagcctaggacgacgacgacgacgacgacagaacccattcacggcagcagacttcccgaagtactccaggaagtctgaaactccccacccctcatcacaagactaagggtgtggtcccagtgtctgtggaccctgctccagtggagcagacaaagggacctgtgcaatctgagcaaggcagccactgtgtcttagttattttgtggatttgattcaagaaagaattatcagggaggagggaaggaaactcctctatcagatggcctgtagacaagtctgcagggcgttttcttgataaacacttggtgagggagggggcccagcccactacagcccacctcccctaggcaggtggccctacattatctcagaaagcaggctggtccttggtccctgcttgaattcccgcctccagatcctccagttcctacctgactcctcttcatgagggactacaatttatggttgcttatggtccttgtgttatcacagcaagagaaaacaaagcagaacagacagaaatgcaggggggcacaggctagctcccctccacttcaagttctccccggctcagctgacctgtggctgatttccctgctgtcgacctcctccctggcctgcccaggccatgagcagcactctagtcgctgcattgcactgggaacgctgatgaaaacactgacaggacgaggaagacagaagcttcaggactatgcaagtcactggtagtaaagatctgccttgctagactaagcactgtgtgtgcgctctgcagatagggagaccagtatgatcaaatggaccaatgactgtgcaaatccaccaggcatctcggcactcagcaaccagtgaaataagactatagccatcaaaccgtaattgcctaaattctgggtccccaaccaaacagggagggccatgaaacgaaaagtcattttcctagacacagagctaagtggttggagttagagaacacacaacctcaagtaaattgatgaatgtacatttgtggcacatattgggttttatttgtgacggctaatagtgaaaactgctccatctgaacatgtgtcatggttgataccatccactatgaaaatggggagcacatcttagccactgccaccctaacttatgaactcctcagagaagggggccttaatgaatatcacatgcagagtccaagttaggtttctagactcctggccagatgttccttatactgctgtctaaatggcaaacaaagctgcaaatcacacacacacacacacacacacacacacacacacacacagagcaaatgtggagtggagggatggggaaagggagagtaatataggactccgcccccaataacaagtcttcagggggcgttacttagaactcaggaaagtacagtgttgttgcagagttgaatcgttcacaggagacctgtcacatcttactttcataacctttgtaaaggccaaaaacattacttttcatttaaaaatagtttttagaaggagctacttcgatcaccagatctaactacttaaggttgctaaagaccatgctatcagtggtaggtgaggctgctgtgtttctgcataggttatgcttagactttatgatttgggaactatgatttctatttttctgaatcttaaaaatattgaacaaaatgtgaagttgagccttgttttcttcaatcattttttaaacacatctttttgcatctttggtactcaaatgtcaaatgtttaagaatcgctgtagatcacaagaaaccagacaggagatggcaggctggagtgtccctgtacatcgataccatcatcaccctgcccagagcagactggagcacagtctataggacagagacctgggccatggcatgttctgatttgagtcttacgttgtgttccatgcctttcttaagtttgttttgacataaacataaacacacttctttctttcgttgtgttcatgctgtgatgtgtagaattttgaagtccagcaggctggccttgaacttgtgatgctctgatctactgtagccttcatggaccagcaagctgggaccagcatctctgtatgttaaagcactgccactctactcctttctgccttctctagcactcaggacaccttttagccatgttcacttgtctttcccgattgttctctacgtctctctccaacaagggctcagcagctcaccgtgcacgccaacctaagccttccttctcctggggcttggaggagaggagcaggaggctgagtttgatccctgtagccctgaggggaagggtaggtgtggacgagggagtcaggctattaggtaaaggtgctagctgagcaagcctgagcttccaagttccatcccaggaacccatggaatgcacaaaaaagcaggatgtggctttctattaaactgattacatataagactctaaagatgactgtatatattaactcattagtctacaaaataagagttctttgaaactttcatgcaagctattttgataatattcacccccaactcttcccttggtctccttccagatctccccaccccaactttgtgacctgtctaaatttaataacccatcaactttagcttttgctgttcataaacttactcctgggtatggggctatccattaattagagtgtggctgacctggagtcacaccattacagacaactgccttttcctcccttagaagctattacccgtccataccttctcagggctgcaaactcagcctttcctgcttctggaagaagcccttgcccatattcctgtaagtgatccagtaacactcattcaccaagttcaccaagatggactttgatggcatccaaactttagtgtgtcatggcttccctatctggggtaagttgataggtgtgttttctctccccaggagaagttttgtcatgacatagatgatgaacacagtcccactaaaccccttagggagcagtgactttattgggcttacttcgaaacatgaaggaggacttacaagaacatgggtgagcccaaagcagttgtgccaccagaaagtcttacccagcatgaatgatttacccacagctgcagagattgggggggggggtgtctccccttcagttaaccttccacactctgtaatccagcatctctgctgggacagagacaagtgccactcgggcaaaattccatacaagtggctgggggacaggctgagtctcatggagaggctttgtgcccactcctcctaaggacagccaatcagcccgatggcatgcaaggatcacagctgttctgatgaccatgacagctgtgctgttagttgaaacagtcgataagatctcttctgcacccctcgtacaggtccttgagccacctgcccacctctgccagagacccatatacttagctgcctctctccaaatcatctcatgagatcaaccaagccactatcttcaatctggaggagagcagcttcgctccttgcctggggctactctttctaggctcacggaaacaattcacttgcttctgggagggtctagctacatccaagacacacccataaattacaatgctccagttaacaaggtttgctcattctaatttcctgaacaggatatttacagatgaaaagttcactagaaacggtgtgttttgaatgcactttgagggagataaattctggggtggtatctgaagtggggcagggagtgcatgtgtgcacacctgcatgtgtgcacacctcctcttcagactgtacgcacttccaatttcactgtggggaggtgttagcagagctttgggactcgaaaggaagggctgacggaaaggcatttcagaaaggacggacaggacctgtgggccagtgcctcacaggaagtgagaacaaggtggctttaaaacacaccactatttttggatgtgattacttaaaacaggcattttctggacgggtgatcagtttctgggaggacaaagttcattttagaatccttgtcctcatccctctttagcggttggaaggtaccccaaataaacatttaatgagccccatcacatgtctagcaagccacgtgatgttcaatctccaagaacaatgggccatgtggacacccttttactcaattgttgatgaataaggccctcctagccctagccaaaacctatagaatttaggggcatgatctggatgcagaatgtctggtttactccctccgaaagcagcagtcattcataacatggcaaactggccttctgctagcttacatatataaaaagctgaaataacaatcttgaccacttggtgtgttgctttctctagactgggacagtgccagtagaccaaaccaagagcagaaagaacacttttggaattcggcccatatcatatcaccaggtaaggacctcaggtggaaactggaagaaacacataggagggccaaacctgcacagagctgagaacatgaggcaaggcctacaacctggtgctcaaaggaacctggtagagagggccagggaaatgttgcaggaatctccatgactgaggactcaggctgggaactgaccccaaacctggggttggcacacctggtcgaactccacttgagcaccagtggtcgccatctgagaaccactcttgagcaaatctcttaagcaaacaccttcctgccgtctaaacctacgcttttcccaccagagggagacatgggcccaggggcaagggtggcctcagtgtcccagccaactgctgggaagccggcagattttcagagagcgcgggtctggggaaaaaaatccagtccgggttttgtctgaacggagaccaggaaggcagcgaggactggggaagagggggaggcggtgaagacacgacacaaacagctcgcgcccaggacaccgcggtaggccctgagcgcgcgggcgcagggcccggagaggcgcgcgccggcccgnnnnnnnnnnnnnnnnnnnnnnnnnnnnnnnnnnnnnnnnnnnnnnnnnnnnnnnnnnnnnnnnnnnnnnnnnnnnnnnnnnnnnnnnnnnnnnnnnnnnnnnnnnnnnnnnnnnnnnnnnnnnnnnnnnnnnnnnnnnnnnnnnnnnnnnnnnnnnnnnnnnnnnnnnnnnnnnnnnnnnnnnnnnnnnnnnnnnnnnnnnnnnnnnnnnnnnnnnnnnnnnnnnnnnnnnnnnnnnnnnnnnnnnnnnnnnnnnnnnnnnnnnnnnnnnnnnnnnnnnnnnnnnnnnnnnnnnnnnnnnnnnnnnnnnnnnnnnnnnnnnnnnnnnnnnnnnnnnnnnnnnnnnnnnnnnnnnnnnnnnnnnnnnnnnnnnnnnnnnnnnnnnnnnnnnnnnnnnnnnnnnnnnnnnnnnnnnnnnnnnnnnnnnnnnnnnnnnnnnnnnnnnnnnnnnnnnnnnnnnnnnnnnnnnnnnnnnnnnnnnnnnnnnnnnnnnnnnnnnnnnnnnnnnnnnnnnnnnnnnnnnnnnnnnnnnnnnnnnnnnnnnnnnnnnnnnnnnnnnnnnnnnnnnnnnnnnnnnnnnnnnnnnnnnnnnnnnnnnnnnnnnnnnnnnnnnnnnnnnnnnnnnnnntggttgtcgaggtggtggacggcgacgaggacgacgaggacgctgaggagcgcttcgtgcccctcggacccggccgtgcgcttcccaagggcccctcccgaggcgcggtgaaggtgcgtgcgaggtgccggggatcggtggggggcgcagcgggctcggcggggcgccggggcgccggggaggccgagcgcagcggcgcgggccgggaggggtgtgtcaggcggcggtgggcagcgcgcggaactgcggctcagcggctcagcggctcagcggcgcccggcggcctgtcggtgctcagaggccgggcggatgcgtggtcccgcgtgccggtaggcaaggaaggagcgcttctctgggcagggtggggaacttgggagctggacgaggtcggagccccgatcggcctggcattgatattttattctgctctggggaggcaggagtcttccttctcttgttcaagcttctggaaactagccagcaacctgcaacacctcctttcacctgagaacagttgttggtcggttccatcacaggcacttgtgaaggagttgggagcctgtgcagcaacaacctagaccttggtttccgcgagctttttgcccctcccccatccccgtgtttctcctcgccctccttaaactggacatcctaagcacttaccctccgcccccttaagattacaaaagaggaaggcggggaaggtgtttgtgttgtggggagggagaggggtagcatttaaaatgaatgtgactttcagctgaaaaatttcaccaggtcctcatccgcgctaccgcaacgagcgatctttccgtttttttttttttttttttttttttgtatcttcagaagataaagggtttattattacacaactgtctggccgagcttctaagcacgctattggacaaaacaaactgcgttgaggttcatgcaccgtgtatgttgctaagaagttttgagggcagcgagtggcaagcaatggagagtgtttgctttttcgccagtgttttttttttttttttttttttctgttttctgttttttcgagacagggtttctctgtgtagccctggctgtcctggaactcactttgtagcccaggctggcctcgaactcagcaatccgcctgcctctgcctcctgagtgctgggattaaaggcgcagtgtttcttaagatagcaggataaccagaaattcttggagtgttcagaagaaaatatatgtaaacaagtgaacttgatagaggtggttgatgttgttgtttttgtttaatatctccgtgcccgctctcaagtgtctggaagcttgtaattatatttaccaagaaaagttaaacagcagttagcgttgccccgcagtagatgtgggaatgtttctttcctagaccaccctgaagtatgactggctctctctcggtgtgagacttgagcaaatggtcatttaggtgattgtttttgacagctgcttgttggaatctggactgtgcccacactcattactgctgcctgctgaaaagcccgctttgtgtggcaacaggatatagcgggatttgaattaagttccatagcatcagtgacactgaataagacagagtgccccctgagcagtgttgttcatacacactcaaaatgtgtctggggtgattatacaagttgagacagaaagattaatatgttatgctctgtaatccaagtaggcccagtgtaggaaagaaatctgttctttaaactaggaatatctagggtgtgattgttagcattagcagagatttttcacatctccaaataaattcaaattttttcaaatttctaacacattgctttgctcacaaattttatagtacattgcatacaacttcttagaagttacatgctgaatatactgtggtataatttatcttcttttttttcatcaccttagagatatcctgacactgtatcccaagagattttttttaatggaacataacaaataaatttacatttctatatgtcatgtgttcgacagatacttattgagcacctactttgtgccaggtgctaatctagaacacagtagggcatgactttggaattcttacacataattcactgcgtcacagcagctgacaaatggataaaataagcatgacacaggggccatgatttgtgcatctctcaccggccttcctgagtggagccagtgaccacaccagagttgtttaaagcacagagagtgaagggcaggctttagtggctggttcagcaggtctccctcctttgtcccctcttagcaagaactgaggctcttctgactcaaaatgggaagagtcccccagattatcagtgagcagatatcctttctttaaaaaaatactaaaatcactttgtgtgtgtgtgtgtgtgtgtgtgtgtgtgtgtgtgtgtgagagagagagagagagagagagagagagagcgagcgagctcgagcgcacgctggagccatggaacacttagggaagtcgaagaactttatatagtgcctgttgtacactcacctttctgctttccagagttcaaactcaggttgccatgcttgcatgacaaatgtccccactttctggaacatctcagctggtcctatctatgacctgcaggaaaatacctccaagaattctgtttcttctttcctgccttttcctgtgtttgtctgatgtaggagctgtcacagaaattgtcagggagctggtgtgtgggacatgtgctatgggtgtattgccgtgagagtgtctgagtgtggagggcagccaggtgtggagatggcagccaagtccgtttgagtctgcctgcttcttctgtccactgcatctgtcttacagatgtaaatcaagtggacttggtgcctgaactgatcttgctgaggtgctgggagtaaaggagtgggggatgggaaaaagaaaagacaggaccgcctggcaggcctagggtaacagcaggagggaaatagtgctatttttagattctagaaagaaaagagaaggcttcttgggagggacctttgatcttccagcccaggatcagaatcaggcctgggccagtaaaggaaaccagtaaaggcagcccttaaagatggagtctctgggaggttttcatcaggaaagcctgcctgctccttggtctttttcaaagcccataccgcgggggagaacagaggccagcagcgggagctgagaaagcagaggggactgcagtagacacagttctcaggggtgggagaggtgctcagcaggcaatacagagtggagcgcctcagggtccgagatgctggatgacgcaagggaagggagagagagattcagaggagctactggcacagaggatgacctggtgtgccatttgctgaggttagggagatggccaagttaagggctctgtttgaacacactaggaatgagttgactgggccggcaggcttggggtgtggatcagaaagggggaacttgaaaaccaccagcatgctgaggtcagaggtcatgcagtaccaggctctgaggcacagtgggttctaggagaagctggtggagatagttgaagcagcatcaaatatgtacagattgtaaaggtcagaaaccgagagaagaaataactccagcaattgaggaataatgagcaggacaaggactgcggctgttcatttagtaagagacatccatgtgtgctggacagcaggggacttagtgctggtctttttaacattcattcctattttaagtgtatgggtgctttgcttgcatgcatatgtgtgcatcgtgtgtgcaatgccatggaggccagaaggtgtcagaccccagatgactggtgttacaggtggttgtgagcttctgtggcttctgggaattaaaccaggatttctgaaagagcagccagtgctcttaaccactgagccatctctccacctcactcctattattattgatagaagtttgtgtagttagttaagtggactgaacagtgacgtgaaggtgaggttgttagggtcttccattacagctctttttgctaagttttgttcaagggtctattttgtcttttccagaggagatgaaatgagctttggaatagtaaccagcatatgaggccttttccaaaagaggtcatacctgttagtttagttttctattactctgtaacagattacccctcggagagacagcaaagtcttctatgagttcagagtagggttttagcctggacttttgtctgttgctgagactcacaaagccgagggttagatgggtcaatttctcatctggagtttggccaagaaagagtctctcctaggttcagaatgcgtgggcggaattcagtctccctgcatatggaagacccaggacctcagcttcttgctgactgtatctcatgagtgctccatcactcctggagttcttttttccaggccctacctcctacctcattatgtgggtctcctcagcatggcctcttgctttatcaaacaaacaaggagaatcttggggccaccagttgcgtagggctatcttccatgggcagaaatggactccaatgccttagccatactgtcttggtcagaaacaagattatgtgttccacccagtctgaaaggcagcaattgtacaagggtggacgtgtgtgagggtatgaggatcaccgggtattcctgggtggcctgggaagtacgaaaggaacagagagaagaaggggttgctgcagactgcaggtcccatcgtgactgcagcccgggtggaagagggctgctctttgaactctttccagtgaattggctaaggtagagaagatggagaaagggaagccagctgagggccattttctgtacgtatgatgtcaggtgacatagtgcatgcccaatatcctctcttctcccgtgcagcagaagaccaggcgtggatgatggcagtttgcaagcgagttgaagacctgcccacaggtgtgaagtgattgatgtatgagagagcaggagagccagtgtgctagggagacaaagtggagttgccagaccatagagagcccatctggggtttgtggttctgtgtttatagagcaagaagcctgctcgggtatgtggtttcccggcttcttgctcttgtctccggcacagaatggtattcataaaaggaatcctagttagtacacatggactgattcccatggccagtgcaattgcaaggtgcacacctgttttaacctttccacggcccccatagctaactgtgacatgtatgtcagatgttgcccttagttttatagaagggataaacagttagcttttaggacaaacagatcattcagcggcagaccagggactggagttctggcctgtgtccctgcggagctctgcctgtggggaagcaggattaagcagggttggatttctgtgtggaaaggagagggactggttctagctggtgctgtctggactctggctgccaggagggaccaggagacccagaataataagggcgggagagggtgggggagaagtagtgaaaaagttgtggaggaaagaactataaacaatctataaagccatgacaattggattccaacattgagtgttcactgcattcatttgaaacaggagttctaaatatttcatctgaaggaggactttctgagaatgtaaggcttgaattagtgggggccccatctccatctgtggaggagatcagcttaggcactgtcctaccaggcaagtgaaccggaagcttggggaccccgagtccctagacgggaagtaaagccacaccttcaccagcaatgcaggcagcagcaggacccctacctgcactgcgctgcacgtatacctgacttctgattggaagaaacggactaggtctcgctctctttagcaagtccttggtaattcccctttcgggcttagtttccaggcaaacatgtcctagtatatgtacggacgttctgggcatagggcccagtccagtttgaaccagtcggactacatgtacagcaaggcaaactatatcccccaagttaacttttcggggggatcccctgttttttccaccttataatgattaaaagcagatgcattgtgggaaaggatatacacactaaagaaacacttagtatctcaagcctgttaatcaaagcagaaaatcactacactcctccccttagcaacctagaacccataaacacttagtatctcaagcctgtcattcaaaacagaaaatcactatactcctccccttagcaacctagaacccataaaaggaagcccagacaatacctgctctcttggccactgtgctgaacgagctcctgactcctcgtagtggacttctctgtacattctctggagtaaaacaccctgggagagtgagagggcccagtgcgagaaagcccaaaggccggagtgtgatactcaggatcagggttttaaaaaagaaacaaggtggatgtgacatgcttattacttgacagaaggcaaagactctcctatcagccagtaggccagctagcccggatctcctatcagccaataggccagctagcccagatctcctataggccggctagcccagatctcctataggccagctagcccaggtctcctatcagccagctagcccagatctcctataggccagctagcccagatctcctataggccagctagcccagatctcctataggccagctagcccagatctcctataggccagctagtccagatctcctataggccagctagcccaggtctcctataggccagctagcccaggtctcctataggccagctagtccagatctcctataggccagctagcccaggtctcctataggccagctagcccaggtctcctataggccagctagcccaggtctcctataggccagctagcccaggtctcctataggccagctagcccaggtctcctataggccagctagcccaggtctcctatcggccagctagcccaggtctcctatcggccagctagcccaggtctcctataggccagctagcccaggtctcctataggccagctagcccagatctcctataggccagctagtccaggtctcctataggccagctagcccaggtctcctataggccagctagcccagatctcctataggtcagctagcccagatctcctataggccagctagcccagatctcctataggccagctagcccagatctcctataggccagctagcccagatctcctataggccagctagcccagatctccgataggccagctagcccagatctcctataggccagctagcccagagtacacagcatggcgcagacaagaaacctgccacaacaaagtgaagaggaccaataccccaaagttcatctctgacgtccacagggacgcacagtaacatgtacctatgcgtgtgcacgtgcacacaaacacacacacaccaacaccaccactacacatcataatactttttaaataaatgaagtaagacttcttgctactttactacctatgtgcattttttccagctatttgaatatgatgctaagaacctagatatagcaggtccagtcagaccacagggaacaggtgtgattaaaagcctgggctatagccgggcagtggtggctcacgcctttaatcccagtacgtgggaggcagagacaggcagatttctgagttcaaggccagcctggtctacagagtgagttgccggacagccagggctacccagagaaaccctatctcaaaacaaaacaaaacaaaacaaacagaaaacccaaaaccaaccaaccaaacaaacaaaaaacgaaaacaacccccccccccccaagcctgggctaagggtgcaaagccctgcctgctcctgtgtttgcaaccattctgggccccctgcccagaacgtccgtacatatactaggacatgtttgcctggaaactaagcccgaaaggggaattaccaaggacttgctaaagagagcgagacctagtccgtttcttccaatcagaagtcaggtatacgtgcagcgcagtgcaggtaggggtcctgctgctgcctgcattgctggtgaaggtgtggctttacttcccgtctagggactcggggtcccaagcttccggttcacttggctgttccagttgaaacctcctaatgtgcacctggacactacaaggatattttgtgccggattgttgagaaggcagagaaactggtgctactgtgttgtagtcctctagtgctttagtgcccctcccccagttcagtcctaaattgaaagaagagaaactttgtatgtattacacagtgttttcaatttcccattggtcagatgcccttgcatatatggaaccctagcagtgctcctgagagtctgaaaaactactaagtgacacagtgagcaagtcttcaactagtgttttactaacaagcagtaaaagggcagtgccaaacagagaaggctttactaatatctccatttttagcaaagacagaacagctgggagcttaggtaacaaggcccagggtggtgctttctttttaatgctgtgtagaagtttaaccaagcagaacctagcaacctagaaagattgacaatccactgatttaatacattcaagaggagcctggacacacaagatggctgcaagtccaccaagactttctgtattgaataactggggcgagacccgctttcaaatgaggtaatgtgtaccagcattgctgttctcagtggccgtggtgtgactggctgtggtgtgtggctgtgcgccagctctccaggggtggttagctcatcttgcagcttatctcttgaccttcaggtgatgcaaagggcctttggcagggatcatgtgtcccaccttactgccttctcgttttctagcaactgcatgctttgcaaattgtgttggctcacgcagaaagtgtgtgctaaagatactacacaaagttgtcattcacagacttgtagatggctggggttggaaggacatggagattatctagtaatctaactccctgtcttgtctctggaggatacagatcttgcaagaagaaatagctgtccaactctggcttctgctgcagtccctcgggctgcccagccctgcccattaccctccttctgggattgtttcttatgcccaggaatgaggttcacaccgctctgttggaattgtggctagaaatgtcagttttccaaagtgtatccaaagtatctaacaacatcagactttgaaaaggtccgtcttctgtgctgctgcaggcggggccgcctggttctccattggtatgaaaggaggagttctttgtgaatcctgcccgggcctgtccttgtccccttaggagaatgatgacaaacagaaaatgcactgtgactttgtacagtgtatgcatgggtatgtgggtgcagtgtgtttccggtaagtacttactagccatgaactcaggtctcctctcctttgttaacacttgaccatggttgcagagaatggcccacagctcaagtattaacaaaaaaggggaagcaacacaacccaggatctcctgaacccactcaccttttaatggggagggagtgagacacagccactgcacgtgcctgaacttttacccagctcagtcagatgagcatgcgccctgggctctgaaggtcacgagcagagcaggtctccctgccctgctgctcgtggaacatagaacttcaactctgtatgggacagtcttgacccagtgacgcagtactgtttgcctaatttggatcttcagctgcctcttgcagcctcttcttgagacatggtttctgtctggctttctgaagaatttcacagtacttgaaacctctcacaaccagccttattatggcttagccaaatctggttgtcaatcaggatgattgctgtgcctctgctgttgatggttgtgctcgttctctagttaggagatgcttggtgtacacatggaaagaacagggcatcggccacctttactcccagggcgcctgcagtgcaacacaccgaccagatgacgtgcagggaggcgtgaagccctctgctctttttcttttcttttctttctttttttttttcttctttttctttctaataagatcatgactagttcttccaagccaacttactgagtcacaacttggcatgtaattttgatatataccttaaaacaatggcaaccaaacaatttatgtaaagaaaattatatggtctggccaggaggtaattcctggactgaatttggcaagtagcctcagttgctctttagtgggtaagaaggaacagaatataactttgagtatggggtagtacagttagaatgattcactatttccacttcaccgaaggtaatgttttggaaaaccatgttagaatttgatcgtagaagatgcatttatgtgtgtgtgcgtattcatgtatatgcacatgcatgtgtgttctgtgtatggaggctaatggtcaggttaggtgtattattcattatgaaatcaattaacttttaaaaacgaacttatttattgtgttttttttttaattgtgtatattttgggggagtgcatgtatgtctgtgtaccacatacaggggtcttcgatcccctccaggactggagtgacaagccattatgagctgccttctgggtcctgggaaacaaacccaggttggttctcggcaagagcaacagccagtgctacctagctccaatcccagcactttctttttttgaaactatgtacgttactaaacattgagtcagctaaactgactggctggtgagccctagagatcctgtctctgcctcctcagccccgaggttacacgtatgtactgtcatgtaggtgcagcagacctgagtccatgagtgtgaagaaggggccttctgtgcttgccctgtgaggacttggttccgtgcgctttattgaccaggagacttctgggatgttcctgcttccctatggtcttggacagcactggctccattttaggagactgagtagccagtcaaaattatgcgaatgccagacttgacagcattttaagcttattcacccttccttccttcctccccnnnnnnnnnnnnnnnnnnnntctctctcttctctttctacagattgtatatggtaacattttatctgctaaatcttgcagttagggtaactgcatcagtggcaccttcattgtccttttcttagaccctcaggagcaggcttgaggccatgcagcgcaccctgcactacccccactttgtggtgttgcagcgcaccctgcagtacccccactgtgtggtgttgcagtcttctgtagacagctagtgatgtcacttcctcttctagttgttatggctgagagtctctggacctcactgtctgttctttctctgtaaatctggacacagtgcaggacagactctggcttcaagtcttgcctttgctacatgctggggtgtgaccttgcccagtgacattactgctccgtgcttgagtgctatggttgaacatttggggcaatgttaacgttgttatgggatgtggctcatgagacctccccaaagtgggtgtgaatggaagtgttatttctttcatggtgttgcaaaggatcaatttgcaagctgtttttagagtcccaagtcctgctcctctgtactgtgctcctcaaggtggtgaagctacttacccacctgagcagggtgtggcatctgagcagggtgtggcagtgggcttgactttcccttccagcccagaaagcagccagccatttatctatggatctcttgtctgtctaaatgtatagctcttaaaaaaaaaaagatttatttatttatttatttatttatttatgtatatgagtacactgtagctgtacaggtggttgtgagccactatgtggttgctgggaattgaactcaggactttcactcactcaggccctgcttgctccggtccaaagatttattatgtgtaagttcactgtacctgtcttcagacacaccagaagagggagtcagatctcattacagatgcttgtgagccacaatgtggttgctgggatttgaactcaggacctttggaagagcagtcggtgctcttaaccattgagctatctttccagccccaacgtctaggtcttgtactgcagctacccagcagggtggggatcccctctatcactgtgtgttcttgcagccttctgtagacgtcagcaatgtcactttctcttctagttgtcatggctgagagtctctggactgtgggcttgcccttcctaggtttctgtgttggtgtcttgggcttggtaaaggtaaaattctgtgttcatggagaagacagggaaaattagcctaaagtttactggtcctgtctctttttttctcttttgtgggagctgctcgcagggaagaaaggactatgagtgaatcatttctagaaaatctagtaaaaaacagataatagatttcttttccagttacaaaatacttcaaaaataatagtgaattagaagggcaattgaaaactgatatgtaaacaccaatgtgcctataaaggagaaactgaacatgtacagggcccttttcagtttctgaggtacatacaaggtgggtcatttttatattacacattttctttagactgcttgctccttccattcccagagcacttttcctttgaatgggttttgggaaataactgatttataatttcccttttcaattggaaagccagaagtaagtgcttattggctttagataaagagctaaacacctgggccagggagatggttcagcaggtaaaaagggatgctgtgttaagtctgatgctcagagtccaactcccagagcccacgttaaaaacaaaagtcagtgtgttggtgcgcatctgtgatccagctctctatgacaaggtaagaggtagacacagaaaaatcactcggaagcttatggagcagctaacctggggtacacacagtgcagtggcagacgcaagagagaccctgctgtaaaacaaaccggaaggggagaatgacttccagaaattgttctctgacctccacacatttgccatggtgtatgcctcgtcacgcagcactcatgctttatgatacactaaacttaaagtttcttgctgtgagacgagctctcactatagaaacctggcagtcctggaactcactgtgtagaccacacttggctttcaactcacagacatctgactgcctctacctccccagggctgagattaaagacaatgtaccaccacaccctgcaattgtgtgtgtgtgtgtgtgtgtgtgtgtgtgtgtgtataccacatgaatgagggtacctgcaaaggccacaaaaggatgtcagatcccctgaaactggagtcaccagtatttgtaagtatcctgacctgggttttggaaactgaactcaagtcctctgcaagagcagtgcgtgcttctaactaatgaattctttctctggtccgttttaaaaagaggatgaaaactattatcatcatcattatttagaggcaaggtctcggtctcatatatagccctagctagctagaaactcatagagatccgcctgcctgtgcctcctgaatggtgggatttaaggtatgtactcctgcaacctgcttaaactgtgttattaggaaaataaattgtgatcaggcatggtggcacatctgtatacctacctacccaggaagactgggggaggaggctcccgtgagccttggcaaatatattaagatccccctcacacatacttaacaagcacaaagaaatcatttgttcttagtgggcctgacagctgattcagtagagagtttctgtcttagtcagggtttctattcctgcacaaacatgaccaagaagcaaattggggaggaaagggtttattcagcttacacttccatcaccaaagaagtcaggactggaattcaagcaggtcagggagcaggagctgatgcagaggccatggagggatgttccttactggcttgcttcccctggcttgctcagcctgctctcttatagaacccaagactaccagcccagagatggtcccacccacaaggggcctttcccccttgatcactaattgagaaaatgccttacagctggatctcatggaggcatttccccaactgaagctcctttctctgtgataactccagctgtgtcaagttgacacaaaactagccagtacagtttctaagggaatttcttcatctggtactttttgacttttataactataacctccatcctcataactttcttggccagatgggttcaaagatggatctaggatttgagacagggaggtttgaaaagtacagttgtaaggggatctaaaatatggagagcaaaaccacagccatttatatctagcaaggtataattattagtttgtgttcatatcaccaaagaaaatgattgaaattccagggcagcataaatgaagggacttctgctcactgagatgccgattgacgccactctgtcagcactgagcgctgagcaccctgggtacagactcctttccgctctctgatactcaatagttacagctcctcgtggctagcctcagttgacccttttgataaatgcagagcttgataacatttttcttgttttatgaatgtggaaaacaagagaaatggcagcttctgtggaaagaaatacatatgaggtaacttcatatcaaatgacacagatatttgtcaaacatttcagaaaacagttgggaccaacagatttaaaaaataattggaatcggtacctaagcaacaatggaaatttaaggagagaggagactgttttggatcgacttacagattaaaacaatgtgagctgccttgttcgtaagttgtcagacgtcatgtagcaggtgctgtgcaaggcagctccgagtcacttcctgaacactcagttgcccgtgctctattaatttgggtcgagatccaaagtgtaattaagaacatgttcttcaaatgcatgttttggataggtttttcaattagtagattaatgttcttccaactcagagaaaatctaacaaaatattagaaaactaataaaaaatgtgaatgacagtcttaaaacttaaaagacagtgtggattgtgtctattagaaaagaaagcagtcttgttttccatatagtgcgtgtccctgtcaggggcacaggggcagctatgttggtaggtgcttgctatgcaggtgtgatgactatccatccgcagagctgctggtgcttatgtgggaatcagagacaggcggatccgaggctggcgctcagctgcctttgcctgacctgtgagtaccaggtcctggtaaagagaccccactgtgccaaaagtgaggggctggagaagtgaggtggttgctcactgaatgagagcacctgcagttctgctagaaaacccaagtgcaatccagccttccacatggtttttttttttttttaaaacaggacttagatttaaaactgtgtttgcaggttcctgaggaggcctgaagagggcaccagattcacctagagttgtccagtataggtgctgtcaactgaatttgagtcctctgcagtagaagcaagtcttctacttctgagccatctctcccgcacaaagatgacttctgttttaattacatggacacatacatggctatgtaactcactttcgtgctggtgcctatgaaggggacagtgggtcctctggagtgggaataccggggacctaagagaactgtgggtcctctggagtgggagtaccagggacttaagagaacagtgggtcctctggagtgggagtaccagggacttaagagaacagtgggtcctctggagtgggagtaccggggacctaagagaactgtgggtcctctggagtgggagtaccggggacttaagtcctgtaaagcagcagtgcttcttgttgttttgagacatctgccctggcactcccagagatccacctgtctctgcctcccatgtgctggtattaaaggcatcgcatcaccttgcctggcctagcagtaagcactttaactgctgagctgttcgtccagcccttacattttttgagatgaagtggctcactgggaactgggacctgcaggttaggttaggcaagctggccttgagtccttggatcctcctgtcttcccagcattgggattgatgaatgccaccttgactcactgtttacgtgggtgctagggatagatcaaactcaggttcttaaactcaatagtcagacctgcaccaactgagccatgtcctcagccctcagctgtcatgaggatatagtcctggcctcttaatccgaggttgcagctctgaagtgtgtcactcactgcgcagaaaccagtacccatctgcagtcacacgcagggttccctgtagccaccatctagtgattccttttgttttcagtgccactaagtctttatttgttcattgtgatttcttccggagaaagatggagcgaggaggagagttagggtgttagaaagctttagggaccaaggggaaagaagcctgggtaacaaagcaaaccgttcagtaagtgtgctcaagagttacgttcaccgtgactcaagggggtgagtgttgaggacctgagagaagggtccccatttttcttctcaactcaactcttccttgtaaattccagaccaagttttggtgttgagtggtaactgtagaggtgacttacatcaaagctgcattgctttctgatattactgtctagctttaggctggcctcaaaccctcactgcctgccttagtcaccagagtgctgggatggcttgtaagcaccatgatgcctgcctggcttgttggataatcttgtggccatggggatatgaatttcttctgtgtggatcaggtttccatgtggacgaccgatccattcactcttcattttccatcctggaggatttggggtaatgagatctaacggactaatgccatggagacagtcaagaattgactttccccagagggcaatggattgggaacaagagaagagaattctaacttcctgtcgggttttacagaagaactttgggctgtagatatatatgcaggagttacatatatatgcgtaccttgttgctgttttggctaaaggagaggcaggagctttgtgaggggtggggacagtccttccctggtgaagagtgcaccagccttatttcaggtgctttgccatacataggatttcctgacaaaattggtttttttttgttttgtttttttttttaaattggggctggagaaaaggcgcagtggctgaggagcactggagggagcactggctgctctggcagaggagcctcagcgtccacgaagtggctcacaactgtctgtagctctgactcgggggagctagtgcatagttacatgtgggcaaaacattcctatacacaataaaaataaacacatcttttaaaatgctctttagttcactgcaagaagaggtttgtaaaaccaaagcaaacgccctaaaacatgaaaaagagcactgtcactatggtacactgacaccaacttgactgcatagtggtcaccacatccctttgtgatgtaaaaggctcagtttaggcaaatcacaaaactacagtacaaaaggcaaagtctggggaggactgaggcaaggtctgggaggactgaacaatgggattagtacgcagccgtgagtgcatttggtaaatgcttgtcctatttcagcatttggatgtggtcaacaaggcatgtgtgcactgatcaaacatagtcacctctttactagccacccagaaaggggccctggcatcccaagaaaattgtcatttacactttaagccacatgaaacttaaaattaggttttgcttgcaaaaagaaagtcctaagcagcatgggcataaggaaattccattctgagccgggcgtggtggtgcacgcctttaattccagcatcccagcacttgggaggcagaggcaggaggatttctgaattccaggccagcctggtctacagagtgagttctaggacagccagggctatacagagaaaccctgtctcgaaacacccccctccccccgcaaaaaagaaaatttcattcttagacacttgctttacccatggttccttgagatttttatatgaacaagtttatatgcatgtatgtgcatatgctagacttagtgtgacagtgtcccacaattgaactgtttagtaaggaatccttaccatcatcttttaaaaacattgattgattgattggtgagtgtaggctattgaaaggcttgcaagtaaaggtcagaggacagcctccaagagccaagaggataaaaacactaaagatagcagtgagtaaaatcaagctgtgtaaaacattgcgctattttatgactggcttcttttttttctcctttaggagtgtaaagttagttaaatatttaaaagtcagtcagtgaaatttacaatattagcagattgaaagggagtataagcattcatccatgctatacaaaatacttggcaaatggtagaagttctctaagctgaaacatgtattagaaacctgtagctgccataatacatgtgacaaaacaccattcagtaaatgtcaagagtaacttaaagatgtcttatgtaacccattcagctaacattgtcatggaggtcttgagccatcgtgattgataagaaggaagaaaagaaaaagcatgaagattggagaagatgaaaactttgtttgcttgtggtatatgcacagaaaatcctaaggaagtagcagaaactgttaaaatgagatttaaaaaaaaagctacactgacaattgatactaacaacttcttaaaaaaaaaaacaacctatggaaacccaccacggtagaagcttcttaaaatacacacgtatagaaagtttaagtggagttctactgtaacagtgccaggaatgggttccctctttttgaatgttaccatggttcctggataccctccagaattgacagtaagcatctattagtgaagacagagcacacttcgtcataaatatggagacatcgagcaggtcctgacctgggaggctcttccctgctgcctagctctcactgtgtttgatgtgcatattaccctggaggacaaatgttatcaggctcaggctcacccaaccatgaaccctaaaagctacactgatgactgacctggccggacacatccacaggtgcaatatggcatgaccattgtgggcagtaactaaccactttattactggaggtacagccaacaccacagatggaacttatacctggcactgctagagaccaagaactagttagagcatggctagatacagcacaggccctgagggagtgcaggagtgttttgctaaatgtacaaagtattaaaataactcctgatgacttaactgctatacccaaagatgagtacatttttcagtgctcatcaaggctgctttatgcaatagatagcagataacacagaggcctgacactggtcagcgtgcagagaactcacacccttctcctcaagtcttagggatatttagaggagggaaaagagattgtaagagtaacagtgctgggtgacacaccaggaaacagtgctttggatagacagcagatgtatgtacaaacccacagtgattgacagcaatacacacaacctgggtaagctcaagccaaataaagtccagcaaacagcggctgggcctctgtcccacccctagctgaggaactcttggcatttggttgcctctgggagagggagggtctttctttaatggcataatccttcgcatgtcaaccgcatttcaccactccaggccctactcctgagagtaattggatgatacaaactagacctgacctgggttggggaagaaaagagtaaacgtcaggtcgggtgggtaaggatggcgggggaggagctgagggtgaatatgataaaaatgtatgatagccacaaaaattcataaaacgtttagaaaatttacactcatgaatttaataaagtcctttaaaatgttttatattgctggaccttctttacccactaggtgcctaagtaatgacacggagacattttattaattatgaaagcttggtcttagctggtttgttccctactagtttgtataatctaaattatactcatttacgttcagctgtgtgtcccctttccatgtctcatgccatgcctttatagattttcccgttgatatctttcaggataactttttcccttcgttgtgtgtgcagtcatgtctgacacctatgacacctttcctggtgactcccaggccatcccctcatgctgttgacactgactggttcctgcccagcagatgtccttgcatagagaggatcctcacagaggtgggaggggcagcgtgtcctcgtgcattgattgccatttattaccaagtcctgcttttctccagtgctttccttccttagcatttattcttaattccagcggtttcctcggtgcctccctccccacagtcctctccttatttaaggctgttctgcagcactgctaaaatcatctgggctttatgtaactttttcttattatagaagcagtatttgtagcacactccaaggtcctggtaagagtaaaggagctaagaataataataagggatttcgctcctcttccagtcctgctctgtcttccggagcagtgacttcacagggagatcacttctttgctagccactactctgtgactcatcttatagcaaagaaggcgagctaacagtagtgcttgagcaaccaaaacagaagtcaaagcctggcacttgcctaattcaaatcagggtgcttttgtttgttgctacgttatgcaaaactataaaaatctataaaaaagtgcacactatacagttgtactcgtatttcttggcttgtaggaatttgtatttatttctgttgctgtgatgaagtgatctgacaaagaacataaagggggaaagggcttttggtttacagttctataaggatggagtgcatcatggttgaaaagacatgccagcaaggtagggaggcatggtggcaggagttggtcaggttgcgtctgcattcctcgagtacagagaccagtagtcaggcctggctgtacttcagagcccaaccactctcacctcttctagcaaggctccacctcccagaaattcatggtttttccaaacatcacctccatgtgtggaccaagcattcagacgcatgagcctacagacaatagttcatattcaaaccacatagtagatctcagcctattagaaacaccagtgcattctcctggtctcttactgggaactcacttctagcatataatgtatgctttttggcccataacacatgcaaagttggacattttcagggaggaaactagagttctttacttaggatcagcatcctaagagtaacaagcatgaaatgggtgttgatggaaactgtgcaacacacacacacacacacacacacacacacaggtccattttatgtagcttgctacttcgagggttggagtgagacaggtctcatgtagccatgttggccctaaacttgctgtgtggcaagactgacttgaacctcatcctttgtctcctgagtgctgggatgagaggaggttatgtgctatgctaccatatctggctatggcattattaaagacttatttctatttttatttacttgagcatcattgacatggtcttctaacagcagccttaaatgtacgctgggcatataatctggagtactcttttcaggggatagatgctgctggtgatgggccctgctttccattctcaatgttgctgtctctgtacgatttctgtcagtgactctgcaaagttaagtctcactgctgtgtggctgctgacacgtaagatcctgaatgagctcagctgtccttaggtgtttctcttgaaagggaagaggggtctgttttagggtgactatgggggaggaggaactggtctagcttttgttgttggcctacaagcatgagtcacagctgccatctttgtgaactcttatgaaatgtgtgcatgttgtgcaaatgctctgccatcagattagactccgctccttttaattctgtattttgaaacaggacctcactaggtttcctgcgttggcattgagcttgtcttcctttaccacggcctcctgagctgtggggttataggtgtgcaccgccgtgcctggctacgtgtaacattcccctcgggcagcatagcttctttgacttctgaggctcatttgtttattactatgatatgggtatgtcgcagtctgtgccaccatcccataaaggacatctggagtgcttcctgtttgatcttataaagaactgccctgggcattcatgttctgtgtgaatttaagttttcatttctgtcaagcaatatccatgactgattgttaggctttatggtaagtgtaagtgatgtggtggtttgaatgtagttggcccagggagtggcactgttaggaggtgtggccttgttggaataggcttagccttcttggaggaagtgtgtcattgtgggggtgggcagtgagatttcctcctcaccatgtgggagccagttctctcctagcagccttcagatgaagatgtagaactcttagctcctcttgcaccatgcctgcctcaacattgccatgctccggcctcgatgataaaggactgaacctctgaacctgtaagccagccccaattaagtgttgaccttttaagagttgctttggtcatggtgtctgctcacagcagtaaaactctgactaagacagcaggtttacattttgtaagaaattgccacagttggtaacatggtagctatacatttcatcttcataccagctgtgtgtcttgggttaatttttataaaacgtgtgagggttatgttcctgtctgttgatgattagtaagcagtgccacttggtgaactgatgttttactatcgatgaatccccttcctacctttgacagagctcagttggctattgctgtgtggctttgttctggatcttcttccattgaccgattcggcccaggctttggtatgctcgctttgtagtaaacctcctgtagggtggagtgactctgatagctttattgtctcagttattttgctcttatacctctccatatacattttagaataagctattaaagtgctacagaaatccttttattgctttgttctcggagacagggtttctctgtgtagccctgagtgtcctggagctctctctctgtacaacaggctggcctcagactcacagagatccacctgctatatttttaatcaacctatttttcaatttttttattagatattttcttcatttatatttcaaatgctatcccgaaagtcccctataccctctccctgccctgctcccctacccacccactcccacttcttggccctggcgttcccctgtactggggcatataaagtttgcaagaccaaggggcctctcttcccagtgatggccaactaggtcatcttctgctacatatgcagttagagacactagctctggggtgggggtactggttagttcatattgttgtttcacctatagggttgcagaccccttcagctccttgggtactttctctagctcctccattgggggccctgtgtttcatccaatagctgactgtgagcatccacttctgtatttgccagacactggcatagcctcacaagagacagctatatcagggtcctttcagcaaaatcttgctgacatatgcaatagtgtctgtgtttggtgactgattatgggatggatccccaggtggggcagtctctgcatggtccatagctccaaactttgtctctgtaactccttccatgggtattttgatctctattctcaacctatatttttaatacctgctcaagaactgaataaccactccaggaaactgcctgggagatgcaatgcaaatcagctgctgcagatggtggaggggctggggatgcagctcagctgacagaatgcttccctgacacaagacctcagggccgatttctccccacaccagttggacatggcggccacacctatcaccccagcacttcaggtagaggcaggagaatcacaattgatcatccccgacttcttaagacaattggagagcagtgactagcctgtgtagaaattcttcttaaaacaaaataaacccagagccactggaagcaagcatctggagtcagtggtatttgagtggtcagtatggcctggactacctggacagagatgcagatagttgcaaaaggagaaggctcacatggccccacgtggccgatgagcaacagtccctggaaagaaacaaggtattgtgctcaggtgtgtggctcggcatgaatgaagttctggctttgacacactatatccgtaactacatggtccatcattcaaaaacttgaacaatatacgtggcactcagtaatatcatgactaagaagtattttatttagtaagtcttgtttgaaacttataaagttcaatagtgatatagcagatatttggggcataccgcttcttgtagcatttgtactggccagtgccgcatgctttcctgactcctggaggttagtgaacacagttgcttagagcacccaatttcaccatgctttaatgtcattctgagccattcgcacctgaataaactactccacagaacttcgattctgtttttcctttgctttcttggtttctaagtttttccttttggaattttaacattcctagcaagtctttcttcatggttctgtggattgctagctccactttacttatgctgggttcttcatgagttctgcagcgcttccagagccttggtggtaactgtgtgtggtattcctacccttagagggggatgcactgtgcctgccctcctctttatgggctccaagccaggcaaatagagggagaggggagaggagagcagagagcaggccagagcatcacccctcagctggatgctggagctccctaagctgctgagacttagcagcaaggtcagcttctgccctgagaaaatccaagtgtgaacacaggaagtggtctgcatagagctggccttagcagagccccaccaatcacccagtgcattcatgaaccactatagaggcagagtctgtccaggagtggagtgagggaatgtggcctagattctgcagcctttggaatacctgtttctctgtgtcttagtgatggttctataggaaaggctaacagttgtagaagggaacagaaataataaaagcagaatagaataggtcctctataatgtgctcagggcttttcatagtaaacataccaaaccctgaagacttgtgtgtggtgtgtgtgtggtgtagtatatgtgcatttgtatgtatgctctcatcacatgtactcacagggcatcctgctaaatcacgtcttaccttgacacaggcctcactgaatctggaggaaggttgctggccagtgagcctgcagggtcctcctgccttgggtctcccaccactggggttgcaagttgtcttagttggggttactgttgctgtaacaccatgtaacatgtaacaccatgaccaaaagtagctttggggaagaaagctcactcacaattccatgtaacagcttattattaaaagcagagagagaaggaactgaagcagggcaggagcctgtagacagaagctgaggccatggagggggctgcttactggcttgcttcccatggcttgctcagtctgctttatctcaagcccaccagcccagggatggtcccacccacaatgggctgggccctaattaatctctaattttaaaaagtgccctaccagctcttctacagtacagggtttggaggcattttcctaatcgagactccctcctctccagtgacctcagcttcaagttggcacaaagctattcagcacacaggtgcaagcccagtcctatcgggctttttgtatgggcactacaggtttgaaaccagtctttctgcttgtttataaagcaccgtgctcttagccgtcatctcagctgttttacactttccagttttattccaattgattgtctgcgtgtgcacatttaatagcagattgtgtatgtatacatgcacatacttgtgtacatgtgtgtatgcttgtgtatggaggccagaagtcaacctctgatgtcattcctgcccactttgttgttgtaacaagcacacctggctttttacatgtatgcttgggatggagatcaagtcttcatgcctgtgtggcaagtacgtcactgaccaagctgaatcgccagctctccatagcaaacctttaaaacgtaaaatctccaaaatgagatataatggctaattttatttgaaaaacgtgttggctcttgccttagggttttcaataacggttgtatcctgatacaacagtaaattcattactatctctgctggaaagggctatgggtaaatatttataacgctgacaagtttgtatgttgaaatgggggggtggggagtaggacttttaaccaacacagaggggagtctggcagggggagaggagagaaagggcgaagaagagagagagagggagaaagggtgagcaaaaacaatttctctgagattgaaacattctatcctatagggaagctccttcagcaggtagataaagaactccaaatagtttcaggaagttcctgaaactgaccattttcactagacccttcctgccagagtgagcaatcaaagctgagtccttctcataaaagccaagctgcacagaagactccgggaagccagctgagcttcctgcaggaggttagaccagacttatttgggaaggacagttcagtgtgttgagctgcttgcaggctgtgtggtgtgctccaggttcccagcattgagagctggagtgggctttcagtgagcagctgtctgtgagttactgctgctcctgtatgtaaccccagtaacgctcattgattcacctagggctttggtggtatgcatacttggtctgtcacgggctgcctatctggaatgggtagatgtgtggtgttgtatctccccaggaaaagttttgttacactgttacacaacaacaaccattatactctattgccgacaatacccactgaaaatacttattgaatggataacttttcaagtgaacacttttttcaaaggcttataaaaaaatctttattcttattatctctcggaaaaggaaactggtgtgtgtgtgggttggaataaatattcaagctttagaacttttaccttctttgaaatcttctttataatttcattgatggagaatccattgaaaatgatctttaaataagaaaattgagggcctggagagatggctcaccaggtaagagcactgactgctcttccaaaggtcctgagttcaaatcccagcaaccacatggtggctcacaaccttctgtagtgagatatgaccccctcttctggggtgtacacagctacagtgcacttagatatagtaataaataaaatctttttaaaaacaaaagaaaattgagagttgttttaggtgtgaatgaatgtattactgggaagtcatgtgttgcacaaagacgcagaaggtgtttatgcagagtctgtcacttgtctgttgacctggaagaatggacatgcttccggctgtaaataacttagttgcctttgaagccagacagtaaagtgtagcgtatgcatagtttacttcttctagtagaatatctttcagacagctaatgcatttgtaaaaggcttcaacttgttttaaaccagtttcatggcctttaacataaataaacacattaatcatttgctctgtagaggatatgtgatacatattaggcaggcagccaagtgtcattgaaatgcttgcactatcaagagtcctgtgtttctgcttttgagtagagtgctgctgtagaaagtctgtacagttacccaagaactcccatttccagcaacttcggaaggaaccggagccctcctggactcttagtgctttctgcgctacttagagattgccacagatggatcgcgtgcagtgaaatgaaatgtatttcttttatctctgagaagcacatgtctgagggacacatgtggcgagagcctcttgctgtgtcatagtgtgggtggcagtgacaaaaccaaccagttccagagagaggggctttcctcacccacaatccggtcattcactacacagtaccgtcacagggaccatcaagttagaggaacattcaaccatagcctgatgctatgtttttaaaaactacatgtcgagtcacatgataggtcaaacatacgagcagtacctgggaaatcaactctgcattgtctgtggatgcacgggggaaggtgtatttctgaggctctggcatccaaaggtctttgtttttttgtttttttgttttttgtttttgttttgttttgtttttcaagacagggtttctctgtatagccctggctgtcctggaactcactttgtagaccaggctggccagaatccacgcccggcaggtctttggttcttgagttgagatgaaagcaggacttcacccgtgcaaacggaaacactgctttcgagctggttgtttgtcctctctggagaacaccgacatgtgggcccagggatttgatggtggtgataaacataggggcaggggaacaagctttctcctggttctgctcagatccgttcccactgtagagcctggttcctgagtgtagctagaactcgggcagtcgctagaactcgggcagtcgggggatgaatggtggccgagacccctgtggcctctgttgggtttcctctaggcaaaagcgtttatgacagtgaggtgagttcttttctctcatctgtgtgagttctcattcatcttcctctctctcccctacaagccaaatgctactcttctttcgttttgttttggttttgtttgttttattttgtttttttttttgtttgtttgttttgttttttgttttttgttttttttttccagacaggatctcactctgtagctttggcttttattactgtttctgcccagtcagggctcattcccaggttctcggaggccttacctaccgttagctactactgatggtgtacactgtgtatgtcttctaagctgagcccttgctctgtgtgagattcttgtgacctttgagcctgtgtgaaattgtaccctcccttcttcactagtcctcattgtcacagagtcattcttggtaatttattgagtgttcctgcttactgagtgccattccgtcctttagcttatttaccatgcctgtggagtccagagataataaaacaacagaggaacccttccaggtccagccaggatttgactccagcccttatatgcagcaaatagactcctttccctgagatatttattgcttagccaggctgctgggttaatggtataataccaccactgaagtttctggagtcatcctagaccatggggtatatagttctccttaggctctttccattaccttacattcttatcaggggtctcatgccacaacttaaattgtgtgtttaagagttttagtacttataaccaagaacaatagttttgagcaacaatattcacttcagtatctaaaaagtcctttttctttgattgtctcagtagcatttggcttgttgggattgaagtgggtggattagccaggggctctagcaacaggtggagtaggagagtctgatggcaacagacgtgagccatcgggagaggtgggaaagtgcacagacgaaaatcagtccagatcagatacagccgcttggtcactcagcactgctcttggttgcctcttctgtagtacattccctcattgctgtggctagaatttcctagcataccttgcagctagaattgtttggtaacttaggttctcccaaggtggtgtacttcatgaagcctgggacaggatgcacagggaaggcagtgaaggcttagtggtgtgcagaggaaatctgcttctgtccctgtctaagtcttagcttttggttcctgttgtcatgggaactgagtggcaggaggtttagatttgtggtgggtccagactttgctcctggttggtgcagttctgttgagcacccatgacacgctctctcagtttctagtaggagctagctgccagggctctttatggttaaactggagaggtgattgtgttgtctgcaaacaggaattggaacgggcattgctattacagagccaaggaaatgacgcttcatggaagctaactgtgtttaatactgacgagaacagagactgaggtgtttactattaagctattaataatgaaagtattactataagtgactcatgactctagcaaaaatacacttggtggtgtgttattttgctttggaagaagcaggaattgaagtatttcaaagaggaaatagtggagaaaagacagcttgagatgacgactctgaatagcttgatcatgacggggactggggggccagtacctgatcagaaccaagtcaaagaagtcttaataaactgtgggcacatgtttgtttgcttgccgatgagaagagtccaaaaggcagaccctaaagagagcacaaggtgacagatctgaaacccgagcttctgtcaccaagctgccttgtaccttgaaggtctccttagtggtggcatttgtggagaatgcacctcttaggaattctgggactgctgttaatgatgtgtggaagcaaactttaatgcagtgtctttgacttaaagacttcgtcacagtagccagacaactgtcctaccctccgagttcttcagggcactgtaaatgtaggcttgtaatcactcttaacctgcttttaacaggtctttctttttagccccgttgttatagtactgtaatttagtgacattaagccaatgtttccaaactagtgtgtgctagataaaaatagatgataagcctcggatgtagctctgaggaaaacttattctcttgtcaccaagtttttaggacactgagggaagaaagggaaaaataaatacatctttatctcggctttcttatggtaccagtcagattacagacagtggagcagagctgtagagagctgtgtgttggtttgtattcgttcatttacacctccatgcacacacatatggacacacacatttgcatatttactatggtttagcacctcaaggtccacaggaggaggagggcaaaacctcgcttgcatttttctcttttctttcctttggcccagttagggattgcagcaggctctcctgagttagggatcgcagcatactctcctttatgcccagcctctggcctaccacagagctctgcttttgtcctgaggcctgtgtccacccagtcagcccagaggaggtgggctgttcaggttttaggtctttctcttcatgaagtctgtgttaacaagatgtttcctgctcagtttcctatccgttctgttctactcggtcagacccatccatatcagagcattatacccatcatgatcagacatacaaatttattctaatgtgtattgttcaattctctgagtactctagctgcattgattaacaggttttatttagtcatctgtgcagtgagtaaagcactcaacgaactgggaattaagcacactctaagctgaaatgtgaattcattaattttcaatttgttttaaatttcatttgctgtttactgcccaaagagatgataagttttatttaaaatgaagtgtgtattgaaagaggaaactttagaaacccacattctcttttacttaattttgcttctaatgtggttttaaactggtttaaacaggttttaaactggtatgtgacgggctgagacttatggatgtatctgagtctatttctagttctgtgtgggaatggagatcgaagccagagtacatgggtactagggaaattactactgaacagggtggcctgttctcttaattttgattgattgattgattgattgggataggggctcactgtgtaggctgacaggtatggaatactctgtagaccggatgggaccaaactggctgggatcaggcagcctctacattttgagtgctaaggtcagagatgtgacatctagatactcgggcctctttaaaaataaaacaagcagacaaacaaaaaacttattttgagaaatggtcttctgaagttactcaggaaggtcttgaacatccagttttcctttctaagcctgggatttacggacctgtgccaccaggcccatcttattaccaattaggcaacctcctccaaatcgacacagctgtcaggtcacctggagtcacctgggaagaggaaacctcagttaaattattgccaaggtcatattgacctgtggccatctctgtcaggaattttcttagttgctaattaatacaggagggtgtgttctattgtgggcagtgccttccttaagcaggcaggctgggctgtgtaagagaggtacctgggcgatccagtaaaaagtgtttctccattgtgtggcgtctttcagttcctgtcctgggctcctgccttggtttccctccatgatggatgatgacctaaatgtgtgagccgagcaaaccctttcttcccttccttgctttggtcctggtgttcctcaccagcagaaagcaagctaggacgccttcgtccttcaaagcccctcctgccgcctccttttcctgacactctgttttgctggggagttttggtctgtcttccatttgtatgtaattaagattggagtctggatctctcctttcccttggagctgtttgtaaccagaaaaactttactgtgttcttagcaagcctgaggccccaggtgagggcttggtttgaccttttatttatatgaatcagaagtagatttgtcccaggtgaggtggtgcatttaatcccagcacttgggagccagagacaaggggatctctctgagtttgaggccagcctggtctacagagctagttcaaggacagccacaactacacagagaaaccttgactcatgtggtgccccccaccccccaaaaaagcaaaaaataaaaataaaacccaaacaaaacaaaagaagtagtatatttgtcagcgtgtagtctaaccgctgctctgaaatgtgcgttttggttaggaaaagctcatgtctaaaggtgagtcttgttctatgctcagctgcaagtgcttttggcttttgaaactggctcctccctcagttctcacacattttctctctgtctgtattcatggccaggattgaactgaccccacagaggagttcagagactggcagccagtgagtagaaagtaccctggggagacagtgattctcccaggggctgtgtaagcttgtggtccacagatagttctgcaggctctgagagaagaaatgactgggtcccagctccttagaaatggcctgtctgccagcaaagctctatatagtctgtggacagttctttgtagactagctgcccctcagtaaaacagtggcctctctttcttcagaaagacatctacacaaaatctaaaccttcaggtagggcataaagtagccctatcttacaaatataaacatacaggtggctttcattatcattaactttattgattgcaaatgttggaacacatttggggaatggatgggtccgatttactgttaaccccagacaggtgggcagaagaggcggggatcagacctgtgacccagctggtccttgtgcatctgagcatcgcacactggacggtgggatcattacctccagggctttgaagtttttattatcttaactgtgactcgttctgaaattctgccttaataattccctaaaggtttgttctggactaacctgctgggacttgtggaaagaaggttgagaatactgtagtttaacaaccaaaaacctgtactttatatagctcttattttaaaaaagggctgcagccccaaagatgagccctccataaaatgaagctacagaagatggtggccatctgactctcatgtgatgcacagagcgcactctttcacactaggcagcctcggatgttgctttgagatggaagagttctgggaccttacacttgtcagctgcatgaactcggaatctgcctgttgtggccttttataggtgggcttctgtgtgacactgcagtcacccggaaccctgtgtgcttatcccgtagcaacgatggccctgcttcagacattcttctagttctaggatagcatccgcccctaaagctaagtatacctactgtcctccgcacagagctagtgttctgacagcagcagctcagaccccaggctgctacctgtgaaaccacgatagtccacaggacagagcggaattgggtatgtaactgagaacggaggattgcaattttaaacaggcatcagggctgatatcccctggggagatgtaaggacagaggaccaggaagcagcctgccgtaagttccaagtccacgcagttctgtggctttgtggtcaggctggtggcgatggcacagtctgttggccaacttaccattactgtaacagagcgcctcaagagagtcaggctcctttctttaaaacagctctcttgctgtgttatccagctttgcctagaactcgagttttcctgccatagcctccaggctgcgagctttccgggctgagggaggagatttgcttccagctgtggtgatatcatcagtccatcctcttgtttgaaacactgtggcatgtatggcagaggagccttttcatatcaggcaggaatgggcaagaggcagcaggaaacagacccagggaccagtttgaccatcagaggcttgcctccagtgaaggcctttcatgacaccccatctccgcagcgccttttaggtatgggcctttgtgtgaccgtatagctcctaactacagcagcggtgggggtggggagatggaaggttggataagttagtttcacaggactgaaactgggataggcgtggagggagggaggtggtagcagcgagtgctctgagcaaggagaacggtgacaggggacagcatgtgtaaccaggcaggacactggctgcaggactgagtgctgactgcggcagtgatgggaggtaactacattctagacctgttctgaaggccaagtgcataaggctaccacacgagtgcctgtggctggtccatttaaacagcacgttaaggcaagcagaacatctgtttaatgtggcaaagtcaaatttgtgcattctagagtcaaacagggttggcctctaagaccaatttctcctttgtccttacagttgcctgggaaagtgaaacagatcaaggtggctgagcttgaatggactttactgaattaattcattctttctttctttctttctttctttctttctttcttcctttcttcctttcttcctttcttcctttcttcctttcttcctttcttccttcaaggcttttctaaaaggaacttaaaaaaaaaaaaacccaaaaaaccaagttgtgtgttttcacttacataatgttaatagaaggcctgaaacttagccaagaattctgcactagaaagcggtgtgatagcttcccgtcctaagtatgttgctgactaatctctgagagagcaagccaagtcatgctttgctgggtagtaaactgtcgggatagtaaagtgagcccacgtgataggaaactgggaacttgcaacactaattaaggagagagtggagtatatgactccagaccagaccaggcttccggccccacccctcaatttgatttctaaccctgtggacgctggaccaaaccagactggttgtcataagtcagttatgctgtctccatgtgcagcacacaacagaattcagagggccaaacaattacttgaagtaagagctagtttggaagcagttggttttaaagtggtttttctgcagatattcattagaactgggtagatttgcaatctgacttatttttctgtgtatgcagcataaaattaaaagaatttaaagtaagagaatagaggactgttaactatttttagaagtagcttttatccattctttcaagactgataacttgagctgggaagatggcttagcggttaaaagcactgactgcatttctgaaggtcctgagttcaaatcccagcaaccacatggtggctcacaaccaccgataatgagagatctgacaccctgccctcctcttctggtgcatctgaagtcagctacagtgtacttacatataataaataaatcttaaaaaaaaagactgataagtcttagagtcttatgtgttttcctccccctccctctccgctcccccccccccctcgtgtgtatgagtgtttttgcttgaatgttgtatgatgaatgtctggagcctgtgaagaacagaaggaggaagtggagttaaagacagttgttaacttctatgctggcatggggctccaagcctgggtctactgcaggagcagttaagtgctcttaactgctgagccatctccctggccaggcagtaatatttttaaaacaacagactccactgttcctattgttagtggaagccttttgtgacacatttttcaatctttaggctgataacggctgccacacagtgtgtgatatatcatctttagataccaaacatataaactgcgtgtgttaggaaagaaagttttagaaataaatccaaatgtataacctgtaattggagataggcagagctctctgtaagaagtttgaaagagtccttgtggcgttctggagcaagatgaggacctaaaggcttgctaggggacccactcaggtgccttcattgcctggtctcagccgtgttttccttgtggcctatcctgcatgccatgtatcagaattcctgtaatacattttattattcagaaagcctcagaaggcaactagctttcttcaaattattcctggaaatcacttgctctcgagccagcgcctcccatctgactgggtgggtgagtaatatcacttcaaggcagtgttgacacacacttcttgccttctcagttctataaatttcgggggaacgtgtctcagaatgggtgggtcaaggacgtgggcaatgttggcagcgtcctccttggtgactcgtgtgggtatcattgctccagaatccaggtgttttttttttttttttaaattaaggaagactgatgtgccaacctgaggacattattataggcatctaacacttaaacagatgctgtgaagttttgtttaaaaagttgcgatttctccaaatgcattctattatacatgtgctgattattttctttagaacaacagaagctgctcattggagtaaagagcctgagttttatttgtcagttggtaattggtaattggcagtattttcatagaactgaagctttgttcccttgcaagaaattaccctgggtaatatgtgtgatgtgtatggaggaactcaggaaggaggggccggaggaccagataactaagggatgctaatggccagtgggcctcacactgccagtgggctcattatttgaagtaatttattgttcctttaagaagtacatatacattaatcatggaaaactagtagaaaaaagatattgtgtaaatgttagagtcttagtaaatataaaaatgtgtttttttcattgtaggttagtacaagttttaaaataccacattgtgtgttgatactgaaaactgtaaacaagatagaaaacttggcctgtacaagcatgttaccaatgagcacattgttaacatttaaagagtcctttcaaaatgatttccatcgctgcctatacacactcctctcctctaagcatacataaaatcacctgtaatccttttcatggtcggtatattgtttttctccctgcatttacttgtcatgtttgactgataatctattgataactatttacataacttttaaaaagattataagcatttctgtggttaacatttttgtgtgtttttatttgtttacttaaatgtagacttgctgtatttattatacacagattttgcttcatgattccaggttaaccttctaaactttgctcctatcaatggtatttaagaattctacttaacctctcatgttagaaagcataaagaagagctggggatgtggcttgggtggtagtgtgctcagtcttccacactcaaggccatgggttcgagtcctagcagcacagaaactaggtgtggtggtgcagacacgaagttctagcacttgggaggtgggggcagggaaatgggaggtgagggcagggaaatgggaggtgggggcagggaaatgggaggtgggggcagggaaatgggaggtgggggcagggaaatgggaggtgggggcagggaaatgggaggtgggggcagggaaatgggaagttcaaggtcatcccgagtgacattacaagctctaggccagcctgggccaaatgttagacaccttatctcaaaataccaagccacacaaactaaaaccaacgtgccacccgcagaccaaagtgaaacaatccaaagagcagaaagaattactatcatttttgtgaatcgcataagcaaaaaagccaactttattatttgaattttcctgtttttaaagtaaaaaaaaacttatgatattattacttaaattgtatgtgtctctttgtatatgtgtgtactttgttatatatgaaataaatgagccctctaggcccatgcatcttcgagctttggacatactgttttgatctttaaagtcgtaggactgatgcccatggagggccgtacagtaccctacatgtgtctgactaggaggagagcaaatgtgttccttttattaagagtgtgatacatggtgatgcccacagtgtgaggatattctctgcttgtccactgccaaaactaggttgtttgattcagcaattctcttcagaaaattttcctataaaatttataaatacataaagatacttgcacagccatgctctttacttttaataatgaaagaaaaaagtacatggacagtctggaattaataaggggccttggggggggagggggaagggaaaacccacaccccaccagaggtttacctattctctggtctgtcaggtgtgggagggctgctatttaccttccactcatccctgggtgggcattcaagcctctgacccactcagggggtggccaaggggcagccctatctgctaaagcccccggggttatannnnnnnnnnnnnnnnnnnnnnnnnnnnnnnnnnnnnnnnnnnnnnnnnnnnnnnnnnnnnnnnnnnnnnnnnnnnnnnnnnnnnnnnnnnnnnnnnnnnnnnnnnnnnnnnnnnnnnnnnnnnnnnnnnnnnnnnnnnnnnnnnnnnnnnnnnnnnnnnnnnnnnnnnnnnnnnnnnnnnnnnnnnnnnnnnnnnnnnnnnnnnnnnnnnnnnnnnnnnnnnnnnnnnnnnnnnnnnnnnnnnnnnnnnnnnnnnnnnnnnnnnnnnnnnnnnnnnnnnnnnnnnnnnnnnnnnnnnnnnnnnnnnnnnnnnnnnnnnnnnnnnnnnnnnnnnnnnnnnnnnnnnnnnnnnnnnnnnnnnnnnnnnnnnnnnnnnnnnnnnnnnnnnnnnnnnnnnnnnnnnnnnnnnnnnnnnnnnnngagagagagagagagagtgagagagagagagagagagagagagagagagagagagaagactagagagaaagagtaagagggagagaggagaggagagaagacaaaggggagagagagggcgagagtgaggagtaagaggtaagagcagtgagaagtgagagagtgaggtggggctgaacagccctttttatgatgttcactgttgctaggtaactgcggaggagtttagcctgaaggtcagaagcttgggccattgcttatgtgacttctagccatgcttctcttgtgggggttgtgggagtggtaacttaggcaggagtcagagttcggagcatgagggagcgcctaccatgtcatgtaggtgaattattacccttcagggttcagacctcagctcaactggagaccagcctgcaattccccacaacagacaaaaaggtattgtatgaaatatgatgttgaaaatacagagatataatggatccgttacttgtgcagaaatacccacaatagcttgcgcagctggcccgtctgccgaatacatgtagcctgactgtgctcacgtctcagttcttctgtagcctgactgtgttcacgtctcagttgtccatgtgatgaggtggacacacaggtagataagcactctaagcagattccgttttgtgggcaatgtgaggaggactgaagcttgagaaccgcccccttctgcattgcagtggaaacctttataagtgtgtgtgtgtgtgtgtgtgtgtgtgtgtgtgaaacagtcaatggaaggtgcacttcagtgctatggaaactttgggaagtaaaatgtttcagtgtggcaagaggctgctggcattccctctgcttaataagcttaggccttcctaaaactgcagttgaatgccaagatttactgtaaatacagaatgctttattcacgatgtgaaaatacagtaggaagaggaaaaaataaggaggaagcagttgtcaagagggggaggctcaggtgggcatcacagatcctggctcgctctgaaggaaccagggtgctgcagtcaagccgcccaggccacctgttctcaccactatccggtacctgccttccaggcaggccctttgccagactgtctcctccttttccagttcattagtgacattttaagatggtgcagcctgaatccaatactccaggtcggttgtcactcgtctgaaaggaaggctcggggctacaggagtttcagatttggactgtgaggggtttctagtatttgtatatacataatgagctattacaagcagctctcaagtccagacacatagctcatttacagtttatgcctgtttttttgtgcacgtagcccgagggtgaacagcttctacctgtaacaccatgccagtgctgaacgactttgagaagtggaactttttgggttggattctaggctgcagacactgtctgttcttctctgctcccacctcctccctgtgcagcagcctggagccttcttttgtgcaagagaaactgtccttaaattctgcatgacagttccccccaagtctctgccctggctggccgtttccccacacttcctgtctcgccacagggtctcagcttggcagctttacctgaaggtctctcccttcatcctcagatgctgagttaatactgtggttgcaggtcagcgatgccttgccagggaagttcttgcccatctcgcacggtttctgctgcaagcagtgtatctgtctgagtagctagtcagattgcccgtgttgccagtcggagcacatggcaccttcctttgcctttcaacttttcatatgctaaagggaagaaagaaataattctgacagcttagtttttcctggatgagtatttaaggctactcgagtgattgttaatgcatttcctgtagttatccattcagagatggtggtggtgcggaaccaggaggcttggggaatcttaggctcagcaagatagacaggcacatgcttttgaggggctacagctggttcctgctaattagcatcctttcgggaagcagctgccctttctacccattgtggtcactactggatatgtaagagactcttctagcccaccattcttcgtcacatgcatgtggactcacatacaagcatgcacacgtgcgcgtacacacccccacacccacacacaccattgatgctcttctggtttctctgcactcacattcttagttactattgtttctagctgttgtctgccaaatatttgcctgtttagagccatagcatacagtaatctctcagacggtgccattgagagaatactggcttgtatttatgagttacttaactgaccataaatacatcagcttcgaagaatggaacagcctagaccttgcaggtctccaggaacactaggctgagaaaacacaatggggaaatgtgcctttgaacagatgaagtacaaaaagttcctttctgggtgaatgaactggaaaaacggtcttcgtgcccacaagaggacgcttggggacgtggttttaatggggactagatcttagccctattttacctatgcaggaccaaccatgccactgtttggagcagtgttttaaaatatgcatagcagatgcctgtattaaatttatgcctacatcttggcctcacaatttcgaaacctggtctaggagttcttgggcgtgtcctgcacaacaggtcattgctggtttgttctccatggcaccttcgagtcagattgataccattgtaagagtacagtggatttcgatacatttactgctgagcagatgctgacgtcggctgtggtagaacgttcccaccagctcctggcggtccctcacccactccagctcccggtggtccctcacccacttgcagtcagcaagtgcccactcaaagccccacacagctatcacttgtcccctggccattgccggtttactccacgggcaccttatgaatgggatccatctttttgcttcttgtcttagcagaaagacctgtcagtgttcctgtgcagtagctgagagtgacagtgcctcttccaatcagtgattcaacatctcttactcactcttgtggttaagtttggtcttttgatcatttctagtcattttaaaacgaggactcagctgtccctgaggttgattccattgctgaaatgtctgtgtacagtgagtgttgagtttctgttgaggaaatgttttagctcctgatcttgtgttgtagctttattaccctctgtttcactatgtgtgcttcatcaagagcacagcacatggctatttcatcatttccttagcagacttactccatttgtaccttatttgccccaggtgtgtctctaaatgtgtgcagcccaaactgcatttcttcagctttaacatttcaatgggagctgtttaaacggtccggttggcccagggaggcatgatcatcaattactgtttcaactcaatactgttgactacagacttccttaatatttagttcatgtagtacctactatgcgtttaggagacaccacaccaaggcctctgcttcattttcattgcctggagtctaaagtctcctgttgcaagttggaaacaggcctcacagagtgaaaatagcaccttcttgtcaccgcttcatggtgaagcaaaaagagttatatggagtattagctagtgacatctttttagagagtgtcttccctttggaaatgtgttcattctgtctcctgctgtatgagaatgtcttcagaactttaaatcaacactctaggacccttgctaaacatcactaaatcatgtgaaaacctgtggtgacttgttgcaagtagaccagaagtgactggcctgctcctctggagctgggtgtggacctgcgcagatccagtctttatcagtgggaaggctgaggagaggatggagccctttggagctctgctgatcccatgagatctggaaaggccctgagactgtaatatatacatttagctgaggtttcatttggcctgggaaccaacatatttttattttctatgaaatgtgttatgctcatggctttcaattccataaatagaaattttgactaaattctttttaatttttgtctaaacctgatagaaatgagcaagcaaggcttgcatttcaggtaaaaactgctaaccactcactgaagccacagagaggacgacttagtttatgtgtctgcgaaatgttttcctggtgaagttattttaaaatgtgctctattgagtggtgaaattccggattactggatagtctgacccttcttgctgtactctagacctaagttaatttgctactgagttgatttgtaaatagtaattaccttatagaatttttctttactttttccagtgtctccagagttggggataatgggatttacttcgctgagctttggcttcatatctgtcttataccttattcattaaatctaagatcagcattaatagtcaaaaatagtgtgcctttgtatgttagctctcttctattaaacgtgctcatggctttaaaatataaaactacagagacctaatgctttcaagtgttgaaaaaaaatttcttgagttggtgatatttttactgttttgagacagggtctttctatgtaaccgttgctgtcctggaacattccatgtagaccaggctggccttgaactagctttgcaatgctactgtttatttctgggttacatctctcccagttaaacaataagaacatgaacaggaggagtgagtagtctctcttcaccacagccctgcagaaagaaacgtaagatttttgtgttgtactttgcaggtggggagttttaagcgggagatgaccttcacgtttcaatcagaggacttcagacgtgactccagtaagaagccgtctcatcacctgttcccactggccatggaggaagacgtgagaacagcagacaccaaaaaaaccagtcgggtccttgaccaagaaaaagaaactcggtctgtttgtcttcttgagcagaagcggaaagtagtttcttctaatatcgatgtccctcctgcaaggtaagggggtgtcgcatttgtaggagacaggtagagagcaggcccgctctatcctgtctgtttcacagggtctagacttagcaagagctgtctgtcaagttttctccgttccttctgtgaagtagaaccaattttggagctgctgtggttaaaactgttgtagctgtagaaaaaaaatgcctggatctttgacagaagaaaatgtgaaaatacgaacagagcagaccattctgtttaaggttgatggtgcttgaaggtagctatgctcatatcctaggttggcaaattacaactcgaggctgatttagcctcggcctcttacgtgtggactatgagatgaatttaccaattcaaatgatatagaaagaaagtgattgtgacacagcccattggtgacctgtaaagccttcagtgtgtaaaagtgtttggtgatgtctagttgatgtcattcataaggtgatgtcatttttaaggcttatctgggcaagggagatggctgagtgggatagagtgcttgccctgaaagcataagaacctgcgttcaaatcctagaggccaataaagttggatgcagtgctgtgcacatctgtgatgctggctctcttacagtgcagttgagaacatgtgtaaagttggatgcagtgctgtgcacatctgtgatgctggctctcttacagtgcagttgagaacaggtgtaaagttggatgcagtgctgtgcacatctgtaatgatggctctcttacagtgcaattgagaacatgtgtaaagttggatgcagtgctgtgcacatctgtaatgatggctctcttacagtgcaattgagaacatgtgtaaagttggatgcagtgctgtgcatatctgtgatgctggctctcttacagtgcagttgagaacaggtgtaaagttggatgcagtgctgtgcacatctgtaatgatggctctcttacagtgcaattgagaacaggtgtaaagttggatgcagtgctgtgcacatctgttatgatggctctcttacagtgttgtacacatccactctgtggcacacacatgtacacgtacacttacatgatagatttatattagaacacaatggagagagtttatcatgtaattctctttcagcatttttaaaattgttctctcatacagtacatcctaacctcagtttcttgtcctggtctcctactccctttatttcaactcttatctagcactactggagggtattgtcatggcgcagcggaagcagagcagacacaaacattgctcgtcctccatccggccctcctgctccagcctccgcgcccttgttcacactctgtctccagcctagaacaatgccctgtgcccttcctgagggtctgtgagcacatgtcagctgaggagggaatggggggctctgtctgcacgacagcttgattattttatgtgtactccattttaatgccagaaatgattatcatgagactttataagcagttgattgagaagtcttgcatttattcaagtgtttctgacggctcatgaagacatgtcctataggccaggaaggaacccttctacacctgctcaccgttagtaaatcagcattttcattgttttctcttctaaatagagggactatcttcttcagaaaattacatgttactctatccggctgccaaattgtcaggctttctacaattataggcctctgttttctttaacctctagctgccaattttgtatatcttttatttctgttcaactatttgtcactatttgctcttctatgatttctgtattaaatacttagttaaattattaaggattagtttttactgtggcctcattgtgaaatgttttaaagtgccctgaagcagacagacacatccgttcatatgtgtagtttggctgactcataggtcgagtgtcacgcttgcgacttggaatgagaagagctgtgctgttatgttcttcctgggcctgtcagatggactctgtctgagacagcagagccggcttggagttctgtgggacctactggacacaccatttccatggagtctttcgtgtgtaacagaagtcctgcaattacgtcatactctaagttgttgcaggttgtatctttggtttggttttacccaggctggcctaaagctcactgagtatccaaacatgaacttgagctttgatcatcctgccttccctcctgcgcatagattataggtctgcgccaccatgcccagcttacgccatggtgggagtagaacctaggctctgtgtgtactgacaagcacactacacactgggctttgtatcagctctgtatattctgttctttagcatgacttcacctccgaaaacagtgaaaatgaagggcaggaaaatatctttgctttttttttcctgatgctggtctaaagaatgaaaattctttgcaatcgttaggtatacacggaagcacactgctcaagctggtattattgtgagcttttaaatggtagagagaaattaattgggtttgaaatcatcaatatgtagaagaaaattccctactgacgaggtataatttagatgaattaacgtgctatgagtggggctacctaaagtgccattgttaggctctgcactaacacactcatcgtcattgtcacagttaaaatgtaatcatcataaacatgctatcacttggagaaacaaattgcttttttaattaaatagacacgaaggaatcaagtgatgcagaatgatctaatttctaacattttcttctgtttgcagtcgttaggttatttagtaaatgccaacttttgactatctaagtcgattgagattctgttgtaaggaaactttcaatcgcgtgataggaaggaacacgatttttctttctgcttactaaaaagaaatataattatagctgtcatcaaaaactgctgttgatgtctgagtaaatctggagtgtagtgaaatgtattagaataaagaagtctagatatgttattaagtatgacctataattaaagcgtctatgtgtgtgtaatctacacatgaacatctatccacaccgtttcctgtaacttactctaattccagacttggtactttgggtactcctcagaggcaggagggtgctttaggctggcattgtcagtgtgcagagctcctgggcaagttaaatgcccccaggacttcttagttacccttccccttactctgtcgtttgtgaagcctgccgttcatttccgagagttcatacagtaaagaagtgtgtgtgttagccgctttcccatgtctgccctgtctgatccctctgatccactgttggctttcctgacgtcgtaccttctccatcaccaggtgtctattgggtgcttgctgctggtgaccttgagcttgttaaaaaacaccagtgggaggtgctcccctccacgagcttgcatgcagccagacagatggatgcgtaagtggctaagtccaagaaactacttagtattgctcgccttctcatcagggctcggtgagtctgtaactaaaggaaaggcttaaatattaggagagtggtcagtttgatgcacctacttaaaggcctgctttcctgttattagtgtcgcattgaaggtacagaagcatggaatagggaaggaaaattttcaaacctgagggtctattttaaaaacttttacaaaatgccagttttctggggcctgtttgaaagttgctggtttcaggaagggtcattgtattgcccaagatgtgctaagcttgaccatctcagaagcaagagccaagacagaattaagcatacaagcaatttattggggaaattccttgtgcaaaggtaggagcccagtgcagtacaaggaagaggagtgaaccagggaaggaaggaaaatgagagggtggatgaagtgtgccagcagtctcatagcccatgaggaggaccacctcatgtccatgaggaggactgccttatgtccatgaggaggactgccttatgtccatgaggaggatcaccttatacccatgaggaggactgccttatgtccatgaggaggaccgccttatgtccatgaggaggaccgccttatgtccatgaggaggactgccttggactgcctatgtccatgcggaggaccgccttatgtccatgaggaggaccgccttatgtccatgaggaggaccgccttatgcccatgaggaggaccgccttatgtccatgaggaggactgccttacgcctctgttgtgtgctgatcttggctgggagaagcttgtgagacttgggatctaggcaagtatggtagatgctcttgagtcctagctctggttctggtcagcacttttcttatggacgcctctcctgcctggaacacagctctgagtgttttctgccgtgaggctggagcaggggctggactctgttagcaggccccttatgttagagaaccaagcttcctatggctgttgcttcaagcatcccaagaaccatgcttttgagtcattagatgaaaggccttttgagccccctgcatgggaaaaggtgatgttggtttaggagagttcccttactgtggaaccttaccagtgtggctgattggtctcgggaggaagctgtgtttctttgggaggacttggagggttagaccctctgagtatttgttagtatttttcagtcctgagaccgtgagggtaggtggagcacatgcttagtatgatggcttgcatcaagagcgtcatgtaatgtggtaaggcagcttgtgcagaggtcaggcagcctctgagggactaatgtctgtaaagctcccgtcagtgcgtgcgttctcattacaaacacaagaccaggcctcttctagagcagtgacgtgacaacagcgattagctaagtgtgcactcttagatggcttacggtgtctcgaagggaaaggacaagcttcattgatctttatggagagttgaagaaaacaaggggcgggagagatggctcagtggttaagagcactgacttctcatccagaggtcctgagttcaattcccaacaaccacatagtgactcacaaccatctgtaatgagatctcacgccctcttctggtgtgtctgaagacaggtacagtatactcaatatacatgaaatgaatacatcttaaaaaaattgcagccgggtgtggtggcgcacgcctttagtcctagcactcgggaggcagaggcagaggcagaggcaggcagatatctgagatcgaggccagcctggtctgcatagtgagagttccaggacagccagggtacacagagaaaccctgtcttgaaaaaccaaaaaaaaaaaaaaaaaagcaaaaataattagactatagacaggactttagccatgcttttggatttcatctatactgtagctgtggcaatgctttatattttgagcatgaggtgactttctgtccaatggatgtagtccattttctttggtcctcagcagttgatgaatacttgaggctggagagtcaggaactaggtcatattgggttatagtagttgtgctacattttaaacatatatttttaagtgttcaaaaagattttatagtgggcattgttaggcactctttagcaaagggcactttagttgtgtaggataggttaggggggacaagaacagacaggaggcctggtcaggacagtgttgcttaggacagtaggcagctgggaattagaactgaaatggaaagagagttgacatgatgcaggaggaaggcctctgggctgcgagctggagaacatggctctggcccagtctactagaatgggccttattttatttttcttttaaaaactaccagttcattttcagagtcacagaggggactggagattagacagtagacaatagacagctaagtcagcggagcagcatccacaaagcaggctccggggcttctaaagtgagaaatgcatgtaagacgtatgtctgtctgtaagatgatgtctgtctgtctgtaagatgatgtctgtctgtctgtaagatgtctgtctgtctgtaagatgatgtctgtctgtctgtctgtaagatgatgtctgtctgtatgtatgtctgtggacacaggcgcaaacccagccacttgcttaagagtgaaatgaccgatgctgtgcttagtcaccgtgattgccacttcataaatgagtggaaagacacaggatgtcagacaacatgtaggaggagcatgttggaaaatacatggaaggttctggccaatggagatgttgttctttatcattgtcaccagtgtttatgggagaatattaataatttattgtccttgtcaactgtgatgccataaaacacataatagcagtagctccgtcacctgcaaccccaatgtctgtcaggcagacactgtttgatcgtttagaccagtggttctcaaccttcctaacactgcggccatgtaatagttcttcatgttgtggtaactcatccataaaattattccataactaattttctactgttagaataataatgtgaatatctgctgtgcaggaagtctgacattcagcccctgtgaaatggtccttcaacccccaaaggggtcatgacccccaggtttggaacctctgatctagattgttggaacatgggtgtttgttattctgttctttgtcagaaattgctttttctgaggtactgttggacttcacccaaacagcaattacaatttgcttatgcagagtaatagctaacttcttattataactccaatgccaaagaacttgatttccaagccagttagttatactaaggaaaggagaaataactgaccccaaatactggtagacctaaaggccgtgcttcagcatgcgacagataattagctgccgttgtggtagtgattgctctgtggagttctaaaagccagctatttaacacttgctggataaaatgaagtaacgaccagatgccagtctgaaaaccgtctgcagaaactcattagcctttgaagatatagttcagtatttgacaagtgccgtgtgtgtgtgtgtgtgtgtgtgtgtgtgtgtgtgtgcgnnnnnnnnnnnnnnnnnnnnnnnnnnnnnnnnnnnnnnnnnnnnnnnnnnnnnnnnnnnnnnnnnnnnnnnnnnnnnnnnnnnnnnnnnnnnnnnnnnnnnnnnnnnnnnnnnnnnnnnnnnnnnnnnnnnnnnnnnnnnnntcatatccatcttctggaacccttgagttctaagtcggaaagtaacctcatctgtaaaccacattccatgcgcacagtaaaaacccagtgctactttggctacttcctatccagtgtcccttagagcatggtcccctgtggcaagcttggaagtaaatgaagtaaaacgttccgtcacatatttattatttgagatatggtcttgctctgcagcccaggctggtcttgaaagtggactgttccttccaccacagcgtccccagtactcacgcgagccataatacctgccttcaaaattgctgtcttttatttcctgaagctcagttaagcccaccagctcctgggtaaaagatgtaatatttcatacacatcaggagcttctcaggttcccagcttggtagccaatacgagaccactgagaaaggccgctttgacattttaaattgtttttaaacacattttctttaaaacacatacataagaataatacaaatatactcactcatgttagagaaacactaagactatgatttgtggctctcctaggtcattgacagaatgtcaataaagagaaaactatcttttctaagaaactccttccttcctactctcttgtcctactgtctcagaaactctagtctgtgagtacctgctgcctctctaagctgcacaaagtcagaaagctcctggaatctgcacacacctgcctctttgtgctgagatttgttttttggttggacacagggtttctctgtatagccctggctgtcctggaactcactttgtagaccaggctggcctcgaactcagaaatccacctgcctctgcctcctgagtgctgggattaaaggcatggtgctgagatttgtactctaaagccagtgagcaggtcaagcacagagaggcacatgtgctttctaagtgtcttcagtcacccggagtcaaccttccagggaactagagatctgaaaccaccctgcgaagggaagtcattcactgctctcttcttcagcaggaacaaatccaggaactagaatgctgggctttctgtttgttttaagtatctcttcctgtcagatgctcgtaggtgatttctgagatttaagtgtagacctgctgccctctctcagctcctcccacgctcccagcagagccatggaagctgaggcagaggcagaggaaccgtcctgctcgcactgccctttgtcttactaacagtgatggtactgatatggccttcatttcgtaatgtaagaaagcctgtgctttgtgacccaaattgccttatgaatttttgggcaagaggaaagagtgggtagatactagtgggtgtgttttaaaaagagctttatactgtccttattgctgattttaaataataactatttgccaatagctgtatactgtaaccatttactcttgaatacagattgctaccacattaaaatttgcacctgctgagaattgcgctttgaatggagagcattaggctcttctctctggatcaaactgaatagttatgaagcaaaattctgagggatggaactcttgcaggcatcgtttctatcatgtgtaactagtggagccttctgtgggatgtccttggcagtaactttaaccatccaagcctagtggatgaagaacacggggacaaggtggggccttggcctttaccttggcgctcatactccctctccctccctcctcctcctctccctccttcctccctcggtcctgctcctgctctcatacacacacacacacacacacacacacacacactcactcactcactcactcactcactcactcactcttagtttttttcctcacacttgaagaactggtgctataactgagtggtatcatggttgccctggtatcagcctctcaaaaaggaaaacataggactcagtaacgctggccagaagaaatctcactgtcagacacagtctgtagtcacaacataaacacagggagaaaagatcagctaaaataaatataagtactaaatttagtaaaacatatctcaagagctggagagatggctcagtggttaagagcactgactgttcttccagaggtcctgagttcaattcccagcaaccacatggtggctcacaaccatctgtaatgggatctgatgccctcttctggtgtgtctgaagacagctacagtgtactcatatacataaagtaaataaataaatcataaaaaatatctcaagtagtttctcaccaggtaatgaggttctcagtggtgttttgtactgtcggttgcgtgctgtgccttaagaagctgccctgtgtcttacaggaggcatcagctattgggcatgggtatggctgctggtgactggcagcagtcagcctgacgggcagcgtgggcaagattggcatcgcagcctgtcttatcttgtcaaggcaccagtttctctcttcatttcttctcctttctcatacatgaagaaaacgtctcacctactattaggagtagacttctctcttggtgtcagtgtgtgaggcctggtaggtacggagaacaagtgtgtagggttagggggtgagggcacatacaattaaatagcttctgttggaaatcttcagctggctctggtgtggcccctaacaggttatattttgtatcttgttacaaggctgtttaaattccatccgagtcagatggttaagcaggtgtcagtcccaattttagttctttaaaaacacagaaacagcttcctttccagggcttgagagaacttacctcagttaccatgcaccctgctgtccccacagtggtgacccttacagaaggagttatacttcccgttaaatttaaggcacacaccatgtgtatatttatgctttttcttcatgtactgcatgcagtaagaagagttagttactgcgtataactttagagctgggaaatgcaaccaaaatatcatatattttcttaaggacctgagctcagggtttcatttggttactggcttcagttgttactgtacctttaaatgttagctctccccttaattagggaggctcctttcctctagcattctggggaattaagggacacaaggctggagaattaacattaacttgggatacttagagaatttgattatctttaggtagtgacacactttaggggatatgtttgattggtgtcttgtagggatgagaaggtaggaggaagaacaagtgtatattgacctgaaaactatgtcagttcttaaatagttgggaaacactgatagaaatccaggagacataattatgaaactcaagaggaaggtgggacgaagctggtacccggggtgccctgtgaggatgctgcggtgctcagaatggctctaggaactctagctcaagcatctcgtgggaaaaagaaatctgctagcagcccagaagaaagtaggtgtggcagattgcaacaaggcttagggatatgtagtgtttcagtgtctcttaacaaaaacagaattcggtgataggttttccaccaaggcttaaggactttctgtaaaaatcaaatgggcagttggtgtgtttacagagaacagtatgcagaccaccttaagtagtcaaattgtaatgtatgtaatgtaaatgattgtacttagaagagcttgctattgtaatgtattttgttgtacggtaaatatctacctgtctggaggtccgagttcatgtgtttgcttgtcttcaagtgagcttacacttctaccgccatctctacacagtgagaagatatgccttgttccttcacacagggtttggttttaactgtgttgggcaaacatttgcatcctgaatggagattgtgacatcatcttttaaaatttccccacctcaaataaaattcacctcataatagatttggtttgttctgctgcccctttctaagaaagcacagcttgtaagatcatatgctttttcctacatccgttttgctgttgtatttaaaacacagaaagagtagctctgtctgcggaatgtgagagtccatcaggtgcctctggaaacttgtatctggggcatactgcaccaggatcttcagtggtactgagtactgtcatgtttacctgagttcttctgaggttgctggataaaacacagactggattctacatcctggtaattgcaccctgttctttctggccctggttggtaagcacattaactccacggctgtcaagatgtcacacacacacacacacacacacacacacacacacacgttccctgtacatgcgtatagtttcacagggcaagtggtgataatgatcctcagaatctctctaggctgagagtgctaggcagctccgcacatccatcaggatggacaggcctaggtgcatatggcgagcccctgctgtctcctgacgtaatgagcagcagcatcgcccactgtccttaagaacctgtcctccctcctgcttatctctcaagtttacatggttttccttttggttcactcctgacaaacagtgcagttgtattttccacatgcctgcagatgttccaacctgaaagagtcatatttggaattcatcctactatgtttccattgctctgataaatagagtgaccaaaagcagccgagaggaggggattcctttggcttgcacatctgtcattgaggaaagccaggtaggagctcaagcagggtaggaactgatgcagaagccatagagactgctgcctaatcactggcttgccactgcttgtcctgccggctgtcttgtataaccccgaactgtctgtccaaggatggcaccacccagagtgggctggaccctccacttcagtcattgatcaagacgttgcttcactgagctgtgcagaccagtctgatggaggctttctctccaccgagatgactccagcttgggtcaagttaacaggaagctgatacagagctgaagggagcgagcgctgctgtccatcaggaagagctgcacttgcagttcagcaccagtgggttggacctcagagctgcctcctgtccagttaatggctgtgccttcctctgcatacagtgtaaacaaagtacagcccacagtggagacgtctacttgcagttgcagagggacaccattgcaaagcggaagagcatgtgaagtgtgtctacccctgagaaaaggtagcgtaggaaacagaacccatggtcaggagaggctcagtgcctggctctgctgctctctggcctcggagtctgcctttgtgtcagctcacacctgtatgagcaagcaaggcccttctcatgtcctacagtgtgaaaacaatgtcagctacacctatctgtgctctaggtcactaccaagccttctttcccacagttctgtgacactaaagccagtggtttccctctcagaatcaggctcgagcttaaaaaaagattaaaaggcaaaagggaggtgaggggccacacacgggagatgactcagtgactaaggacacactccacaagtgtgagccaccaagagtttgaatcttagcacttggataaaggctggatacatatacagatacgcccctctgaccttagctggtgagagagggaggtaggaagatcactgtagagtgctgtctgccagcctagcttcaggttcagtgagagacccctttgtaagggagcagagtatagagaactgatggatacctaacagcttcctctgccctccacatgtgtatgcaggtgtgtgcacactgtgcaatacaccacaccctcacatgcagacaggcagacaggcaggcaggcaggcagacagacagacacaaaagcaaaagccttttttgtttttaaaaacattcacctgttttcttggtgtttgctccttaaattacaaagttagtatatatggttagtacctctacgtaggagacataagaagaggttgtctctcatcagtaattaggagtgttgtacttcagctactctgagaatgaaaatacacaaatcaggactgaccgcttatagctaaactagctcatgtattttctgctctaaatgttggtgtatcagcaggccaggtctttttattgcatgattaattggagatatctattggatgtttatatagaagtaacagttgtactgggctgcccatggcctctatatttaaaatctgtgtttccttctcattgttttgtttgtttgtttgtttgtttttaataaagtaaaacctggcatccctcactggagaagtgttgccttacatgatgaaccaagttcttggctgacacaagagactttgagggatttctgtctcattcatcttttgtatgacaaacttcacacagcactggcaaactagttgataaaccaccagagtgtgacacctgggttgtcctctgctctctgggcaggaggaaaccaggccaatgcatcactaaggaacgggtttcatggcttgtcactggcatgtgtagtgtcttgggctcagagctcagcactagtctcccttgtgttgccatctctgagagtggaggaatgtttctatgttggcattccagtgcttgctgtgtggatgagcccagttgggctgagcagatatgacttcctttgctctcgagtgaaacataccagtttgaaagtgtgcttgattgcttagcaaaggtgtagcattcggtttctcagttcttgatgttcggggaactgtgaaaagctgagaaaccattgctttgtgtatacacggtgtctaacagatgccacacctacagtgacccagtatctgcagtgaaggatgttgctctgtcagccctattctgtatcaggccagtcagcgtcaggcagagtcctttccttctcctgtgttggtagttgggcatggggttttctcttcacattattaaaactcccatctgcttttacttagcctcggaagacccagtcttcctgggagggggaagggtgcattttcctaaaaacagaagtggtaaacatttgatgttcaaatgtttgttgtctttttacttcccaagccctgagctatttaacgatattaatcttattgcttgtaattaacctacataagaaaacaacacaaatgttctcagttcctctgcagtaggcttcaagaacagtaggactcttcagtttctctgatgcctacgaggtgcatcctggagatgctgtgtgccctggcagagctaagtgtgctgcttgcagtactgaccaaagtcaaccctagatcccagagaaaagagctttttgagcatattaaatgtcatcttcttcatcccctttatttaaaagatgggaaaacctggtgtgaatgaaggctaaatttagattagaataatagactcaaatgttttttcaaatgttaccacactgtgcatgacttcctgtgctgatatgcacagagcttcccttcttgttaggacggaaaagctgctgctctgtgcctctgcccaggaaacctgccacctgccacctatcttgtggtctttctccactgaggaggacacttctctgtagtcagaatgcaacagtgctgtttgatggtggcagtgatgatggcaaagtcaagcaaaggtggacggagtcacaggctgaagcctagtgtggtaagcggccacatgtaggtgcctgcgagctgggtgaatcctctggcagggctgaacagttacaaatgaaagcaagcctgttgccatgtctgtctggccgtgaggaaaacccagcactgttgctcttgtcagatttaaatttgtgttttggaatgtgtgatgcttaatctaaagaatgacctcctcacccccggaaaaacaggaagtttgatgtaagattgcatctccttaaagtgtctgagatgctgctatacccatgaagtctctctgacatggccgtctaaacatgaattgaacaagacactaccactagacatgctaacgtaagtggggaaggggtcgctcttgaggcctcgaaaggactatgggcaactaaggaaactgtgagtgggggaaatggtctgactcagggacgagcactccggtccataccaaacggtcatccctgagcacacatgtacaagtgatgttatacggactgagcaagttgagcttatatatttaaaacatggacacatatatgtgtaattaacaaagaaaaagactccacgagcattcaggaaaaaacaaaacagtgagaaagatggggtcaagtcttgactctccaggacttgtttttttttctgtaaagtcaaatctctacagataatgtttcccatgacttacatcgtgtcaggcttggcgtctctgtgacggcctcagtgccttggcacctgcagcggaattgtggcagggggctcctgactgctgaaggctgcagtgcagtatcattgggagcgggccctttgtcactccgccttacattgcttcataactttctggtatgttgagggccttgaaaccctaacagttagacattagaggcaaagacagaccctccaataaaaagatgggttaagctctacttattatatattattggtaaaaccagaaagacatcctccatttctgttccttattttgtgtttatcacttagaacagttaggcttgtgtacaaatgagacaccagaatttgtccctagctccagtctggagagaaagcagcattcatttgaaagtctagatttgtaaagtaaatttagctctgaaatggctcagcatttaaaactgcagcatagcacagtgttgaaattatttcttgtgctaggcgtggtggtgcacgcctttaatcccagcacttgggaggcagaggcaggaggatttctgagttcgaggccagcctggtctacaaagtgagctccaggacagccagggctacacagagaaaccctgtctcgggagggggaaaaaaaaagaaattattccttgaaactttttgataggaattactagatagcatctgacaattggaaaggtcccagcatacactaattagctttctcattgttgtgacaaaatactcggaatgaataatcttggcgagaaaagaagtgacttaactcgtgctttgggatggctcagtcccactgcacactgggacagagcttgctggtggaagacgagtgtcttcgtcgtggcttgacgcagatggaaagggggaggaggagccgggacaaggcagggtttccaagcccctctgtatagtgactcactcacgacaggctcccatctccaaatgtttccaggatgtcccaaagtaataccattagttagtaggccattcaataaaccctgtctcgaccccccctcccaaaaaaaaagatttcaagctgcagtcttttttcaaggagcgtggtgatgcagctttccacttaaagagcacacattgtagagcagccacaatgaattgttctcagtgaatactaagtgttgacacgaccactacaccctgcccgtccataacaggcatttggaagtgtttgggggccacatgcttccactcaagtccagggtaccctcactgagaacaactggctaacttcctgtttgtttttaagtagtggggtagccattggatattaactgcagacatttatcttagagctcgcaggcagcatggttcttctcgatggccctaactgtgaagcagacatccatctgtggcggtgcatttcatctgtaggatagcttgatataacgttgtatttcaacgttccagtcagtgctagatgtatgtgactagtacctcgaagacaaaaccctcctgcaggctccagtgattaacgttgaaccagccacccactcatcttactgtagtctgcccagtgtttctgaatgtcagtctaagtattttaattgagatccagctgatttataaccccttgttttatgtttctcttttatatctaaaatttacaagctatggtggcatttttatccagtgccactaacgcagtacagacagcacttgaaacaaaaccaggctctgttcagaaacgcgttcagtcgtgtggtgtgcttactgttagatgccaggatgtgttgtctgtccttcagaggcttttcatgtaagctctctttggagtgcagtagagtatggtgggggagtatcaggaagcagcctgtcactcatctcctgtctggaacagagtcctattatcgtgtcctttgacccccatcgagtgatgtaacttgaatgtgatgtgcttgctgttgacatacaggtcgaaggcttagtccggagagttgatgctttgcttctgtgaaaaagttttccacggttccactcatgggaccctagaaagaagatgaggaaaagaattcttggttttctctccagcacgcacttcagctcaagtctggttgcatgttaatctttttacattccaccatggcttgctttcttcccgggcatttgggcgtgtctaaacaaactgaaaagcagtgagctggcttgtatgcaaaggcctgttactgttggatgctctcctcagaggggctgtaatcacgccacacaacttcctccctggaaacaagtcagccccgcggagcagctgagaccactctttagcttgctgcccacaaggggtttgagggttcttcttctaaagagttgtgtacagggggcagggcggggcggggcggggaggggaggggctgtatttgattccaggagaggaatctgacatgttagctacaggatgagccgcagtttctctggtcatccattgatcaattgttctgttcacccaaccgtcactaaagccaaactgtaaatgatcagtccagggttgtgcttccacacagagccagagagctcaagtctggactcttttcttcttttcctttgtgtgtgtatgatgtgtatgcatatatttgcatgtggataggcacaggtgtgtgcacatgcttgcatgtgtatgnnnnnnnnnnnnnnnnnnnnnnnnnnnnnnnnnnnnnnnnnnnnnnnnnnnnnnnnnnnnnnnnnnnnnnnnnnnnnnnnnnnnnnnnnnnnnnnnncatgcttgcatgtgtatgcacaagaccattgtaaactttaggtgtggtctgtaagtatttgctacagtgtcttaaaacagtctgtttatttatatcggatgtgatctgatacgttttttgcaggtaggaacaaatcacccccccttggatcccagccccccaccccacacccccacccccatgaagagacagtgtgctgtgttaggtaaccagtgactcttcctggcagatcacttcaggtatctcttcctgtcttttctttctctcccccagcacacaggaggtgagcaagaacctgcaggagtaagatttgcttaacgtgcgctgccactctgtgctgtgggcatcccactctttgtttccatcatgcatttaatttttcaccaaaatggactactcttactttaaacaattggtgaattctgataagcaaatgaacagtaacaaaatgagccagatcatgacagttgccataatgccacaatctcaattattcatttatatttgcatgtacagagcattcttaatccaaatgatcagttacatggcatatgctttgagattttaaaagtgaaatcagtgtattatgagtgtatgctgtgtttattcaaactctaggatataatttaatgtataaagatttatatcatatgtgtgtatcactgtgtatgtaacaaatatcccagaagacttttctatttctgttcctattgttactacatatagcactctggctatatgtaatataaagtaagtcatgtgtgtgtgtgtgagtgtgtgtgagtgtgtgtgtgtgagtgtgtgtgtgtgtgtgtgtgtgtgagtgtgtgtgtgagtgtgtgtgtgtgtgtgtgtgtgtgtgtgtgaatgcctccatacctattgcattaaagcaatcatatcagtgtctgatggagtagtctgggtatggcgtcatctggtgctgtgcggttcaggacgtctctcaagtgtatgattgcagggctgaccgggttaagttcttcatcagagagcccagctaggaatggatctgcttctaaacttgtgcttgctacagaatcttctacctaaagagttgctaaatgtgcggcctccgtttagaggatgttggcttcaggtagctctcagtgccttgccacttggcctttcagtgtgccattttgtttcagcaaagccagcaaggaatcttctagagttgatgtgtttatgctgccaaggaaaaagtatactaggtagatggaaattacattcctctgtatcatgggcaggtccccactcacgtgtgtgtgtgtgtgtgtgtgtgtgtgtgtgtgtgtaggggggcgcgggggcggcactatgcctgccaggaagcaggagccactgagagtccttctcaatgcactgtccctggaacatgttgtagctgacactcacgaacatccttttctatttccagaacttaagtctacatttgcattacttagactgccccgcagttcagagaaactgctgcgtttccctttgttgtggtttaaagtccttaatctaataggtgaagtgagaccacccgagtctgtccctttcatggcgctgatcccgttattttcagggtctttgttcccactggagatgcggtccggatgtctgcctactattttctttctcaccatgagcttgcaggctcttaagggtcagccatttaaggatgtctgagagctgattgccaagatttacctggcatggcatctgtctgtaggctcaccacagtccagccacctgtacgtgtctggggaggagtcttagaatcttgccagtttcttgtttctctttatatgtgtgtacacacatatgtgtgcatgtgcatgtgtgtacatgtatgtttcagagtatcctccagtctttcagcctatcctctactctgcctagtgtggctgcctccagaccatgtccttcacttctgccaggacagctaccatgtacctttgaggtaacatcctatttttaaccttctggactcctcacatgggcttctgcatgtctacattccccggttggtggtgtcttaagccagaggtgatgatgcagcacctactatcccaggactcagaagaaccataactttgagaccctatctctagaataaaaacaggattggcgagatagcttagtcagcacttagcatgaacaatgaagtgagtttgatcctaaaaactcaaataataaaagaaaagctgggtgcagtggtatacacttgcagtcgagtgctggggaagaggaggtcagatctccagggcctcctgaccgagaagcctggcctatatctatccaaacatttcacagtacctgaaaggctgagttgagtttcaggacaggcagatctacagagtgagctcctgtctcagaaagttaaataaaaataacagcagcaacatggcatacttctattccagagctggagaaggggagacaggagtatcgctggggctcaggccagccaggttagctaatcggtgagccaaggcttcaatgagggcacttgtctcaaaaactacggtggggccagtgagctggctcacttctgtaatctctccccttaggaggcagaagcaggtggctctctgagattgaggttagcctggtctattaacgacttccatgggggaaagggttagtggacttccatgctggtcaacagcgaaggaagttaggacaggaacctggagcgaggagcgacgctcacttgatgatccccatggcttgctctcaccctgctctcttaaaatacccaggacaccagcccaggagtgtcaccagcacagtgagctgagccctctctcatctctaattaggaagatgctggacagacttgcgtacagccagattttataagcattttctcaattgaggctccctcccctcagaagactagaacatattgtcaagttgtcataaaatcagccagcacagagccacccagcctacgtgtgagagtgcctcaaaaataaagcagagcagagcaaaaccaaacccatagcagcagcagcagcagcagcagcagcagcagcagtagcaacagctgctgctagaacaaagcattaaggcgggcagtgacagaggagaaaacccaatatggccctctgccctccacacactggaaggtacacatgtagtctctcaccatggagacgtacacacacatgcagagtttaaattcctaatgatttcatcctgcatagtctgtaaactccaggtgcaggtcgaaaatgcagccccatactcatgacgaacaactgtgcatggttttagaaagcaatgttttattatgtgcacataggtgtatttgttgggtggatatcagtgttcatgtggagatcagaggacagctttatactctccaccatataaggttctcatggattgaactctgggggattgtcaggtttacgtagccaacgcctttactggtgagccagtgggtcagtgaccagccctgcttatacattgtagatagtacaggtggccctcttactttatatttatggtgaggtttgtgcagttttctgagtaaggaccccatgacctgagtgggccacatgttggggtggagtggagcgcagatgggtacagttatgcttggacactcatggatactccctgtgtgcagagctcatgtgctgcttctgtgcacaagattggaggtcagtgggaggtgccagaaagctttactctgcctgcagttgttacagtgattcaaatatttgccataattttagcacctagggtgtacattattcacctcacctccagtcaacactttcactaaaaccaagcgtcttctgttcctggctatgttttattcttgtattttattacttgtggtggctttctgaagacgtgctctttttctacgataataatcaggagtcttactcatttcttggtaacaaatcctgccccatagggctgtgtgcatatttacaaagtgacaactgttacaggccaggaccatggcttagacattactggaataagagagtccagtgtgctaatttgtatcacaacccaggctgggcaggtagcagtcccatctctgtgtgtacttgctgattagatagagcttattgtgagtgttacagaccaccccattctttttttctaataaagttctgatttttagttatttttctttaacttcaaatcatcttgctggttcaacttactcaggtgttcaagtgcaactgtcatatagttcctgaatgtcctcttcagcctgcgcatccctgggaagctgaagaaatgaggaacagtgtgtgagtgtgtgcagcaggtcgtgggctgcaggaagacatcaaaggttgctcagggggagctgtgtgcacattgacccgcaggagtttgcattcaaaagggatttcaatgcagatcactgacctccagtgcatgtgcaacatggagtgtcccatggtgctttgctcgtcactctttaatcttcaaaacatggttttcactcatttctgggtacttgttccaggcagtgcttagagctccaggtcctgtagataatcttggtagaactcatgttccttttttttcttttttctttcttttcttttttttttttttttgttttgttttgtttttccgagacagggtttctctgtatagccctggctgtcctggaactcactttgtagaccaggctggcctcaaactcagaaatccgcctgcccctgcctcccaagtgctgggattaaaggcgtgcgccaccacgcccggctagaactcatgttcccagtggagcatagtgcacaggtgactcaggaaacagacaggaggatctcaagttcacatgctgcctgggccacctagtgagatgccatctcaaaactaaaacgaaccggtatggtgccatccgcctgaaagcagcattctgggaaggcagagacgaggatccccatggcctgaaccagtgaacttaggcagttgagtgagaaaccttgtctcaaacgataaagtagggtataatggaagaacactcgtgacgtctacggctggcctccacgtgcaccccttccacgtgtgtgtatgaacaagagcagagcgtgttcccacacattaaggtaaacagcgcctggctgagctcactagtggattacttgcctagcatgcagaggctctgggttcagtttcctgtacctttcctcagcccctcaggaaggaaaactttttgggttctttcttaccctgatttttccctactctccaccccataaacaacaacaacaacaaagtgaacaattcttttctagcctcttttttactgaccctcctcttccacctacattctcactagaaagtaccatttgtgtgtcttactttaacaacataatgcccaggcttgtgtatacagctttcctggaaaagaatgctatggattgtggccggtgcaatggtgtcgaagttcttcctgggcttctgctccccagcagagtggagcctgcagccgaggctccccgaggccttcagtctgtgacctgctgcctctcacatgcagctgccagagaagcctcctatgcttcccacttgtgagtttagtctgtctctttgaatgtaaatgcagacaatacatttgccctagtaaaatttcatcgccattttgagccttccagcttgttgccatctttctgttgtggccttctgtggttgcccacgtggaagtgtcttcatgccagaggaggctgttaaggacatattgattgaattggaaactacagctgtcactcctctcttctgcgtcagaaaaggctgtgactcatctggaccagaagcttattaatatgtgtgccccttgctgtccttggtttgctgtaagtgtacagtgtgcccagagagccccgctcacttcagtgaaaccctcagtgtgctgggcaggtgcgctgggcaggtgtgctgggcaggtgtgctgggcaggtgcgctgggcaggtgagctgggcaggtgcagctgggcaggtgcgctgggcaggtgtgctgggcaggtgtgctgggcaggtgtactgggcaggtgcgctgggcaggtgcgctgggcaggtgcgctggaggttatcctgagcctcagctgcttgcttccttcttactctttcttctgctggctcatacacaccactggtgtaaaaaaagcctacttctccattggaagctgtgatttgtaagcagcatctcaagttgacaaactggcctgtggcccaaagctggctttatcccctattttctaaattgtttgtgtttggctttgagacagtctcactatgtagatgtagccctggctggcctggaactctcagtgtaggccaggctggccttgaatttagagagattccctgcctcttcctcctgactgatgagattaaagatgattatcaccatgcttagctctcttaattgttgaaagcctgggagggggcaggggggtaagaatcaacaaaagatgactactactggtatatgaaaaatatatgaaattcaaattttagagtgtgtcaataaaatgccattgaaaccaagcctttcccttcctgtggtgtcaaggccagtagccctaagaaatacttcctgcctaagtttttagagaaagagctggcctgttggagcatcacctactgaagcatgtgtgggcacccctgggttcctgaaccctaccctaaagtacacatttctagtttctttggagactcagttgtgtcatgtgatttttttttcttttcttttaagatttatttattattatatgtaagtacactgtagctgtcttcagacacactagaagagggcatcagatctcattatggatggttgtgagccaccatgtggttgctgggatttgaactcaggacctctagaagagcagtcactgctcttaactgctgagccatctctccagcccctgatggttttctggaaactgtcaggagaggattttttgctgagagcagacacatggtagttttctggaagctgtcttgggagacagcatgtaacactttgctgaaacagacacttgagggcgtgcgatgtttaggaagagtgaccccaccgtgaggggatgctcttgtattggttgccgttggtcttcttcattgttgccgttggctgacaacaaacactcaatggttgatttgccttgctaagcttggctgatctttcctaatgatgctcttgcaagctggtcttcactggtctttgtcgtgactctatggagaaaaacaaggcagagaacttcttgtattctgtttgcttcttgccgcttccgtggacacatgctaattcggtggagccttgtggtttcttctggaacaagccagggctactgattcatgttaatattttaaactgggctgttgatattctgacgatgaagattagaattgccccaaagaactatttctaaacatgtctacaccccaccttgtcctattaaccatctttctcccctacctttggtcggtgggctagaagggaagttaaagtgtttaagaatccaattagagtaggttttgaaaaaaatctaagccagatggtactgtcagaatctttgaaactatgcttcaagaatacgcagactcttgaaactcacacccagatgcgcactaaggatccaccttggtgacccaaggacttgtgaaaggcaaagctgctctatatgtccccgccacctgcttgcctcttaactcgtacatgtagtaacttgtctacccactgtatggttggtcagattctaagctctgttctgcatattgtggggagaaggccacattagtttctttggcccactgttaacataatatgaaatactgtcaggataaacagggatttgttcttctacaattctgaaatcaggagtccaaagtcctccagggctgtttaccttcctgcccaggcatgcctccagcactctgactctgtctcagcaacatactgtagccccatgcctcttatacctctttaaggatgcttctcactaggttaataatccaagatgacttcctcaagaagcttaagagttacaacagcagaaacccttttccaaataaggttattacaggtgtggggattaggatgtgcccatagctttggggccaccattcagcttgaaactaatgccattaatctttatcccaataacccgcctagttccaagttgtaaggattctctgtctccatctctaggcccgcttgtgccattttggtttcattctgccatgaaaatcccttatttacacatttatgatggtttcccacttgggaagctttagagtgtgtgtctatgtcaggaattgtgctctctgcagtaatgtcgcctccacactgtcatttccagcccctcttcgtccctctggccacactgctgtatgtgtccttacagctctggccgtccgcctgagcctgcaaacaccacccttccttctggaagacaggctgtgcctacatcttcatttcctgctcctacgagtgcagtctcctgacgcatacatacttgtcagagctggtttaacaatgaccttcccatgagacctctgatgcttctttgtgttgtgtgtgagtctctgtgctttctgcatactcttctgtctctgaatgcattattctggctccaagtgcccgacatctgtaagtcagggactgagagagacagtgtcagattaagagcctctaaatccaaccccaggactttaagtgacactaagtaaatgtgtgtatttactatactaacttgtaactacctatactgtatttatttatttcaaacctgagaccacaaagtggccacaaagaatttttctgttccgatactgtatttagaagttccaatacttaagtcaccagtaagcatggatgtaaatcaaccaacctttctcatggatgtcggtattgttagcaatccagttttgttggttttgattatattccttttcatcaagcaatgaattgatgattatgaactggctctatatttactgcttactgtcatacaagttagctacagccaaagagtcacctacctgaggtcaccactgagtgcagactttctgaagcccattaaggggagcagaccagtgctcctgccggatgatagtagtatttacccaggagatttaccctgtgataaatgccttatgaaggatcatttcctgtgacttgtgttctaacaagtgctgctgtggggttggcgtttctgaacacatagatggcttgccatgatgaaagcatgtgcgcagttccgtaaggctcaggatggagcagctgaggaggtgggtacccttgggatgctaagccagtgtttctaaagatgatttggaatgcatctttcaaaacatgtgatcctaggcttcatggagggaagtcacatgttatgtgagctttcaagtcatcgggtctacgtatcctgaaagagtcagtgagcagagctcaggacgagaatcagtctgggatcctctcaggagctgctgccctgtgtcacgaagcaaggactggctctagtgctgagaccacgctgctgataatctcattctggctttctcccttgaggtgcaggctgtgttttaaatgtccgttggcatttttaatatgcacaaacccacagctaacacgtgacttctgtttgttcttcactttctatcttggctcccatgtgcgctgtcccatgatgttagcctccaaggagtttagcttgtaatatagtccacccccacacactgcattatcaataaaaacaattttaaagacacagttgtctttaaaattagtcttgtttcatcccagctatccattgcctcacaaaaactggggtttgctgagtagattgttttcctgtctccctaaccttccgtctgctgcaggctctgaggacctgctggctgaaagccgctgctgtctggatttagggactatgtgatggagacttctttagaagtggccaaagctgtgtcccagtgtctggtatatgacattgtttgttcatctgatatgggaccacccatgctgaaacaacaacagctaactctatgttgccacatgcacatttccaattgagcttgttccctgcctctgtttctctgactctctttcttacctgttataagctagtaattgttttgctttttattttaagtttaaacaagactttcccctttaccatttgtggtcatcttactaaacactggaattacttctgttggttcctgtcattttcttaattcctctaggtaggtgttacagtcagctgaacataacaatgtctatacagagtttttgctcctctttttttttttttttttttttttttttggtttttctagacagggtttctctgtatagtcctggctgtcctggaactcactttgtagaccaggctggcctcgaactcagaaatccgcctgcctctgcctcccgagtgctgggattaaaggcgtgcgccaccacgtccggcttttgctcctctttttaaaaggagccagctctgtgttccttgtcttgactgcagctctagcattaggacagccgctcctgctggtgccatgtggttctaaccgggccataggcccaggagtttatacttcttgtttgtatataatttccagagatactctttctgagtctggctaatgactgtgaggaaatgctgctgctactacgtgattcaaaggaaagatagttttgatgtatttttattattttaaattttctatccatctatcttatttggtttttctttaaaagtttaattatatatttatccattcatttgtttgttatataaggatgtattgagacaaggtcttgctacataacccaggaagcattcaatcttgtcaccccctgacgtagctctggattacagactctggaatataccaccccagttttctttgcctgaactgtgcctctgcagtacttctgttttagccactgcatgtgtaatgcaaactcctatgtgctgtgatatagatcagggcgctggggaacatctgtggggtgggggattgaaagggaggagctagggcttgggaaacatcagggcaaaaggagccgccctgtgaagggtgacagttacatcaggttccaatttgagctagggccacacaaagaccagtaatagactaagcaatggaatggcaggtgatacccagcccgagaaggggatacatgtacagctttgtttcctaaagataaaaatatggcatataggagtcacccacaggaaagaatgaatgactggggctacacagcttggtttgaaccctggctcctgcttgcttactacctgtcatagatgctttactgttttgactgctttatctacagatgacacattcaattagtgattcccaattagttcttttttttaaagctaggaagtgaatgttgggaatctaaatgttgctactgatttggatggtagtatagaatatgatgatgctatcacagtcaggggaaaaaaaggcctagaaaatataaaaagaaaaaaaaaacagaatcaaggctttgatgaattatttcatgagattatggtaagttaaacagaccacaaaaaaatcaaagtatttaaccatataaaattataacatattattagcagatattaatatactggtttggaatcaattttctgaaaatccccacatcccagagaggaagtgggcaaaagtcaagagcaggcaactcatcagagaaatagagaaatgtgggtaaagcctctgcaaattaccagtgctgatttgctcccgagctcaggcttcagctgtgggaggcttaaagagtgtaacacgtctaaggatacatcatagtgatcactgactctagcactctgccttatagactgagctccaagtaggtgtaggtgaaaaatgttgtactaaagacttgacaattatgttattaatgagagagaaacattgtaataatgggctacttagaaaattgtgacatgatgacccttccaaaggactgtcatgcacccattaatgatgatgatgaccctggagatagaaaatctaggaaagagatcaggagtcatagacgcaagcatagccaacagaatacaagagatagaagagagaatttcagatgcagaagataccatagaaaacattgacacaacagtcaaagaaaatgcaaaaggtaaaaagcttctagcccaaaacatccaggaattccaggacacaatgagaagaccaaacctaaggataataggtatagaggagaatattcccaacttaaagggccagtaaatatcttcaacaaaattatagaagaaaacttccctaacctaaagaaagagatgccaatgaacatacaagaagcctacagaactccaaatggactgtcccagaaaagaaagtactcccgttacataataatcaaaacaccaaatgcacaaaactaagaaagaatattaagagcaggaagggaaaaaggtcagataacatataaaggcagacctatcagaattacaccagacttctcaccagagactatgaaaaccagaagatcctggacagatgttatacagacacttaagagaccacaaatgccagcccaggctactaaacccagaaaagctctcaattatcatagatggaaaaaacaagatattccatgacaaaaccaaatttacacaatatctttccgtaaatccagctctacaaaggataatagatggaaaacactaacacaaagaggggaacaacatcctagaaaaagcaagagagtaatctttcagcaaacctaagggaagatagccatacaaacataattccacctccaacaacaaaaataacaggaagcaacaatcacttttccttaatatcaatggactcaattccccaataaaaagacatagactaacagactggacatgtaaacaggacccgacattttgctgcttgcaggaaacccacctcagtgacaaagacagacactacctcagagtaaaaggctggaaaacaattttccaagcaaatggtcccaagaaacaagctggagtagccattctaatattgaataaattcaactttcaaccaaaagttatcaaaaagataaggaaagatactcatactggtcaaaggaaaaatctaccaagatgaactctcaattctgaatatctatgctccaaaaaccgcacattcataaaagaaactttactaaagctcaaagcatacatcgcaccccacacattaatagtgggagacttcaacacctctctctctctcatcaatggacagatcctggaaacagaaactaagcagagacccagtgaaactaagagaggttatgaagcaaatggatctaagatatttatagaccatttcaccctaaagcaaaaggatatacctccttctcagcatctcatggaaccttctccaaaattgaccgttgacaaaacaggcctcaacagatacaagaagattgaaataatcctgtgcaccctatcagatcaccacggactaaggttggttttaaataccaacaaaaacagtggaaaacacaacacactactcaatgataacttggtcaagaaagaaagaaagagagagaagagagagagagagagagagagagagagagagagagagagagaaaggaaggggaaaggaaaagaagaaaaaaaagaaagaagagaaagaagagaaaaaaagagagagagagagagagagagagagagagagaagaaagaaaagcaagaaattaaaggctttttagaatttaatgaaaatgaaggcacatcataccaaaatgggacacaatgaaagcagtggtaagaggaaaactcatagctctgagtccctccaaaaggaaacaggcagttacttcactggcagcttaacagcacaccggaaagctcttgaacaaaaagaagcaaatacacccaagaggagtagacggtagaaaataatcaaactcaaggctataatccaccaagtagaaacaaaaagaactatatgaagaatcaaccaaactaggagctggttctttgagaaaatcaataagaaagagaatcccttagctagactaaccagagggcacagagacagtgtccaaattaataaaatcagaaatgaaaagggagatataacaacaaaatatatcttaaaataattactctgtttgttgaatattaacaattgaaaatattaaattcatgttctacaagcatcaaaaaaagaaaaaaatatggaaaataaatgcatataataatacaaatgataaagatttttaaaaactttttcctttttttttttttttttttttttttggtttttggagatagggtttctctgtatagccctggctggccgggaactcactttgtaaaccaggctggcctcgaattcagaaatccacctgcctctgcctcccaattttttattagatattttctttctttacatttcaaatgctatcccgaaagtcccctataccccccctcccctacccacccactcccacttcttggccctggcgttaccctgtactgaggcatataaagtttgcaagatcaatgcaatgggcctcttttcccactgatggacgactaggccatcttctgatacatatgcagctagagacaagagctccggggtactggttagttcatattattgttccacctataggattgcagatccctttagctccttgagtactttctctagctcctccattaggggccctgtgacctatccaatagctgactgtgagtatccacttctgtgtttgccaggcactggcatagcctcacaagagatagctatatcagtgttctgtcagcaaaatcttgctgacatatgcaatagtgcctgggtttggtggctcaaaacttagaatactcaagatacaatttgcaaaacacatgataaagattttaaaaccaaagtttcaaattactctttgtcatctactcagattccccccctcccccatttgttgatttgtgcctgttatcgtcttgagaagctggcgcagaagattgctgtacatgtaaggggctggcctgtgctacttatactcagcaagccactgtttcaagttaacaatagtttcagtttaatgaatagtcaagtaataaatgcagtatctttaatactctttcagcttgctgaagtccaccttctgtattatgttcccaagtccaggaggaaagatggttagctgcagcttcccttcttaggcagtacctgtgaattctgcatttctctgtagagttgttcacaaagtatggaaagagtgtttcttgtttttgtgaaagcagtcttctttcctcatgtttccactttgtcattattaccacactctgagcacacctcgaagacagtgacaggaagcaacttcattcgggatatttggtggctgctctgaaattgttgcctaccttaatatgcccccttttaattacagtgtgcacaggtttgcaagtctcagttcagtgaagagtagcttgctgacagtactttactctgcgcttggccttcaagccctctgcagagttctcaatgctcaccattacagatacagccggtctggccagtgagatggacagccattagcatccgtgctgctacccagctgcgtgtggaaagctattgcatatcttcatgtaactagaaaaggaatcaaaaatcacaaaattcacaatcttacttatatactttctcaaaattctttgctgttgatgtaggctgaattttttttaaagcaagatattttatgcttcataactatagcaagaatataaactgctnnnnnnnnnnnnnnnnnnnnnnnnnnnnnnnnnnnnnnnnnnnnnnnnnnnnnnnnnnnnnnnnnnnnnnnnnnnnnnnnnnnnnnnnnnnnnnnnnnnnnnnnnnnnnnnnnnnnnnnnnnnnnnnnnnnnnnnnnnnnnnnnnnnnnnnnnnnnnnnnnnnnnnnnnnnnnnnnnnnnnnnnnnnnnnnnnnnnnnnnnnnnnnnnnnnnnnnnnnnnnnnnnnnnnnnnnnnnnnnnnnnnnnnnnnnnnnnnnnnnnnnnnnnnnnnnnnnnnnnnnnnnnnnnnnnnnnnnnnnnnnnnnnnnnnnnnnnnnnnnnnnnnnnnnnnnnnnnnnnnnnnnnnnnnnnnnnnnnnnnnnnnnnnnnnnnnnnnnnnnnnnnnnnnnnnnnnnnnnnnnnnnnnnnnnnnnnnnnnnnnnnnnnnnnnnnnnnnnnnnnnnnnnnnnnnnnctctcagatgacaagaccattccattcggggagactgtgtagagcagtgttctctatagttctactaatctagcgctaaagtctctagagagtgtgcataaccatgctaatgaggtgtggagaagacaaaagactggccagaattcttgggtcacaagtttcctttcggaatggtaaattcctgggtgttcattttgttatgtcgtctaagctgaagaagcttgccagctgaaactgccaagctccaggaaagtctgtctttgccagaggtgaatcctagcgaggcaaactcttacacggcatctactatgttgaacagcacagagtatgtgtgggtccatcctgcctgtgccagaagaaagtgtgggagcctagatgtctgctctctgaagccatgaggaaaccttccagcactccagaagtaaagcttcgtgtttcctccctgctgggaagtacggattccatggacctcacataaaactcaagttggcctccctgcctactgttggcaagcctaaggggacctgggcttgtgcccaacctggcagctacaaggcagtattctccactcccaagacagctagttcccattcctgccttacttttctattgctgtgataaggtagattgccacagccaaggcaacttagggaagaaagagcttatttggagtttacagtttcagagggttgtggtctataccatcacggcagcaggctggcaggcatggtactggagcactagctgacagctcacatcttgatctgtgtgcacaggcagagagtgataactgggaatggcatgggcttttgacacctcacagccccttcccacccctatcccaacaaggccacacctcctaatctttcccaaacagttccacccacagggaagcaagtatttaaaaatatgactctgaatatatcaatcaccgcagtgcccatcaaaagataaacggtggtgtgtgtatacacagtgaaattgtcaaagaagaataaaatcatgtaatttgtaggaaagtggattaagcaaaataaaacaaccagaaagacaaatacatgttttctctcatatatagaatctaaattaagggaaaaatagtgagagaatggtgagccatttgggaacaaaaagtagaccagtgggaaggagaggggaggcgagagatgaggaaatatgtacaaaagcacacatatatatgaaaacttatgaaactcatgatcttgtacaattaagaggcactagtgaaaagcccaaataaagagttttcaataacatttagtctcacaactttgtgcaaaaaatggctttaaataaaaatcactcataatacaaaaagccaggatgatctcagactgcacagttttgatcaggcaaaccaacactaaagtgtcagagatatgtgaattatccagtgtgttttaaaggtgctagaagggtttctgttaacaactaggaacatacttgaagcaaaggaaagatggctcagcaagaaaataacttctactgagaaacctcagagtcaggaaagagcaaactatttctcatgtgctcaaagaagtgtcaatctgtcctccatagccagagagcatgcgcttcagtaataagtcgcaagtcagagcatcctcagatggaggaatgtgtcccactagatctatctgaaggtaacgtctgaaagctatcctagaagaaacgttggcatgtcaggaaagataggttgtgtggcatgcaaaaaaaaatgtgtgtaaataaaataggtctccttctcttaaatgtactaaattatgtttggttgaaacagaagatatggtatctggtatactaggctgcatggggaaaacatcttaaataattgaagaaaaggaaagaaagatgtaagccaagacttcatatttcatttgaactaggagtaagacccaggttctaataaggtagcatacagttaatgtaatatccacatcagcaaaaatctgtacaaactatggataactaacaataagattcatagctagaaggtgaaggcacagacctttaatcccagcccttgagaggcagaggcaggtggatttccaagttccacgccagcttgttctacagatcaagtttcatgacagccagaaacaaaaaaccaaaatgaaaaaacagtagtagtagtagtagcagtagcagtagcagtagcagtagcagtagcagtagcagcagcagcagcagcagcagtagcagtagcagcagcagcagcagcagcagcagcagcagcagcagtagcagtagcagcagtagcagcagcagcagcagtagcagcagcagcagcagcagtagcagtagcagtagcagcagcagcagcagcagcagcagcagcagcagcagtagcagcagcagcagcagcagtagcagtagcagcagtagcagcagcagcagcagcagcagcagcagcagcagcagtagcagtagcagcagcagcagcagcagtagcagtagcagcagtagcagtagcagcagtagcagcagcagcagcagcagcagcagcagcagcagcagtagcagtagcagcagtagcagcagcagcagcagcagcagcagcagcagcagcagtagcagtagcagcagcagcagcagcagtagcagtagcagcagtagcagtagcagcagcagcagcagcagcagcagtagcagtagcagcagtagcagtagcagtagtagtagtacactatattctaattcataaaacaaacctcaaaatattctaaagactaaaatcatataaagtatgtttcatgaccatagtaaaagtggattataaaaaaagctagtgtgtgctgctggggtcagggtggggctctagcacacaagcctagtgtgtggttagcatgtagagactatgcatttcaatctccaacaaaataaaaacaagaagttccacttacttgatttcacagaacttgctggaatctcttaaggtttctagtttcatcacaggcatcttatcttgctgggaaagaaatagattcaaggtggttgattggctcacatgttttagagaactgattttttttttaacatggactgtatgttgttcatgtagttgtagggcttatcataacgtccagctagtagatgttagattttgatagactttagatggtagcatgaatggatgggatagtcgtgtgcccatgtggaaatgggtagatgtttaacagctcactacccagaagaagacctgaaaccgcccgttggatacactgtatgtgtctcttagccaactagcccactatgcagttggaatgaggtggtagcaattgcctgggaggagccagcatgagctggtccccaacagctgaggatggaactgatttaagtagtcattagctcaagtctttattttctgatgccagacttgtgtagtctatttcaaactacaatgaaaacgtgggccttgggttactgctcagtccctttcgcgttatatcagtgcagagatctggtgagaatcaggagttggcataaaataagctcacagctttactagaaaggaaactaacgactaatatggtttattgctgtgcaatggcatagatgacagtagcttactgctgtctgactcagggtaagctggttgactttccttgatcagttgttttctttcctcttgatgatgattgcttttgagagatgtactccaaaggccaccatgtctaaaggaagccttacttttgtaaggaatgggggaaagttgccagggtttttgcaccatggccttatttctcaatgtagccatgtcatttggtcctgaggacacagaaagcatttttccctcactctgtctacagctgctacaaaaccagccccaaagcggtgcctcagtgcgtgccctcgggccgcagtctcctcttgctttggcagggtttattccatccaaggattgctgtgcagttttgttgccatagagacttcaggtgagctaacctgtacaagaaaacctcaggggatccagtctagtgtcttctaaagctgcccatgatcaggcgttccacatatccttacactctgctcagtgtgtcaaggagacctggcagtggtggcctgatgtgcctggctccagagtatcttgagaccatagtgtagaaaacaggtcgagggctgcatggaggaggtagccggtctggaacattagttaacccacgaaggattgtttactttggggcattcaatcgtaactgctcagtgacactaacaagtttacaaaaagcagacgacaaattgctaaatgagggcgtcattgactcccgtctcagacatgaaggatgaccgctttccgtctccgggttccgtcgagtctttggaatgcaatgtcactttcacgactaggagtcacacaggagtggggaaaatgaagcagttttgtagatttaaaaaaaaattttttttaatttaatcacttttatatgtatagcaaatactgtgtagtctagaacttacattgaaccacagtacaatagtgtcagtaaataaacacagcccccataaatgaaactcacctaacagtggtgaccatgtgttttagtgtggcaatgttgagagcagacagacatttctatgtgttaaattaactaggcttaactactatgaattattagtcaaccaagttaattacaggtctttgagaaatgaaaggtttgtgagaaatcttaaaatagtggtcaaattctctaagcctctgggatgttctggaacctcagggtaccagtatatgacagtggtcactggaaggaatctgaaaggccaggtttcagggaatcctggtgtcaatcttcgtcctggaaaaggacttccctctgtggtacagttccctcacaagtgacattcaggcctcaccatccaggcttcaccatccctgggctctgagtttcagcagtcagctgaaggtggtataatttagtaattaaatggtcatttaaaaataaagggcctagacagggtttctctgtatagccctggctgtcctggaattcactttgtagaccaggctggcctcgaactcagaaatccacctgcctctgcctcccgagtgctgggattaaaggagtgcgccaccacgcccggctaagtttctttcttcagttccaaaggtaagacatagcaaggctgtatgaccccatagttgtgcccttgaatgggggcatatggaaattccacaacacatcaaaaatctgtaaggctgagaaccactcctcggtatgtacctgagaactccaggttagcacgcaccaatttccttgcttcctaggtagtcagccctggagtccatcagtggaggggtcagtgaagcagactagtctatgtacatacaggagtgctattgggccagaagaacaaaattggaacttttgcacgaatgtggtctggagtgtagactatgttgggtaaagtaagcaaaatttatatagcaaaatttatatagacaaacatcacatttcccctcatgtgaaaatctgcgcttacaggagaacagaccagtgggaagaaggaaactagagaataatgacaggtctggggcaggaagtatgatcaaagtaaagaaatacatggaagaaagtatagcagttgctttatacaattactgtatatcaataaaagctgaagaaagtcagcacagctgagcatcctggtttcttgggtacccaaggcccctagtgagctggttctaacgtctttgatgcccagcatgccaggttgtgatgactcgctgttaatggatgccaaatactggatggatgagagcttgtctgtctcattaaactgtatcagaccgtcttctagccagaggaatgcagagtcacacacttgctgggggcttggacctgtgttaaccatgactaaggctaaggcaccattgcattacaatggcactgttgtccattgactcacagagaggaactagctgataaacgtgcaggaagttgattggttataagatgtgcctgattttaagcagatcaagactgtgccttgtgtgatggggaatagatgacgtctgaggatgacctgcctagctgatttttatttgaaatccaagtgagatggcattcccacggtattcggtacacagtacctttcacacaacaagaaccgagaaaagacgagctatgttgtgattgtcagttaatagatgtcatcctcaagttcctaaaatgagctataatgttttggggtttttattttttgtttctgttttgttttggttttgtttttttgatatttgaaactggatttgtggaatggatgtacaaggctactgtcagtctttgtaaaggactgggttatcagcaaaatgactgtatcaagcatgatatataatgacctgcagttctatctgaaatgcttgatgagtgtgacacttgacaaaggccctttggtggaacatggcttcccactctccatctctcaagtgaaggtagaataaaggcacaaattatgcttagtggtcgggcaggttcagaggcgctttgaatacagctctgttcagcttgcctgtgcctgtgataactgataatttggtgactggctgacaatttctctgcagcgaactgaaggaaggcctttattcatgagcatgaggctggcaatacttcaaagggcagagaagaagtatttgaagcaacatgataccaatgcagttgctgctgtaaaactcgttagaatagagcactgtagtaagccagagcctggccagcgaggatagctgctaaccggctgcaaagcctggtgcgcctcagcgtaagcaaggccagctggccactcatggagacctgagggctgtgaaaacaccatcctgtcttcctcatcgcacacccacccttactgcagtgttgttgtgtaggcagccttgtgactcagaaactagtgcttgagaaggaagtcccggactcctcactgatcagctagatgaatactgtttaacctttgacagagcagtagagcactgccaaactcgaaatgttttagcaaaaattatcctgttttgcacttgtcaaaactaagccccatggtccattatgaatacggcaggttcttctgggtggttgagttgatttccaggtccggcggcatacgttactagagacagggaagttgtccgagctaggtgtcttagttttgcttcacacctggggcagggtggggcttctttactcttagctctttcacatgcataagcacgggaaggaggccagcctattacccagcctgtaaagtggagacagcagcaatgcttcctggtgaaattggtgctcggctaagaggagactgtatctttgcaatacctcatgatgttccggtgcctaatgactggtaatagtgccgttaatgagaaattcatgggttcatctgccacggtgcagagagacatgatgtgatgctcttaggtgtgatgttcactgtcaatgaacctttctttctggtacatgaaagatttgcgtttctgatacaggttgtgtgtccttcaaggggcccccagggcactgtagatattcagctacgttttgctacatggccttgctgattaaggatactgtaatgcgtgcatttcttctttgcctaagatattttatgttctggggacagcattttgaaagaaagtaaccccattatatgaaggcatggttctcagagctgcacactgactgcatcactgagggggacaggaagcagctggacacctgcgttcctctgtcagagtcggactgtgtgaacactcggtgtcaagagccacaggcttggagaagttagctgtgtgtctctcgtctcttggcagtctcgtctgtccttcctcagacctgttctgttctgggttagtctgaagtggtctatgtggcctgagtttcaggagaggtgctgagaagaactgtctgtggaagtcgagtagatgaaaatctcagacctgcagtgactcacccaaacttctgatggaataattatggtttgctaattattactaattgattttatttttaattaacattcaatctcggcagcttatactgagtttgcatgcttgaacaacagaagtgtgctcctgccatttgctttgtatccactgagagctcgggacagtgagggaagataagttagcaccaacaacagagagcgagcagtttcccctcacacctcacggactgctgcgcaccgtctggctataactgactttagcagagctcagttgacagtcctaccttagatctgggtgccagtttctgttgctctaacacaataacccgagttaatttgtaaagaaaaaaggtcagtgcagggtcagctggctccatgctttgggctgtgggtggagggtggggtggagcagctcagatcaccagccaggaagcagaaagggaaaaggcaagaaaagatagatagatagatagatagatagatagatagggtcagcatctcataattctgtctggggcagtctatgaagcggtctagcactcatccatgggctctgtgtgggcggcacctcccagtagtgccaccccgagcaaccaaggattgggggcctctgtgcatgcattccaggaacagttactcacaccagagcagccatgagggagggaacctgtgagcagttttaagtctggagcaccaaggatatttttattaagtgcttttgtattggtcaatgtacaaaatccaatgcaggaaagaatattgtacagacttccctggagctctcagagtccatatttcatgtcagatgaagtcacttcacatttatacatactagttagtattttcaagtttaagaagatttttaaaaataagtagtcaagttaattttttgttacaatcttatcatggaaagcatgacagcagcgctgtagatccatttgttctttccttttgtgtatttcttacactggttaaagtgactctgccttagtgtggaggaagtgcccagatcactaactacccaccctgcttggtcccaccttcatgggcagcctcacctgggcagacgttgggtggggagtggtcaggagacattcgatttgtttgtttctgataatacagtgtggtgttggagtgtttggagccggcaagggagacctgcagcagtttgctctaggctgcatgcctctgtgcctttgtatgccatttctcttccttgtggtggacctgcatcatgctggagagcaagggcctgccctgggaggggtgcagaggctctgcgggtcttcacagcttttcccatcagctctgtagcaagtttggggcttaactgttctctggggttactctgcctgggaaagttgacagccctagcatgaattgtatttttttgtttgtttgttttttcaagacagggtttctctgtgtagtcctggctgtcctggaacttaccaggctggcctcgaactcagaaattcgcctgcctctgcctcccaagtgctgggattaaaggcgtgcgccacagctggtgttattttttaaaattctaaaacattgtggcctctgtttcattgcttccttctttagcaaatgctcccttagagagtgaaatatattttcctctttagagtgggggagggaaaaccttcttcatagctacatccgtccctgctgcttttgcggaaagattgatatttgacacagaaaggcatcaacaatgaaagctacatttaacttcggttgtttggactgagccctggaacaagaccaaaccggtttctctgtcagtgtgtgtgtgtgtgtgtgtgtgtgtgtgttgtctgagtggcactaagcccagaaacatgtttgcattgccaagagatggctctcaatacagtgtgtggtggggaagactgcttcctcgcgccggcagttggtgtgctctgtgctctgtgctcgccgccctccaggaggaggtttggctgggctgcaggctgcactgaggaaagtagaaacaggagcccgggcaggttggctttgcacacgcggcggctccagccaaagaatgcagatcaaccttgctggctgttttgattttttcagatttaggagtgtaattaaacacacagcagtggccagctttgagggactgggaaagaagcactgtacgggtggtgtttaaacacagactgtttataaaggtgtgaaaacacccctgcgatgctttgtgttagctcgcctcccagccagctgtgaaatctgagcccgtctcacctgtcctgcagacagcggcctgctctttaccagtttaaatcttctccaagttgaacagcaaggggcctgtggggcctgtggggcctgtttgagagcactgactttaaagattgctttcgccagaagcagagccgggagccacaaagaaggaggttcgaaccccctgctgtgctcttgcctttagcaattaagtaaagtagactctgaaacctcagctcctaaacccgactgccccgaggggagggacggagggagctgctttgattgttgttttggtcgaggtttttggtataggtttgccttatctcagtttgtttcttctttttatcttttttccttggcagtgaaagtaaagtgacacgtttgcagattaatgttgttttgatttttatgataaaagcttcctatgcctcagaaaatactgcaaagtagccagtccacattccataatgaaatcatctgtgcgggatgtattactgaggagcagttaaactcagcatggagttggttctaaacctccaggcttcataacaagagactataacttaggaacaaagctgcattgcagtccagaaacaaacagtgacgtgtgatggttgagcaaaaacttacagttctgacctcaaagggagaaagcttattctgtagacaaatatgaatgagcgtggcccgaggacacatttaggttacctcaaattacttgttctcacacggaagcagtttaacaaagcctttgtactaacagaacaaagccataaatcaagacacctttcacagacattgctggggacattaggtgggcaggttgaagcagagtggaggtacttctgctggaggcctcccaccttacgtaatgacactgttagccttttggttggtgtcttagttggggtttctagtgctgtgaagagacaccatgaccacagcaactcttataaaggaaaccatttacttgggtctggctcacagttcagagttagcccattatcatcacaggggtaagcacggtggcgccaaggcacacatggtgttggagaaatagatagccgaagatacacctggatcagcaggcagcaagaaagcccaccctggtgtcatacttcctctaacaaggccacacctactccagagagagcacacctcctaacaggaccacgccctgtgagtctttggggccattttcatccagttaactctctttgcagcatgtttcgtggagatgcagcttcttttcgagaaccttctttcacatgctgcatgaagcagcatatttgagcatcagtgtcaggggtcttcatgtatactactactatcttcaagacatactttgaaaacaatagaaatacattaaaggccctttctccataatgattgtgtgatttattttatttgttctttggatctatggatatacttatattgacaagtcatcctgtattcttttaatgttttaaattcagtttgtaaatatttttattggtgtgtgtgtgtgtgtgtgtgtgtgtgtgtgcgtgcacgcgtgtagctcacaggacaatttgggggagtggtttcttggagaatgagcatattgggatcaagttcaagccattagacgtttgatagttaagcgcctttagcccctgtactggcctacctacagtccctcagtttgctagtgagtgcctttagcccctgtactggccctgcagtccctcagtttgatagtaaacgcctttaacccctgtactggccctacaatcccttggtttgctcacatttgttgaggacttttgtatttgagtgcatcaaggaaattgaactattaatttccatactggttttcatgttagtgtaacactggctttggaaagagagtgtctaagccttcctgtttgataaagcattttaagaactatgtcttccagtttttaatctagagtctgtattactttcatgcttcttgacatgggctgaataatactcccttctgttcctaactttgtcttccagaagattcctggggagctggaaaagatgttttcaaactccccagcctccttccttcctcctctcttttcttccttccagagttccacatctttcccaactaacacatgttgcccttgggactcagtctttatctggagctttctccagctctttctctagccaagcaagcttgcttcctcccttgctgcttctgacagtcactctccatgccccagccatttccagtcgtctaaagatgtacattttacacagtggtttcaaatattgctgatgaagtggtgtgcatgtactggacctcaggaaaaccttccagaacccagttagcactccgaagtcaaatggcccactgcttacattggtgccggggttgaagacaccagtgccttgttgatctgtctgttcagggaatccaaaagcccattgatctcttttcactagacatttccttgcacagacggggctactgggtgtgtatgtgagtttccactctgccctacaaggggtcacgtttatacagctgtgaccttgtcctgaggacagacacattgtgattttgggaagggtcatctctctattatatcctgctttctgacaatccaggaaataccactggcatcttgctgtaattgggatgcttctgaaaatggaaagtgagattcacataagcttttgcagtttataggcgtgttctattgaccacttagacagcccctacaagtgatgaaagctttaaacatcctctcccaccgccaagttattctgatctgggacaaggtctggaagagctcttgctgttgaaggatttccatcagcctgagtagttctccaatgacatctggatctctgttcattttaatgacatatatgggaaaagtcatttttaaccttttgcctactccacacttgttctactccacacttagactgtgtcagaagtcttaaggcatataaaataaaatggcagggtcccgccgggtagctcagcaggcaaaggtgcttgttaccaacaagatgccagcttgataaacttgagcttcagcctcagaggctacgtaagtgcagaaagagaaagtttatccacagagttgtcctctgacctctacatacctgctatgtatgatatccatattgtgagggttgagtacacacacacaccaaaccttttaacaaattctaattaatgtgaactgagttattttacatgctatttgtactagaatctctatttaagtctcacaaatagaacttttcaattaaactgaagacaaaatattatgaaggctttggcgtgacccagagtagcagacatcttggttcctttgggaggtctggttcgtgctctgaggccagtgtggcctaccacggggctaggccataaaatggatttagcaagccccaaaacttgactagacgtcagaattggccccaggtgactaaaagcaattcagtcaattacccgatttcttcaggcagaaccttggaaggactggcatcgaggaaacagatgtggaaagcccaaagcgagcatatgtgttaggaagtcagcatattgtcaaatagtgtaaactagatctaagatttcacaacagttttccaacttaacttgcttgcccctaaagtgaagcaagcactgcttcatggcacagaagcctccatgggctgcaggctaccttctcagcaatagtctcacttcccagtcccagggatgtggattctggtacactgattcctgtgccagatgcagcgccaagctcttccttnnnnnnnnnnnnnnnnnnnnttccctccctccctccctccctccctcccgtgaccatccctgctaccttggacatgagagcagtgtgtacccagtgtgactcagagtgtgtcacaagtgcagagctgaacagagtggcacaggcagagccaggttctgagtcttcagcatcttgctaaaggctctaaactgctcaagagtgaagatgggttgctcaaaccgagcgcagcatttccagcgttagaagagtgcttagctcagcagagctttcagaaaggttgactcgggaaggagtaatgagagtttactgtagagtcaggacataaaccaggactcacctgggcgatggctcactggtaaagtgctcgccatgcaactatggtgtcccgagtttggggaattttgtaagaaaaaactgggtgtggcagctcagtgccttgggggaataaacagggtggtccctgggacctgctggtcagccagtctagcagaaacggtaaatcctaggttcagtgactctgtctcaaaatactgaggtagagattaattaaggaaaataactaatgcctacctgttgtacacacagttgtgtgcttgtgtacacacaccgacaccccaccatgtatgtacttttgaaatcccgtggtctatcatgctttacttaacatgaaagacaatcacatttcacttccctcttcctgagtgcacagctcctgcaagccactgtcatgttccaggatcctgctgaatcatcatgaccatcgtggagcacacgtatgggttacattcctcctgagtgaaagcctaagagtgtagggtcggtcggtcttctcggagtgataagaggctgccaagctgtgtatcccagcgttcctgccccatgtacaccaggcctaagaaagctcaagttaggaaagtgagctataaagagattaaatctgctttccctctgcatttgatcagctaagagtccttgagaagattttgctgttttctgtctctttccagagggctcgctgagtgctcgtcagtggggagcctctcttgaagcacagtgggactgcagtctcagcacttgaacttgcccatgttcttgcatgttgaccagaatccaggtgcaaaagcacaagttacagaaagagatctgcagagtgggttttttggtgggcacgctctcatttaggttcccatgtgacctgcacacttgctgacaaaattaattatgaagtttatgtgtgttttttttaaaaacagtcttatgatagatcctttatttaaaacattattggagatagacggccaatctgttgatcctggatgttctcagcctctaaaattacttcagcaagactccaagtctctctacagagttctttctagagctagggttcagctgtgtgattggcctagtgcctctaatccaaactaaggagtttttctctgtgcctggcatttctctttcttaccacccccccccccccatatcttgactgtctttatacagtagaaaataacacaagagaagcaggagctgccatcaaaactatattttaacatggcttgaaaacctagcactcaggagaacaaggcaagaggattatgagttcaaggccagcctgggttatataccaagacccctgtctgaaagaaacaaaagtatataataaagtttaagattacatttaaaaaaatagagctaactccatacaagtcccaaaatgtaaaactaatttagttcctaacttgtaaaatttggaatatcaagcttttatgtcatgtatattggattttgctatacatattacagctatatgtatatatatgtatacacacacacacacacacacacacatatacacaaatacgtcaaagtaagagtagaaaaggaatgtgacagaaatgaaaaagagtgccctctcaacactgaagtttatcagcacatgcaactgtttattttcatttatttgtttgtttattcagtttgtttgaaatagggtttctctgtaaaagaaccctggctatcttggcacttgctctataggcctgggcagccttaaactcatagatccaccagcctctgcctctctgcctctgcctcgattcatactgggaataaaaggcatgggctttttacttatttttttataatttagatttttttttaaagtagaaatttgctattgctatgtaataaatggaaatttagaagctaccagctcagaagactgtaaggaactaaggaaacatctgtgtgtctcccagtttaaacaaaacatctaattagctacttgagtattcagtactggttagttagtttctgggtgtctcctcgttgctgttgaacttgcccctggccagtgggataatccattagttaagcacactgggagttaagattgctcttttccccagcgctgtgaataagtaagggcatttgtgccagctgactgcattcttgaattgtgagagaaacaccaagcattacactgcacccagattagatcatgacagatttggcagggatgagaagattccttgaatggtgtttgcagtttacccaaagtccttgggccctttgctttcataaaggattacaatcgacatccagggagaccgtccttaatgatgcgattagcagtttgcaacatgttttcctttgtgttctcatgtgattgaatactcccagtagcaccttggggaaatacgttagctctcacagagcccggagacggaattcagtgaagtaattgtcttccacttcagcactctacaaaagtaaagtctcaaaaatatcgtgagactcacataactacatttcctagtagccatactttaaagagcaaaagcacactggtaatgctgatttcctgtatatggtactggggactaaactaagggtgtcctacatgcttgctaatgctcgccgttgaggtgcacccccagccctggtagtagtaacagtttatttaactcatttctgaaaaaatcatttcagaatgatcagtattttaaaatactaatgatttattttatattcccttttaaataaatcttgcaaatctctaaaacctacccttcagaacatctcagtttctattcagatacagaaagagcctcttggtgacattctggaagtcacgcactgggctggggaagcttggttatggaggccagcactccctgaccacctcatgtgactttctcacatgtgagcagagctggctggcagactgagctgaagatctcatgggtggcaaatgacacatgacactaaacccaagtttgctggacacacccagcatgctcagtgaaacatgtctttactcagagttagacactttttaaaaacttttgagtctttgtgaatttcatatcgtgagccccaatcccttcatctctgctctccacccttgcaactccctccttcaaaagaaaacaaaaaacaaaaatgaaagatgaaaaaaaaaaaagctctcacagcatgtcgtggtgtgtgtatcacacagtagggcctctgcctgaacagcttgacttgtaaatgttcactgcactgagatcagttccaggcctctggctgtctgctgcagtgtcaatactggctcctcactagactcctctgagatatcctgttgttgccctgtgtcacggagaccctgcagctttggatccagaggactggcccattaacacgccccagcaggtcatggatggggaagatgctggagtggacctggatcttgggcatcaacatggcctcaggtgttagtccagaccatggacttccccatggcctttgctgtagggtcgcagacccagacatggccctagatggcagcatggacagaacatccccatgacctcagatggcacaggcctctcacgtcagacggtcgtcaccaccctcgactcttaggtctgcctctcttcatagagctcaagccattctgcttctctttttcccctgtctctccaccacacactcctagtggtccacccacgagattctggctttcttctgccagccatcactgcagagcggcaggtgggcctccctcgacacaagtgtgtgcgcgagcatgcgtgtgcaggtgtgcccctgtgtgcccaagtgtatgtgtggtttgtgaggaaactctgaaggtgtggctagcctagcagtatgaggcattgtggctaagggaggagtactgtagaatgctctgaggctttgtggctaagggaagagtactgtagaatgctctgtggacttggagtaaacttaaacgttaagaaacgagtgacttccaactcaattcttcatagacttagaaatatcaactctcaaattcattaggaataacaaacccaagatatcaaaaactattctcaataataaaagaaattctggaggaatcaccatccctgacctcaagctacactttagagcaattgtgacaaaaacaaaacaaaacaaaacaaaacaaaacaaaacaaaacaaaactgcatggtattggtacagagacaggcaagtatgtcaatggaatagaattgaagacccaaaaatgaatccacacacctatggtcacttgatctttaataaaggagctgaaaccatccagtggaaaaaagacagcattttcaacaaatggtgctggttcaactggcggtcaacatatagaagaatgcaaattgatccattcttatctccctgtacaaagctcaagaccaagtgaatcaaggactgccacataaaaccagatacactgaatctagtagaagagaaaatggggaagagcctcgagcacatgggcacaggggaaaatttatgctctaagatcaggaattgacaaatgggacctcataaaattgcaaagcttctgtaaggcaaaggacactgtcaatagaacaaaaaggccaccaacagattgggaaaagatctttaccaatcctacatccgatagagggctagtatccaatatatacaaagaactcaggaagttagactccagaaaaccaaaccctattcaaaaatgggatacagaattaaacaacgacttctcaactgaggaaactagaatgactgagaagcacctaaagaaacattcaacatccttagtcatcagggaaatgcaaatcaaagtgaacctgagtttccacctcacagcagtaagaatggctaagatcaaaaattcaggtgacagcagatgctggcaaggatgtggagaaggaggaacactcctccattgttggtgggattgcaagcttgtacaaccactctggaagtcagtttggcagttcctcagaaaattggacataatactaccagaagatccagcaatacctgtcctgggcatatacccagaagatgctccaacatgtaatagggatacatgctccattatgttcatagcagccttatttataatagccagaagatggaaagaacccagatgtccctcaacagaggaatgtatacagaaaatgtggtacatttacacaatggaatactactcagcattaaaaacaatgaattcatgaaattcttaggcaaatggatggaagtagaaaatatcatcctgagtgaggtagcccaatcacaaagaacacacacccaatgataagtggatattagcccaaaagttcagaatacccaagatacaattcacaggccatatgaagctcaagaagaaggaagaccaaagtgtggatgcttcagtgcttcttagaagggggaacaaaatacaggaggaaatatggagacaaagtgtggaattcagacactgccccacctatggatccatcctatatacagttgccaaaccaggatgctattgtgaatgctgggaagtgtttgctgatggaaacctgatatggctgtctcttgagagactctgccagagcctatcaaatacagagggggatgctcacagccaaccattggactgaaggagctgagggggtttgcagcttcatgggagaagcaacagtgtcaaccagccagatcccctagagctcccagggactggaccaccaaccaaagagtccaatggagggacccatgactcaggctgcatatgtggcggaggacagccttgttggaatcagtgggaggagaggcccttgagcatgagcggattcaatgccccactggagggtgatgccaaggctggaaggtgggagtgagtggatgggcgggtgagcaccctcatagaagcagggggagggagcatgggatgggggtttccagaggggagacctggaaagtgtataacatttgaaatgtaagaaaacatccaataaagggggggagggggaaggagtaacaagcatgaatcagaggagatgtgatagtggtcatagtgtgtggtcatttgcccttaacaattgagttcttgtataacttggttaggtaagcagaaagaaatccatggaagccaggagggaaccaaaacccggatgtgaaaagcagctgtgctcgtgctgtgactgagtgacgtgaagtgaggcgctttgaggaccaatggaaagggactggtacgctaggaccaagtaccttgaaagccaggggaaaaacccctcgccatcgaaaattatcaagcaaaccaagatggctgctgtttgttgaggggaggatgggaggaacgcactgctttcagggtggtttggaaagaggagacgttgacgttggagaaatggacaaatctacgacatgcagggaaactcagaaaaatagacacccctgccatgcccatagcttagctgagggccactctgggtggggtggtggtgcacatacaaccaggacataactaattttaaatatttacacccccaaattgaaaaataaaaaattttaaaatgaacgataatttctgtaaaatctatgctttgaatagagtacataagaaaacctaccaagacattgtgacaaattgctcattttcctaacttagatgatctacccacattgccatgggactaaagtgtttgtgacacatttaaaatattcactttaaaaccatgctgtcaaattgagtgacttgtttccttcatttttaaaaacatgtaatcatttttatcttatgtgtgtaagtggcatttttgcccatgtatatgtttgtgtaccatgtgaatgcagtgcctgttgaggtcgtgagagggtaccgtatcccctggagctggagatgattctgagcctgtgtcagtgctgtgaacttggttccgctggaagaatggcacgtgctcttaactgccgagccatctctccagccctgattgcttcattttgtaatttaagatacctggaagcttgaattctagctaattttgttcagtattacactatacatttagattttattactcatctttattattactaactccaaggtaacatttcctgatctgtatgaaatctctctcccattcttctggctgagtaactagcctttgagttggtgtttgggagtaatggtagtattagtgagttcaggaagtgttggaaaatattctccgtgacctgcacacctttctataggatatgtttgagtgccctcacaacatagaatttagtttcccacggagctaagccccacctgttttctaaagtctgacgatgagaagcagcactctgacatggtgggcttgcaaattcgccattctccgtagaaagtatttgtttctgcacatacagggttttgacattctgctgtgagaagctaaagtaatgatattttgagtagattggccgatctttgttacttcattttaaaaataaaggtttctacctgggtatggtggcacgcacctgtaatacaaggacttaggagcagaaggatcaggagttcaaggccatcctaagctacatactgagtttaaggccatcctgaactatatgagaccctggctttataaatagacaccaaacaaataaaaatattgatcattcctctattatgggagtggttttgtagtaacaatgagatcagactcttagcagatggtcttctgtatttattctctgaggtgactaattccacattagctaataaaacaataggacttcttggaaaggtcacaggttagaccaaacgtcccaccaggaatattaaagactggatgaagtatgaggcttaaaggcattagatagcaatacaaccacattatgcgacacatgggccacttcccttagaatatgtaatacctaggccaaggaacttgataggactttcaacagccctgggaaccaagagaaaccaacttacagccccaaatacagcagagtcagggagaagacagcaaacagtccacactgtggctgaggtgatgctggtggttaccgtggctgaggtgatgctgggtggctaccgtggctgaggtgatgctgggtggctaccatggctgaggtgatgctgggtggctgctgtggctgaggtgatgctggtggctacagtggctgaggtgatgctgggtggctacagtggctgaggtgatgctgggtggctgctgtggcagagatgatgctgggtgcctatcaccggtgagagaatgagctcttgccacggacaggcctcagttgggcctctctcaatctgcgggagaactctgggttctggacaggtgggcagtggagttggtgatgaaaagggggtgacaaacagacacgacacaaaggagtgtggatctgaatgtaatttgtctcaaagctagcaccagtcttataagtgacttttttacaaaaccgaggaatgcatactaaaagctaacaggaatcaactgggataaaaatcaatgttaacaactgggattaaagcagccccacctaaggtcagtttaatcttagaagtcaggggcaagggcattatgcccttgctatagttccaattctagtctatctagtccaccttccccctaggccattgtaaattcctgtgtctgggtataactctgctatctatagttcaaatatctgctctggttccttcttagaccacaacaattcttcttcttagataatggtaaattcctgcgtatgggagtagcttgccctgagatttctgactcttaatggtagatggtaatgcctgatttctttaactatctctcttacaatactagaggcaaatctgaatgtcactgaataggcaacattcttactgaattcaaagcccatggtcagctcaaggactgcctaggactgctgaggaatgtaacttagccatatgtcaaaatcaatcccttagaggcatttataataaagcaatattaagggaaagcacacagatccatttactaactaaagcaaggacagatttggagcattcattattacaggatgccacagttccaggagactaagtttctgtgaactttttgcctcgggaccacgtccaggcttttcagcctgtcacacgggtcactactggagtagatgtagcaagctctcagtagccatggtagcctggagttcaacttcaagtcatctttaacacacagtagccatctagcatcatctcagccatattaaaaccctggaccactggattttaaacctgtcagttcaagaaagagcaagtcatcagaatttcaattttttgtttctttttgagattaaaatgtaattacatcatttttcccatccctttcctacctccagaccctcccacccaaccctccttactctctttcaagtccatagcctctcctctttaattaattgttgttacatgcatatatctcaatctataagttacctatatgtatcttttcaaggctaaccatttggtgtgcttttccctgggaagcctagttcttctctctcagaattcctagttgcctggagtttttgttagtattgaggcattgtgggcataattattttaaagatttccacattcatgatctatacccagctaataaccaagatcacgaagaaaacagaataaaatggaagggggtgttgggaattataggtaataggaatataactttctatattagaaaaattgagtttcatatcatatatgaggcagatgttttaaaaattagtacttactctaagatattttggaagactggacatttacaagtgaattggcagctgttagaatgagctccctagaagctaaagaacagagaggaaaccttactgggagaggcagggcgctgcatcttcctgtggcagatgacccgccacagttaccatcccacacacccatgtccccttgagtcaggaaatcacatgtttggtgtgtttcgttccttctggaggtctctctaagcttcagtcacagctgagcagaagacagctagcaaaaggaagcccctgcatggatgtcaggctggttcctggcagtggcagcttctcagggacgctggcacaggcttgcatcctggtgccacctcagcacaggcccagtgtaatgaggctaagcaacatgagctgcagccttccacagagatgtttgctctctatgagctgattgtcgtcaggattgtattgtaatgactcaaagactaactggcctcgtgaaaatattttaagggtcttaaaagtcccttctagtcgtcaaattatggtgctttttgtttcttcagagtttactcagaacttgagcatgtgagatactgatgtcacactttgtttcccaatctgtaacaaatgttacagatttgctggagtcggcatcaatggcctttggaggatgtgcagcctggtaaagtggagaaggagctattctcactgttagaggaactcagccgtgtcactgctggtggtggtctctgttgcatcccaggcactaagtccatggccatttgctaagattgttcagcttagcagcatgaggggagacggagctgtgcggcttacaaaccacattttctggatgctcatctgcctctgcctttaacaataagaagaaatcatttcacaggaattataccttttaatctagttccttgccatgtgactggagtttggcacttctttcttggtaccactatagcctatcttctggtgtagtctgcacctaacctagcatttgtgtcttgtcagtttgtttggtgcgtgtgagaactgggtatgtaagctggacatggggacatgctataatctcagcactctagctcaagggcagccagacctttgtgacaggactctcttgaaaaacaccgagagctggatgggatcaagatgtttcctaggttaagagccatactatccttacagaaaaactgaggccggtccccagcacctgtatcaagtggctcagaatcacccataactccaaagccacaggattcaatgtgtctatgggtacctaaatgccccatacacataaagacacataatttaaaaaattctcaaaaatggttagaaaaaggaaaacaattgagactgagaatatagcttagccatagggcatttgcctaccgtgtgactctctggacttgatcgccattattgaaaatatataaactgaaccttttattgagagatagcaagcactggaactataatgattctattctcctgcatgttcccatcacaggatgagaagtaagagaaccaagcaatcttggactacatatctagcctcagcctgtccctgtctgggggcttctctgtggtgaggccaatcaaaaatctggtcttgactgggcgccagcctttgtggcgcacgcctttaatcccagcactcgggaggcaaaggcaggtggatctctgagagtatgaggccaacctgttctacaaagtgagttccaggacagccagagctacacagagaaaccctgtctcaatgaatgagtgaatgaatgatgaggtctgtccctggttcatgagggttccagaagcaatcaaatactattctccatgggtaagattttattataccagacacctttaatgaaatctcacatgtggaggacagtctgtctccaaatggtattcctcagagcctggatcatgcacttctgaccataaacaccagagctgagtcgttggaaagggctcagctgcttataccacactgtacacccctagcttgttaccaggactgtatctaacatgctccagagagaggctcaggagagcgcggctgtgctgggcagtcttcaggataaacagagcgttggctcctactggctacagtgagtctgctgtatcctgtgtgagttgggggtgctaggttcagaggcaggcaagagtttgaggccccagttcctgctccatccaggctccccatgcagcacacactaggtcagaactgttcactctctgaagtgtctcggggtgtcatgaggatgtatcatccatcacccatttgcctgaagctgcccgacttctgagcttgtgcccactacttacttgtgtccatcctttctttccctttgttcagtctctctctccttttcgtaaaagccctggtcccagagctgagtttgacaaaggccatttgaaactatagggcgagaatgttggaaactgcgggcagttcattttggccccttgtctttcttcaagtgtatcacaaggtggtttctgttcatgcaaaggaggatgaaggaaggtcttactccgtagtgggccgtgggcctgctatgtttgtatgctctcattgactaatgtctgtatccctttgttatttctacttctttgatgagaacgctgagattccagatgattaataccatctccaacattataaagtagtcatagggcaggtatagtggcacatgcctgtatcagccatggggtggatctggaggcaaagttcagctaaatagtgagatgctgtttcaaaaaaccagggctgaggatataggtcactaacataacatttgtctggtatttgtagaaccctcagttcattgcccagtatcaaaagaaaaaaaataccctaaacttagaaacatgacaactccagacctgttgtttcccaaagctctgcatactttaccacagcaagctgcttcagagataagctgccttgggggcagaccggactccccaggcagcctgggccttttaggcagttgcttctttgatttttgttttgttttaagacaaggtcccactatgtattctgttctgatatggaactcaaagagatccacctgcctctgactcccaatagtggagttaaaactgtataccaccatgctcagcttggttgattctgtctgtaagctagggtaattggtaactacatttatcctgtcaaatggttgcagcgtacagcatccctggctcatagtcagccttaggaactgtgctctcacccttacgcacccattctccctggcacggggagacacaccaggcgcaaagtgttctcactttcatgatcagatggctcttttttgtattttatttgtgagacaggatcttcttactctatagccaagatggcctccaatttgaagcaatgctcctgcctcaagctcctccaatgttggaataactgacaaatgccactatatctagcttcattcctgttatttgggttgtcaataaacagagccatgtggcccacagaagactgtgatatactggtccacagctgtgagctgtcagcaagggagactggctttgtgctagtgtcccgtctgtaaggtatgggcaggtatggaaaggcccgcgctacagtgtcccgtctgtaagatatggacaggtatggaaagacccgtgctacagtgtcccgtctgtaaggtatgggcaggtatggaaaggcccgtgctacagtgtcccgtctgtaaggtatgggcaggtatggaaaggcccgtgctacagtgtcccgtctgtaaggtatggacaggtatggaaaggcccgttctccttctttgcctaagcaaaggattaagttagataatagatgtttagcatttcgcacagctcccagcttaaagcaaatgctacatgagcgccatggacgacttccgtccccagaacactagaaactgggaacactaaagaggtggaggcaggaggatttcaaggtcatctgctgccacatagaaagtttgaagccggcattgggttcacagagacccctgtccccacacagaggagatgtacgtaaataatgatcagtactggttcttgatactatggtgtggtaatgttttatactcttggcataaaagtctttgaagaacactgtacttggactttttagcctgtaagtacagcatttgtgagttgcttactgataggctgggagctgatagtaaggcaggcgatgtattatgcatcccacagcacactgaaataaaatgccatttccttaggaacagctagaaatactggtgctaatttttcctgtgctcaggaaaagcaagcacgctgcgcgcagctgcagtaggctagagagccctccagaaacatgatgtcatcctaatctgtgccgccaagggatgagctcatccaggcggggcctctcggggctgcagctgtgccagctcctgacttgtgatgctcctcttacaggcttgctcaccctccctcccctaccctcccctacaccacccctgcctgctgtgccaaagagacactgaaggatgaattatttaagacccaaggtgaactcctgccaaagataaccaggcttcagaaagcactcaaaaaggaaaatagaactgcatgggcttttttttttaattagatattttctttatttacatttcaaatgttatcccctttcctagtttcccctctgaaaatcccgttcccccctcccccttctccccaacccacccactcggttcctggtcctggcattcccctatattggggtatagagccttcgcaggacaaagggccactcactcctctcattgatggtcttataaaggaaagaactaagcagtttgtagaactgtcgtcagtgagaggacaatggtgttggttctctctgcctctgcttgctctaggagcagtctgtccctcttctacttaaataatggctgaatctgtgaccgagttcagtgctggaactgagcccgcacagacctgaccctgagccccatggctgtggcagtgacagccaagcagcttcctacacttttcccattgtacactgcggtgaccttgatttatgcgccagtcgtcctacatgtcagcagtgtaggtcaccatgggagcaggtactctatgtgaccatggaaactgtcacctctgcagaccttagtttctctatctataaagtagggtaatgcagccaagcctagatctggaggtgactgagcaggaagtgaagactgggtggctgtcactgagcatggtgcccggcccacaccctgtcctgaagcaaccagtgctcattaatccaatacccatattctcaactgctgggggcgggtgggggagggcattaaaaggagtgtgtaaagctgtcatattgtatatttctgagaaaattatttacacataatgttgaatgtttaggatggcgtcatatcattctgtggcacacagggtcattcagaagccagcctttctgatagagctttctggttcctctcctgacagtgtctcctgtaacaacagttccccctccccataaaaaagtctgttttgttttagatttcgtggaaatgttgagtagccgcagagggaactcccacacctaccgtccctctgcagcagcagcagcagcttctggcagattttcatctgcttcccttttttaagtgcagtattttaagagcagattccagacattatatcattgttctcataatacttgagtgtgttctaccaaaggaaaagcaggcttagccacggctgtgatgatcccccctgcactggaataggtgcctagtttttggtttttttgttttgttttgctttcatttttatttctgtacttttccaagacagggtttctctgtttagccctggctgtcccagagctcccttgtataccaggctggcctcaaacttacagaaatcctcctgtctttgcctctgccctctgccctccgcacccccgagtgccgagattgaaggtgtggactaccattgcctgctcagtattttctgttctgatgattctctagcaccgaaatgaatctacactgtcaccttttatgataagccattgaaatgggttcctactatcatccaataactccacagatactaaaatggggtcaaattattatctactgttttcttccatcttcaaacatttccagttgctcgaactgtcttttaatgacttttttcaaaataatcacagaaaatattcctcggtgcttaaacttttatcatttgaatttttgtttttttcagagctgattgtcaaactgattaaaatatgcttttatttatataaaattgctaatttgcttttgtcattgcttatttgaatgattgttttaaagcaaaaagcttgaataagcaataatgatgttcatttttaaccagtagttttatatctatactttagacggctggtatttaatgttctttttgtacgaacataagtttaaaatcttatttaaatcaacagattttatataaacaagatgataattcattgacttgtttcttggtatatttgttaacttatttttatcttacacttacagattgaaaaatcacaattttggaactttttctagaaaaaatgattactatgtcattgccaagagttatctttgtttaagtgtaaacacttaatttaatttttagaaatatatttctttattcttaaagggatacttctgtaaggctccagatgtagccacaactgctatgatcagaattaacagcaagctcccagaaagacaggtgttagtgctatgaaactgtattcacaccctctgcaaatgacactgcctctttaattgttgaatgtttaggatggcgtcatagcattgtgtggcacacagggtcattcagaaggcagcctttctgatagagctttctggttcctctcctgacagtgtctcctgtaacgacagccccctccccatgcacctgccccttctgccccttggcgccttgttcttgtcttccagctgttctgtacacttaaagtgctgttgctaaatttgtaaataaaattgcagaaggcatccaggcatggcgccacatatctctaatctcggggcttgggaggtagagggaggggcatcaggagctcagcacacctgtgcatatgtgtgcacatacacacacacacacacacacacacacacacacacacacatgacagggttatgtatgaatttcccataaacagtgactctgacttggctcaatggttatctttaaagcccttggctttctttccaccattcctgtaaaaacggtatatgaactgcatggactatcacgtaagctctgcgtccatcaaccccaggtctttccatttcaggtaagttacgtgatgtcctgaggttataccgttagttatgtgagaccagaccacagatggcgagcagatgcaggttggagtggaccctcttctttctcattgcttagtaacttgccagccacaactcccaactcgtctcctaagaacccattgacaaaccctgttaaacaacaactaagtagctgagatccgcggtagcaacgcagaaaatactctttagaaagataggtgggaacaggaatcccccggccctgcgtgacaagccccaaccctgctgttcaccagaagaaaacacttttgtcctagctccttttggttaattgacctgtgtcacatttgaaaagcatagcctgccattatcagcctagtgactaatagttatttgcgcagtactccatggttattgttactttgattttcctggaagcttttcaggaagcttgtcagcccacgtcgaggccctggcaggaagcacaggaagtagacgtggataatcatgccatcactgactaatgactcccactggggattttacacctcagtcaattattacctaattacaaccagcaaaaatacatactgtgttcatgccatgcaagaaggtactgagttactgcaggacaaagatgtaaacagtgtgtctctacccaccagtaacttacagttggcgaagcaaactagtcatgtgcaagggaagccctggaagctccagcacaaaactgcacgagcttccactggttagccgtgtgcacagtagtgctcggactcaacgccccaaacttagtgaattaaaacaagacttgtgtgtccccttcattctcatgcaggctagctataggtcagctgatctaggctggacctggcaggtctataggaggctgggttcaggtttctgtcatatgagtggcatgtgcctgggatcaagtgagtgtgtgttctctcataatggtacagaaatgcaggacagacaaacacaactgctgtgttccccacggcctgaactgaacacagaacagctgctgcctggtggcagatacctaggttcagtgattagatcaatttaaactgtcaagggcaatggctgcatggtaagaatgatcctcagacgctgaaattccaactgatgatggtcatggacacagagcgagacgctagtgatatcaccagacctccaagtgttgggaggtgtaatatagacattcatcctttctgatgggacaatctggtagcttgtggggaacatgggatttgagataaccttgaatgaccaaaataaaacaagctgaggttttgtttccattagagcaaatggtactttcatgaggtaatggaaggtccccttagggtttgagtgactgagggcctcaaactagggatctttggaagatgaaagcaaaggccaggaaggaccatgctagcagtttgagagtttgtccaatgctttgacactatcatagaaaatgtacatacacacaaaaccccactggcaaatgagaggaaacagtttgtgaacacctttgtatgctacactcagggttagacttcatttctttggtaatatagagtcatcgaagacttctggcttagaaatgatgaaaatggagtcttagcactgtctcagaagagacagcttgaagggttaagaggtaaaacattaggaagcaaaaaggtgtctaggcaaccattagctattgcagtaggaaggcctcactgaaaaaaggaccacaggaagcagggaaaatgtaaaagacagttcaggttagcaaagaggaaagaggagagcccagggaaactgagtacgttgtcaggcgatgatggccaaagaagtgggcatccctgttttcagttatagttgataaagttgagttatagcacaagtgggaagcctaaaccttactccagccttgtgcagtgtgaacattctgttcccttcaccctgctcaggagaactctcacaagtgggaccctgttcactgtgcccttggtgcctaggagaaatctttcacactagacataaatgtgtagagaaatcttgtgagacttgcacgtgtgtgtgtgtgtgtattcctcctgtgtcataaagcagccttgcagagctgagcgagttctcgcaacaactgcagaatggtacatagatgtcattgaactctaaacagttccggcacaggcttccctgctaagaaccttctccattagctaatgtgtcagaaaggctttaaataccggcacgattttaggagtccagagtgtccttgcagttcagaaacggagtactttgtgtgataacgtttaagcagtatattcattggcctttcttagttttcactaaggcagatgaaccaaatgagcagatgctgctgatggagagctagtaactgatcttgccagttgtcacttagggacagttctgccgtcacacatcttccatgtggaagctaaaattaagccactctggtacattaaggctgataaacacagcgtgaacagattcctgagttgttatttcagactctgggaatattctgtatcccaaggatagaaaatagagaccagtgccccaaatctggctgtttggtttgaaattgctagactatgaataaatgagcaaatatctccaatcactttggaagatgtctctggggcatatgtttgacatgtatgcaaacactctgcccattggtcgtatctgaacctgagaccataggttcctgggcactctgctgtaagttttaggaaagaagggggtcttcctggatgttgcctgcactatgtgcagctcaaggaagatgtctttttgagtgactaaggttcctttcctaggcatccatttctttgcatggttcctgctgccttgaaccctcataatgagaaaaaggtgcatttgagcacaggcacttgagagagagagagggagagcgagaggaagagcgagagcgagagggagagcgatctctgctcaggagagcaccaggaccttaaagcccttctttctgtacttagacttacaccaggtggcatgacatggcctaatactcctcaccacagcagcaatagtgaagcatggaagtggacctcacagagagccccttcccagtctggtcagggtcacttagagtagttccagtcagaaactctggggagcttttgaaacctcaatgacccagctcagtcccaaagactcatacttaacgggtctcacctggtaggtgtcttgccatacagatgatagctttgactagtgataaagactcaacaatcttacaggccagacactggatggtagatctgggagcacctggtcccacacttctgtgggcctcactcccctctgttactccatgtcattaaagcagaaatggcaaagtacagtccggggaggttcaaagcacgcactcagattctaacagcaagttaacccgtgtgtgcagtcattgctgagaatgctgcctcagaacatctcattcgaaggctcctgtcttagtcagggtttctattcctgcacaaacatcatgaccaagaagcaagttggggaggaaagggtttattcagcttacacttccatactgctgttcatcaccaaggaaaggaagtcaggactggaactcaagcaggtcagaaagcaggagctgatgcagaggccatggagggatgttctttactggtttgcctcccctggcttgctcagcctgctctcttatagaatccaagactaccagcccagggatggtcccacccacaaggggcctttccgccttgatcactaattgagaaaatgccttacagctggatctcatggaggcatttccccaactgaagctcctttctctgtgataactccagctgtgtcaagttgacacaaaactaggcagtacagctcccatcacaagccagtcttgagtgagaaaaagaataagatggtgactttcgggaactgtgaaaacatccaccccaggtcctctagctgggaacaagggagagaagagtgtaatactcatcttgtgtaggcttaagacattactagtgatcccagagtgtgtgagctgattcagtagtaaggtacttgttgctcagcctgatgacctgagtttgagtcccagaacccacatggtcaaaggagagaacagacaatctgtattgagctccatacgcatggcttctctcttaaaaacgagtgatcctagctatatctgctgcttctgcccagtggggtggcacagggatcgaatgatctctttgcaacatcacctcatctctgtctggcagcctcagtacctgaatgcagagtacagttgtttcacttagatcttaatgagtaatttaatttggtgagtcagagttttgatttttacagccatgaaataaaaccagtgttcatccattattcttttcattttagaaatcactattgtttctgtggaatccgttcagctgatgaatattaagcctgacttctgtgggaggcaactagcagaatagaaaggcaattataatagatttttgttgttgttgagcaaaatatttatactgaaatcccagagtccaggcacgctcccccttctccgccacgtcccgccataacctaaagtgggccagtgtgctgccagtgcactcacaagagaatctgtcaatcaggtggaatgtaatgatcacaaggaaaacttaaagttttggaggaatgggttttttgaagactactccacatgtgaatatgtgaagttaggaaaagctcagtggacacgcagtgagttggctagaggggctccttagggcagctgtgaatcaggtttgtgcagaggtaccccaaagtcatagcacttattaatgttacctgagagccttagtcagtgacttattgagagtgaaagaattacagcaagatcaaacaacaaccacaaaaacctcagcttggtacctcaggatatcatgccttctggataactcacactctgtctctctgcctctgtctgtctgtctgcctatctatctccccccttctctctctctctctctctctctctctctctctcacacacacacacacacacacatcctataagagaaataaggttgtagagagtgtggaatttgcatccatttgcctgttcattacccaaactcttattggatccccatgtcagccactggtttgggctctagagacaggactgttctcgtccacataaatgtgttttcttcttgggtgatacaggttcaaggaaagaattttcttctggaacattcaaataatcaaacatttacctcatctggctgatcgaacattctgcagacattgattcttaaagagggaacaagctggatataactggctgctcttgaacactgtggtcccacactctgagatgtggtcccatgctctgacagtgtcccacactccagcagctagcgttagttacatgggggaaagtcacagcaacgttaggcggtcctctttttaacctgtgttcttatctgagtcttagagaattttgcacattgtgttatgttcatatttatccataactcctccaggctcaccctgctactggtattcttttaaaagaatgactcattgagccctatttgtgctgcctttgactggcagcaggcctcattagtgtaacaaatggtcagttggagtttgtcatgtgtcttagcctgtgttttgttgccgtgtagagacgtgaccacagcaactcttataaagaaaagcatttcattgggcctggcttacagtttcacaatgttcgtccattttcatcatggcagatggtagctgagagttctacatcatgatccacagactgcaagagagaaagagagagtcaccatgcctggcttgggcttctgaaacctaaagccacttccctaatgacactcttcctccaacaaggccacacttcctaatccttctaaataatgccacaccctgatgactaagcattcaaatatatgagtctatggggaacatttttatgcagactgctacttcatgcctttccctaaagccccagaaccagacagctattgggtgagacccacagacatcacagagtacatccctctcagcaggactaaaggagtgacctccttgctgtcagtatcagatttaaggagggcgcctggagtacaggcctcactgaagtaaatcttacacagcgatatgtagacatggcccttatctaaggcgatggtgaagacataaatccatgaagacatgttatgggaatggtactttaacgggactcctgatgcctggcagtttgaaatcatcttgcccatggcttgacttctgtattatctgtcatctctatgtctgcctcacaatggcaggcatgtgacctaattcaccagtttctacttccatagtctgatacaaagttgacttgtatcctgtgactgattgtagtaaccgagaatacagatgatggagtcttggaatgctgtactaaataaacacttctgtactttacaccttccgaaatgaccagacgaaattctgccgcaattaccatctgtacaagggcagaatggatggaaacctgtttaacagtgacacctgtgagtcacttaagggacctagggggaccaaacaaactcagcacgagtcaacagctcagaaagcaaatgtctaaattgttactaggaatgggtcccctgtcacagttcatttcaacaaggaactgtcccttaacaggtgctgtgcaggccgttggagagctataaacaaatgaacaaggtctcctgtatggaactgtacatggatgtaactcaaaatatatcaaatgccgaaatgtaaaggataaaactatccagctcttagagcaaaaggggagtaaatttaatgaccttggatttacttgtggtctcttaaatatggtcttagaagcttaagcaacaatgggaagacaactgaaactttactttattaaagcttaaaattcaatgcagaaaaggacactaccaagaaaataaagaaaataaagacacaaagagtatgtataacatccagaatatttacgacttattaattaaaaaacaatgtaattttaaggaatgagcaaaggacttgagtaacttttctgttaaagataagcaatcagaaatgggactgctgtgaagatgctcagcatcgttagtcatcaggtcagagctgtgactgatggaggaatgatggtgtgactcaaaagatggaccctaacaaacgttggaaagacggggtgcgggactgggcagttggtaagaggtacagctgctgtgggcagtagttgaactcagaattactgtgtgtcccagcagttcgacttacatttgccccacacaaatttctacatgttcataaagtacaagtagacatagctcagatgctccccaccaactcataagtgggcaaataaaatgtggcttgcatatggtgcagctctgtatgtccataatacaagtgaggtacttgcttcagcacagtgaacaccagaaacactgtgttacacgtcagaagctgatcacagattatctcatggtaaaactgcattcatgtgaagcgaccaggctaggcaaatctgtagagaccgtgagtggatggtatcagcagaggctggaggatggacgctctttctgggatgatggcaatgtcttagaagaggtgacagttgcagaacaccgttagtatgctacaagccactgacttctaaagtcattcatgtttgtctgtataaattttacatagctctcaatcaatctgttgttaaaaacttacaccccccatgcacacacaccttgaatagagtctccttcacagtgcctaggtcccgtcagattagtaatcctgggttccattctgcatagaagacagaagtagtttacttcacccatagaagtccagcacaagtttagacatttagactgttgaggtgaaacagtcaaagcacatggggtggttagcccatttgaaaaaggaaagggcttacaggcattctggtctgtcatttcagattggtgcttgctatggaaaaggggtccaaactggtctctgtcttcctagaatataaggaagagactggcatggtgttttaatgcagagaactttcttttctgccccccccccaaacagggtttctctgtgtagttttggctgtcctggaactcactctgtagaccaggctgacctgcctctgcctcccgagtgctgggattaaaggcgtgcgccaccactgccggcttgcagagaactttctaaactggatcatctaagaaaggaggtgcctttcagggaatagtgatgataaagactccgtgaggctggtgacagagagtggaaggctccggtggctttggagccaggccaatcttgatgaccctctcattcatctctcacacatgcctagaccttcaagacacctgtctttcatgacatcgagctttccagcagtaaactacatccggatttttgtcacttaggaagtggctatcacagggaagagttgctgataggaccattactttcactgtctcctcataatctgcatgcatgtttatccgaaatggctatcacacacgaggccagcccatttactttagcagaagtcaccgagtttacatcatgctctagggccttgcccttttagtttgtcctactaagaatggtagtgagtctgctgtgtctgctgttgctatatggctggccatgaccatcagagccatcagaattgtcatcagcatctagtctcccacttcctacttagctgtggtctctgatgtctttcactaggaggctagaacaccgaacagctagtgatttgaattgagatcagaaatgtactaggagccactactaggtgatgtcagagagtgatagcctctgctgaggactggacacctgtcacagagctgtctgaactcacgggcacgagaggcattctttcctgatgcacaccttgatccagcttgctaagggcatgacactggtatccagcttgcatatgccagtctctggaaagaaggtgctctatgctcaggggtcactcacatcgtgtctaacagccacacacttacctaacttgttaacctccttccctaccattctggtaaaagcattgtcttacagtcttgtgctgttgtaacaaaataccacaagctggtggcttaaacagtagacagtcactctcacagttctgcaggctaaagtctaagatcaaagtgttgctgggcttggttcttggtgggatccctctcttgttggcttgcagagggcagctctgcagagcagaaggcagagtctgcatagattctatatcatatagggggctctgctctcatgacctcaccacagacggcttggcttctaaacaccacctccatctacgagagctaactcatgagtcctgaagaggttaatatattcactctatcacaaacagaccctggtgtcaaattgcctgggatggaatnnnnnnnnnnnnnnnnnnnnagactagcagatcaccaggttgttgggcagcatccaacgcaggcatcactttcttccctgggggaaaaagagctgagtgttcaacagttctgatttctgtagtgcctcctgtgagctgtgtcatctacaatagacaagtagatgacttttctctaccatgaaacatgggaaacttaggtgtctaaatagggtttctatgctgtgataaaacaccatgtccaaaaccaacttgaggagaaaagggcttatttcatttaacatatcctgactcataatccatcaagagacgtcaaggcaggaacacaaaccaggaagaaacttgaaggcaggatgtgatgccaaagccatgaagccagctgctcacgggcttaatctccatgccttacttatcttgctttcttacagcacccaggactaccacatcccagggatggtgctagccaccatgggctgggtcttcccatgtcactaattatgaaaatggcccacaggctggctatatcttgatcttatggaggcattttctcaactgaagttccctcctttcatatgaccatagcttgtgtcaacttgacgtaaaaaactagtcatcacactaggcctggttagaagaaaaacaggccaaaacaaaacaaacagaactggtcctcggtgtgtttctcagaaaacccgaggcactgtcccatgtgggaattttttgagctaaggtcccaagatgaaactgaccagcagaaagaatggcccttttagaggacatggaagtgccagccgacatctcttgaattcatagccactgtaccttcatgctttctttgtgcttctggcttcaaggacttggctaagaaggactgctagagctagcccattctggacactgcagggctcctctaactgacaggtcttgctcagtaccccatctgtgtgctcagagattgaactactcagtatgttctccttcccccagcctttctccctgtcttaggtagggtttccattgctgtgaagagacaccatgaccaaggcaactcttataagaaaaacgtataattggggctggcttatagtttcagaggttcagtccattatcatcatggtagaaagcatggttgtgtgcaggcaggcatggtgctggagaaggggctgaaagttctacatcttgatccaaaggcagccaggagattcccttctggaggcatctaggaggaggctctcttctgctctaggcagagcttgtgtagtaagagacctcaaagcctgcctactcagtgatgcccttcccccaacaaggccacacctgccaatagtgctacttcccacgggcccaagcatattcaaaccaccgcactccctatcggtgctnnnnnnnnnnnnnnnnnnnncacaccttgatccagcttgctaagggcatgacactggtatccagcttgcatatgccagtctctggaaagaaggtgctctatgctcaggggtcactcacatcgtgtctaacagccacacacttacctaacttgttaacctccttccctaccattctggtaaaagcattgtcttagagtcttgtgctgttgtaacaaaataccacaagctggtggcttaaacagtagacagtcactctcacagttctgcaggctaaagtctaagatcaaagtgttgctgggcttggttcttggtgggatccctctcttgttggcttgcagagggcagctctgcagggcagaaggcagagtctgcatagattctatatcatatagagggctctgctctcatgacctcaccacagacggcttggcttctaaacaccacctccatctacgagagctaactcatgagtcctgaagaggttaatatattcactctatcacaaacagaccctggtgtcaaattgcctggatggaatcccttggagttagagtgagagtccttgcaagcatgtgtatgagtagcaaggaaacgattcaggtgaggttacgaatgaaaccttcagcacaactttacctggacctgggtcaaaaacttctggagtctcaccaagtggtttagctttcttacacatttaaacacagtaaaacttcggggaaaaaaacaaagttattacaacaaagctttaggcatggccacatcaaaattactttgtaaagtagatctctttagcaaagcacctgtgacgtttcctccaagagtgtgttctcattgatagagaagcagtgttcgggataagggcctagggaggaagagtttgaaagaagcttaagaagagttctgttgactgagaatgcaaagtacttgggacctcttctattgactgagagacaaagctcagaatcagaccctaaacagtgcccaggaccgtggggggttctggtgaatgcctgcttcctagactagcagatcaccaggttgttaggcagcatccatcccagtgttctgggggaaaaagagctgagtgttcaacagttctgatttctgtagtgcctcctgtgagctgtgtcatctacaatagacaagtagatgacttttctctaccatgaaacatgggaaacttaggtgtctaaatagggtttctatgctgtgataaaacaccatgaccaaaaccaacttgaggagaaaagggcttatttcatttaacatatcctgaatcataatccatcaagagacgtcaaggcaggaacacaaaccttaaaggcaggatgtgatgccaaagccatgaagccagctgctcacgggcttaacctccatgctttcttacagcacccaggactaccacagcccagggatggtgctagccaccgtgggctgggtcttcccatgtcactaattatgaaaatggcccacaggctggctatatcttgatcttatggaggcattttctcaactgaagctccctcctttcagatgaccatagcttgtgtcaannnnnnnnnnnnnnnnnnnnagtcactctcacagttctgcaggctaaagtctaagatcaaagtgttgctgggcttggttcttggtgggatccctctcttgttggcttgcagagggcagctctgcagagcagaaggcagagtctgcatagattctatatcatatagggggctctgctctcatgacctcaccacagacggcttggcttctaaacaccacctccatctacgagagctaactcatgagtcctgaagaggttaatatattcactctatcacaaacagaccctggtgtcaaattgcctggatggaatcccttgctcactattcctctctgggctcagtttcctccactttaaaaatgaggccaatactactgttggcctcatgggttctcaacactgatcaagttcatgacccgttggtctccaaggctagctcttcaacttacctaaccaggctggagcagctcaggaaagagaattctgattgccctttgcagtggccctcagagtggtttggagttagagtgagagtccttgcaagcatgtgtatgagtagcaaggaaacgatgaatgacaccttcagcacaactttaccttgacctgggtcaaaaacttctggagtctcaccaagtggtttagctttcttacacatttaaacacagtaaaacttcggggaaaaaacaaagttattacaacaaagctttaggcatggccacatcaaaattacttcctaaagtagatctctttagcaaagcacctgtgacatttcctccaagagtgtgttctcattgatagagaagcagtgttcgggataagggcctagggaggaagagtttgaaagaagcttaagaagagttctgttgactgagaatgcaaagtacttgggacctcttctattgactgagagacaaagctcagaatcagaccctaaacaatgcccaggaccgtggggggttctggtgaacgcctgcttcctagactagcagatcaccaggttgttgggcagcatccaacgcaggcatcatttcttcctgggggaaaaagagctgagnnnnnnnnnnnnnnnnnnnnnnnnnnnnnnnnnnnnnnnnnnnnnnnnnnnnnnnnnnnnnnnnnnnnnnnnnnnnnnnnnnnnnnnnnnnnnnnnnnnnnnnnnnnnnnnnnnnnnnnnnnnnnnnnnnnnnnnnnnnnnnnnnnnnnnnnnnnnnnnnnnnnnnnnnnnnnnnnnnnnnnnnnnnnnnnnnnnnnnnnnnnnnnnnnnnnnnnnnnnnnnnnnnnnnnnnnnnnnnnnnnnnnnnnnncttgtgtcaacttgacgtaaaaaactagtcatcacactaggcctggttagaataaaaaacaggccaaaccaaaaccaaaacaaacagaactggtcctcggtgtgtttctcagaaaagcctaggcactgtcccatgtgggaattttttgagctaaggtcccaagatgaaaccgaccagcagaaagaatggcccttttagaggacatggaagtgccagccgacatctcttgaattcatagccactgtaccttcatgctttctttgtgtttctggcttcaaggacttggctaagaaggactgctagagctagcccattctggacactgcagggctcctctaactgacaggtcttgctcagtaccccatctgtgtgctcagagattgaactactcagtatgttctccttcccccagcctttcccccagcctttctccctggtttccattgctgtgaagagacaccatgaccaaggcaactcttataagaaaaacgtataattggggctggcttatagtttcagaggttcagtccattatcatcatggtagaaagcatggttgtgtgcaggcaggcatggtgctggagaaggggctgaaagttctacatcttgatccaaaggcagccaggagattcccttctggaggcatctaggaggaggctctcttctgctctaggcagagcttgtgtagtaagagacctcaaagcctgcctactcagtgatgcccttcccccaacaaggccacacctgccaatagtgctacttcccacgggccaagcatattcaaaccaccacactccctctcggtgctttgttttgctcccaacccctctgtctttgatgggcattttttttttctcattgaactgagttcatcttggtacttacttcttggagaagtcaaactgacatgcacttttctactgttagacatgtcatctgtgtacctaagaaagcaggtgtgcctcccatctatgtagatgaacctgcatagcaatagcacagcaagtgggaaatgcaaatggagttagtgagaggtcacattcaaagctttgattcttcatggtttaggatcttctgaagtagctcatttcccagtcaagtttcagataaagtggattctacaatttgatgccatatcatgaggtgacagggacactggaagcatgtggaaagcctttgaaaggattgaaaagcagaagactggcaagcaccaagctccatactgatagagacctgtttgcatttcagatacctggaactttctaatggcatagaatggaaagatacatggagtgggtaagctcggcatagttcaggcaacattactccagcaagtgcttctaaactctgcctctgcagtggtgtgagggtctacatgagtgaagatatcagcataagtgcaaactgtggtacctgtgagccatcagctcttcatagtgatgccttttacattagatcagtggtgccccggcgccttcagcttacagccacatctgttgttctcagaggaaataggacacagcagcagtggtgctttcctctccctccgctgtccttcccctggctttagcctgaaccctgtctgtttagcattactaacctgtattcatctacctcttactacagggaactggatatggtccggcccagggccactgggccatgttactgatctactgtgtgtccagccataacctttctgttttgtttctgatggcattagatccttctgcaaccatgtgctctgggaagtcttgcttggtaggcacagctagatgtgcaatggctctgtctttggtggggtgatttcatagcattcaagtggtgctgttctgatcaaatatatagaattgccactttcattgactggggcacatatatttaccatcaaatcgattagctttcaaaaatggctgtatgaattagtgtaaatgtatgttagtaacatggttaaaataaaaatggaaaccccagaaactagacccagcatgagaatcctgcagagccaagcaggacgttctagtgccatatgagaaacactgataactgcatgagttgctaacacaggactttgcatatttgcagtgcaggcaaaatgaggccttgggatttgctaatagcagcttatcttcaaataaaagccataaataagataactcgaacttcaaacctgagacaagaggaccactttttgcactgtttggctatgcctcagtcagggttttaatttctatgataaaatatcatgacccaaatgcaacatggggtggaagagattcatttcagcttccagctcctaggttacacttcatcactaagggaagtcaggactcaaggtaggaagctggaggcaaaggccatggtgtgtgctgcttaccggttttgctcagtcgtcttcctcatagtccagtcctgcctcagtgagctggaccttccttcatcagtcatcaagccagaaggcgcctcacaggcttgcacaggaaccatctggtgaaggcatttttttcacctgaggttccctttgtcaaatgactctagcttacggcatgttgacataaaactactcagcacagactccttggtctcaaactaaagacaaacatttcaagagctggaaagaggttcactcagtagggtgctcgccttgtaagcatgagtttgattcctaggaccatgtaaagcaatgccagctgtggtagccttcacacgaaggccggttgctggggcagaggggagagcatagacgaaggccggttgctggggcagaggggagagcgtagagcttgaaagcccacggctgagacacttgagcgtgtatgggctgtggtcccggggcttgctggccagccaccatagcctgccagcaagctccaggccagcgtgagactatgcctcaagataaggcctgtggctcctgaggagaggcccagcaaagattctcctcctgcctccaaacgtacatagaatacacatgtgtgctctcgcagacatgtgcttgtacacacaaaaagcacatgagaataatcaggttcagcctcatgaatcaacatagaactgtgtagagattattaaattctggcagtttcatagggttcaaccagatagcataaatgaaacatcagtggcagggtatgtgagcacaggaggtgggctgagagtccatcatgcaagcatgctttagtgtcctttggctttcacaccgctgtttgtcatctgatttgaccttctctgggtctcctctccaaatgtttccaccttatgcaagtatacctagtagaccaggatctatctgcataggaggggtgttccgattcgggtgtctgggtgctgacgtgtcaggaagcatgtttgtgctcgtagcccacatgtggcattccactgaggcagactgtggaacgtagttaggctttcttctcaactccactgacagacagacagtgcactaagaagcagacaggactagccactgagtgtatttgctaccttggcccatttagaaaaggagatttaaaacttggttttgagggaagggttttatagtttgaaaggttcccccttttcttctgtctgaagctctattaagccattctattatggtgttatttaacaggtaagctctattacgttccccaaaataaaatgtggctttaaagaataaaaacatgtgtaaatacattatgagaatactattgaaaattattttaaaagtaaatactagctggccaccacctttaaccctggaacttgggaggagaaggcagaggaacagctgtgagtttgaggccagtctggtctgccggggctacatagtgacagcgtgtctcagacaaagggggaacacttaataatgggtagccagcctataacttactctgtttgttgttgacttctttgtttacttaagttttattttgttttttgttttgtttttttgagacagagtttctctgtgtatccctggttgtcctgaaaccctcctaggaccaggctggcatcaaactcactgcctctgtcttctgagttctggggttaaaggcgtggactccagcttgactccaacttttaagtactatgctctcactaatgtagaccaagccacatatatatataataaaaagaaattcttttcattgtaacgtaagtttaaattgataccaaaattaaaaatagaatctgaaataaattctattttagttcacataagtattttaatcacagaaaattctgtctatacctctagttgaaccaagttgtaggcaaggtgagatgacgcgtgcctgtaattctggtgctcagaggtagaagcagatctttgagctcagagcaagcctgggctgcagagagtgcccaggtctgccagagccacgtagtgagctcctgtcctcagagagaaggtccaaagcaggtgaagaggaaggagtaccagtgtcatgcctagcatcacgctgggtcacttcctggacaggcctggctagctggctgagttccccttaaaaaagtccccaagtccgtttcttagtagaatatgggaatgtggcagtgacatcgttggtacatgcttgtcaatttaaagtagtacatatagaaatctagcattcttaatttacaacagatattttctatgtcttttttgaagacacaaatattttttttattttacttatttacttgtttgtttatttatttatttatttggtttttcgagacagggtttctctgtatagccctggctgtcctggaactcacttcgtagaccaggctggcctcgaactcagaaatcctcctgcctctgcctctgcctctgcctcccaagtgctgggattaaaggcgtgcgccaccacgcccggctgacacaaacattttttaaagagtatacttttcctttttgaagccaggtatggaagttatgtgccttgggagggattgactctggcaccccagacccctgggtgtgtgaaggagtgtgcccacttgagtgcagcctttacccagttctccccagctcaggttggtcactctgaagggcagtgcctctgcaacagagtccagtcccagtcccttcctgacacgtggacagccatggctgcagaatggcctttggaatggcgtgggcggcccactcaggctcccctgatgctcattgacatggcagagtcaggacaatgattggtctttttacatagtcagaaagggaaatggctgttaaccgtgactaggaggggctctcagtttgttgtctgcagagtagttactgttacaggtagggaagcagcagaaataagaaaagctgtattggtaaacctatgtgggtattgtttgcttatttttgtctagcagacagtgactttatccatagttcttaagttggcaaaccagcaaacactagacttgttttctcccaatttcctgcataaaataactatggccataaactgtggctagcagctctatacattatttgagcacacacgaagttgaggcctccaggtactaacataatgagctgcacagtaagtacatcggggatgacccaccatgaacatgagatagaggtgcaacttggatgacagtttcctccttgagggtgactgggatgttgttgagcaagcagactgataacttcaggcttcctgaatgacatagggctctgccttcccattacagtggaccctgctgttcttgaatgagtggcaggccctgctgacaaggcaggactgtgggacagctggctgacggcccaagcagacggcagcccagccaagaggttcctggagagtggtggcctttttcggacttttgaggatatcgggcacgccctcaatgggatggagagaaactagaatggaaggaaaaggctggctgctcctggaagcagagccagggacaataatgtcccaatagaacagactagaagtgcagactcacatacataaaggattcaagcaggtatacacacccagatagtcaacacagacatatgcacaagtacacacaggacccagatacatatacccagagacctacaaagtacagctgccaaaataaattccgcaacttgtcacattctttctggccttttttgtcaccacatgatgtgtaagtggtggccaccggttgtgatcgcatgttcagagagaacacggtttaggactgcctgtgactcctgaagacccatgttggctgtagtcagaaagcttcagacccacacagtgaaagaggctctgaggaatgttggagacacttctccgagctttgctctctgaggctcctcatctcatcaagaaggccagctaagaacacggattgttttcagggaatttcagggagattctaaagtttaccaggaatccatgaggctttgtaaatatagaaaatttatcacagacattggagaaaaatcaattttgcctagatagactagcttggtttgtttgtttgcttgcttgtttgttagggccagtagaaaaccatttgcagggatcacctgtttaaaagctaaaatctttgattttcacaagacagaagtaaagaacccccaagtccaacaagatgacagtgtaaatgtggataaccacagagcttctgagatgttttggtctctgtgcctgtccacccttagtgacagtactgactggttttgtgtgtcaacttgacacagctggagttatcacagagaaaggagcttcagttgaggaaatgcctccatgagatccagctgtaaggcattttctcaattagtgatcaagggggaaaggccccttgtgggttgtgccatctctgggctggtagtcttgggttctataagagagcaggctgagcaagccaggggaagcaagccagtaaggaacatccttccatggcctctgcatcagctcctgcttcctgacctgcttgagtcccagtcctgacatcctttggtgatcaacagcaatgtggaaactgtaagctgaataaaccctttcctccccaactgcttcttggtcatgatgtttgtgcaggaatagaaaccccgactaagacagtgactgtcactaacactgtcccctaaactttcatgaagaacttacctaagccagggttttgggggatgtcgagagctggagagatgcaagtcggggtgagccctggcctttgctggggcagagagcaaattctagaaatgagacaagctttctaagcaccatgaagtcactggcgcagcaccgagcagaaccgagcatctgggaagaggaagcttctatcagtagtgctgaactgagtcctgagggcaggtggacaggaagaggggtgtcgaggtctagggaagagggagccctgactacttagggaggactgtcaaacccttggaaaaacatcatgcatggcactgtgactgattcaggtcacagggaccaaggtctgtcatgtgggactttggactccatcctgaaagcaagagagactcccaaggcggagttactctgtccccaggactgattgttcattattttcagtaatttgaatttgggtctctcaacttccagctcagagactctatctcagaaaaatctaggtggacagtgcctatgttggagatgttaacatctttcgtagaaaggtgcacgtgtgtggctccacaggttccagcagtgggcgtggcagaacgaatgagcaggaagctccacccctgagcaagcaggtttcaggctgggggaggggagactacactcaagaaggtggactccagaaaatcaaataaccccattaaaaaatggggctcagaactgaacaaagaattctcacctgaggaatactgaatggctgagaagcacctgaaaaaatgttcaacatccttaatcatcagggaaatgcaaatcaaaacaaccctgagagtccacctcacaccagtcagaatgtctaagatcaaaaattcagatgacagcagatactggtgaggatgtggagaaagaggaacactcctccattgttggtgggattgcaagcttatacaaccactctggaaatcagtcttggcagttccttaggacatagtactatcggaggatccctcaatacctctcctgggcatatatccagaagatgttccaactggtaagaaggacacatgctccactatgttcataccagcctcatttataatagccagaagctggaaagaacccagatgtccctcaacagaggaatggatacagaaaatgtggtacatttacacagtggagtactactcagctattaaaaagaatgaatttatgaaattcctaggtaaatggatggacctggagggcatcatcctgagtgaggtaacccaatcacaaaagaacccacagcaacttttataaaaagcatataattggagcttgtgtaaagttcctgaggtttagttcattattatcgtggaagaggaacatggcgggaggaaggcagacatgactctggagaagtacctgtgagttctatatccagatccatacgctgcagcaggaagagagcctgttgtgggcttttgaaacattacagcccatgcctgtggcacacttcaccaagtccacacctactccagcaaggccacacctcctggtccttgtcaagtagagctagtccctgattagttagcactcagatatatgcacccaaggggcgaagcttattcaaaccatcacaccacctattacttttcttagaagattcctatagaaaagggagcgtctgtgcctaatcacatgaatggttaccaaatctgatttcccaaactcttagttaatccttcctggattccaaggctggctgtgggttttagttctaggccttgtttttaggtactcacaagcctctgcagtggctgaactcttttgtcacgtgtacaggctctgggtttgagcccagcactgtaagcaaagaagtgattgacttcagtctagacaacagattttagtagttgacaggaactagatttgtactaatttaagaaaggtattattcatctttatttctagttcttactacagcattttaattgtagataaatgtagtttgtgacaccctagggtgtaacgccttcttcccttggccaagatgatgtataaaatgtcaacgaagattattcttctttaacaataattctaagtattaccaagttccataaacctcaaattgagtgtggaggagaaatatcttttagttaggtctgtgtctttagcaaatatgggattggtgtggcttgtaatagcccatgccatttcaagtatttattatgaccccaggtgcccttccccgccactcttaagtctaccagaagttttttcagccattttctccaagtgtagcggatcctacttcttgtatcatctctcagtgttaattataaggctttgatctgccgcactaattaatcagtaattagatagtacagtacgaaaagaaattaacaaagataaaaacaaaagcagctctccacgcaggctgcagcatctggtaacttgatcccaaatcttgttgaggaatctgggttaagtgctctttacccatgaactcctttgattttggtggtggtggtgacctcaagtaactaatggaatatacaggtaaataaacactctggttagctaggggcaatagcacctatgagccctgcactctggaggcagaggcaggagaattgctgcaacgttcaaggccagcccatctaaacagtaagtttcaagctggcaaggaaaacagtgtgactccctgtgtccaaaatctgtaaaagctaaacaaacaaaaaatacttgcttacactgatttgtcattgtcaccttctcctcctctctcttctcctcctctcccttctcttcctcttccttctcctcctcttcatcttcctccttttcctcctcctcttcttcctcctcctcatcagaaatctgctttatgtatgaagatcaataattactttgaaatgtactagtatttttggaaatgtaaaatataaatgcacagtttaaagtgatgtgtaaaataaattcatagtttatagtggtatgtaaaataaattcatagtttatagtgttgtcctcactattgtttttcattttaaaatccacataaaccagcttttaatttttttgatttttaatgttttattagcacttagtagttgcacaggataacagatttcattacattttcatacatgtatataatgtatttggatcatggttacaccacattgccttctccatccccctctctttgatacattcttcccagaaagttccacttctcctttaatgactttttgtccttttctagatttaaattttcctatgtatttattttgctgaggcaatcattgggggaacttaagagacatgagcgagaggttagtgacaggaacatgagtatcttgccaggggtttaacacaaggaaaacttctcttcttccagcaaccgttgggtccttggaggaggtgggccttgccagctctcccctctcctatctgttatgcaggaactcatggctgcttttgatttcagtctaccacacctcacccatccaccagctcttgtcctctctttccacggtgttccctgagccttgcagggagtgacagagatgtcccatttgtgactgagcattcagcaggcactcatttccagccctttcctggtaggttctctacagttcctgctgtccaccaccaagggcgctggcagagacagtgtcctagagacagtgccagctcaggtgcctccccactggtgcctctgacctcctcagccacaggatttcagccaggattacaggaccagaggtggggtccttacagtggagaggatccccattctaacagaaagtgcttggttgctcccataagactgtaatcctgtaccgtgtacacaccctgccctgccaggcagcagtgtagattgcagtctacacagggatgaggctgctcacagttctccctggcatcttccagcacagtggggagctagctggcaagaaagaagcttccagcctggactcaccaacctggtctataactgtggtgtggcacatgcctgaccaggacacatcagagccattgattatttgaattgtcagctagacctctaaaacaaaatgtttaccttacgttaaaaagtacaaacacacctctcaaaatgatgcaaggagaattagtgggaagggactctgaaacccagatggatgtgggcagatgtctaacaagtattgttgggaaccttcaagtgttgcgggcaccttcgcatcctcaggtgcctgctcctctctggtcctggatttagaacttttttgatgtattagttgtgtattttctcattgctatgatctgctatgacctgacagaaaccatacaagaatccattttgtctcatgatttttgagcgtccaggagctagactcagtatgacagacaggtaaggagaggggccatggctagatatccaggatggctggttccttccttagcctcctgacataagacaaaaccctggcagctcctgtgtcccgccagcaggcccctgccggtggactggctcggcaggttcaaggcctgaccaggacatgttgcaccacatgtgattacaccacagttgcagaccagtcaggcaccatgcctgtcttcaaagtgaccaatcagggggtaggaaagaagacctccacagctctcaaaacccctttctccttactcctaccctctgtaatcatgaccgcatagggagtctgagcctgcaccacactcggggcgcatgaaggtacctcaccctcttccctggtgctgcgtctctgtagtaaacagcgtcaccttttgctggctgtagggatcctgtccactgtgatgggtataaagcttgtgggtttgtgccattgtcttgtaagttcccacggaagcaattttatggtccgggctcctgcttgcttatacaagtgtttttatttgccaggcactgaaagaaataatttacctcttgatggaacagtttagggtgtaaggacatagatccttggagaaggattttacaggagtgtttcagacgttctttcaatccaagtgtaccagacgatggaaacccgtaataacttagtatcagtgtagatatccggaagtcagactcattttctgtaacttcacggtgaaacgattaccggtgtgttagttgcttatcttgctgctatgacaaaagtacgtgaggaaaacagccaagaggagcgtttattttggccccagtttgagagtacagccgtctgcggagaagtcgtgcagaggagcttcacctcaagagttgctcctcagagacatttacagcctgtggtatccactgctgatgcccttcatagcacttgccatagccagagaggcttctgtccctgctggttggtctgtcttattcagcatcagtggcacccgcagcagcatcttctggctcatcagcacactcaataggtagttgttggatgaacaatgaataaaggtaccctcttcttcctggtgcatatggcttcaattggatcctgtgacctcttatccgtaaaacaactggcagaacattggcttttcctgaggattcattagaaagtaacgatagcgtgagcccagacagacagcacttcttcctgttttacagaaaatcttcagaggaactggacatggacaaggtgactgcagccatggtattgaccagcttgtcaaccagccctttggtccgaagccctcctgtgcggcctaatggtgagtctagagtatggaacgtgcccattagctccaagagcaaggcctctctctcctaggaatctcattcctcccaataaacagttggcttcaaattgaagactatgtgggaagtagagaccctgagccgtcagcctccccctcctcctctcccttacaccccaggatactgatgtgctcacctacacagctcacagacactgagttctaccacttgattactctgtttcaggacatacctgtgcagtacttatgtgcctttttcctcaggtagccggagaacggtctaacaaacttgtcttcccagcatcatttccttttgattgtaccagtgagcacactgaaggttgagtagtttgtagaagcattatcatacacttcataaccaaagagaattacttagtccattcacgaactcactgtatacttatccgatgccacctagaagatttgaacatatcaacagaatataactagtggccatacttctagggactgcgcagtctcctggggagaagactgtcatggccttgttaatagctagcacattgagtatgctgtctgtgctgcttgctctatgtcatcgtatgtctaccaacaagcgtatgcaatactgttaccactgctttacagaggagggagccagggcatgtgtggcttgatgaataaatgaccggactacatttctcggtcctatcttcttcattccagatctgcctttctagtcatgcttcatttaatctgcacgataaatcaggaaagcagacagcgggagttggagttgaatggatgatactaggccctttatcatgacaggtcctggatgcctaaggtgatccacacagagaggggaaagtttggattaggacagcaggcagcatgcacacatatatgtgtgtaagtgtatgcatttaaatacagacatagacagatgaatttacatgcactgcataggcacaggcattgagctgaagtggccattcttgcttagtggcctttgggagcctcttggcaaatacccagatttgcctttctcatctagtcagcatggctggaggtaaaactggggtagcccccaaaccattctaggaatgagtttgaatacttagagggaaaaagatattttaaaattaatcattatttttaccatacaattcttttttttaaaaaattgagaacatttctattgatactttgtacttaaaggttaaaattaaagtaaaccttttgattcttcaattgcaattttctgttcgctcagcaataagagtatgccagtgctcatttgtggttaaaacaaaacaaaacaaaacaaacaaaaaaacatctatttacctaggcatgatggcacacaccactaatctcagcactgaagggacagtctctgtgaattgatgaggccgtcctggtctacacagagaccctgcctcaaaataaacaaataagtatataaataaaaactttaaaaaataactacctcagtgctaaatttgatgtctcccactggttttcaaaaggaagcaaaattttaaagcaagggaagcaatttataataagaaaatcactagtttgggtgggaggatagtcgttctccagaattgtggtgtatcagtgagtaggggaccctgttgtgatcttctcctgtgcccgcctgagacgggttgttccattaggaggtagctttgcaaacaggtgagagcccagctgggcccatctgcgtctgtggcttatgctcacttgggtgctgtagcccagggaacactctgaaatgaccctttctgagtcacttgggcttcacaagctggtaagccgacgcgacgcgatggtgtagtgcactgtgagaattgctagttttcaaaagcagttcagcggctccgttgtgatgtggtagcatgtgtatccagcactgccactttgattttattgtacaaatgtgcggtagggtatgtgaggaagtcattggttttcatgccttgtgctagttttaggaggtcaccacatctagccatctctcccatcagtctgcaggaaggagactcgaagtcactttgtgatccttgcaaggtgcaggtatgcagacatgagcatttagttctggcagaggttcacccccacaaaatggcagcttctgtagaacttcagctctaaacctagtgacttctactcaactttcagctttgtgtagttgaggaatttgctggaaatccataattaattaggtaagggtaatgatttcccacaaatgcctagtctactagtcatctttgctgcattagtaattacacagacattttaatgaggcattttgggatgctttttcttcctcccccctcataattagttttaatatattcatggtgcacataaatatggaagagaaactacccagaaaaaagtagtttatataaatactaattaagtttgggcatcttgaaagataaagtaagtctatagtgactaaagccccctcctctgacattagcaggaagtaatctctgtcagactacctatagttcgtttgggcaccagtctggtcagtagacattgccaataaaccctgatgccatccagctctgccacagagataagaggatgttcacagtggaggacctacatgctctgcaaggccaagggccactatcagaccaattctagccttggccagccaggttcatttcctaggtagagagcaggcagatgagtgccctaaggtctagggggattggaactcagggtgtgtaagcagaaatggggactgataagtgtgaaggaggagactagtaattgggagccagagggcaaggggaaattagagtgaggggtcatgaccctgatatatgacaatgccatcacgaagctctgtacactgactttgacaattaagtttaaagggatataaaagcagtcagaatctaaggccctatttgtttgcatcggtagcggtggacttgctttagatgcctatcgagaaatgaccattgctcacagagtctttgtctactttcttatgcgtatatcccaagaaccgtagtcgtatgagtaatgccatttttaaattgggatggggaggagcagggtggaggcttgccggccagatagtttgggtagctaccatgggcagtctcctactcagaagcacttcagccagcaaaccagaggccgcacagttggtgaacaagaagtaatgattattttcttgttcttgtatgatctccaccaattccaaggaaggagccggacactagaatgctcactgagagcacagacagtgtgttgcagtgtggctagaacagctgcttagaaagaaccgtgtgactggggtgggtgaagacagagcccctttcccggaggctctcacttgctgtcccctgtgctcacagagggtctcagcgggtcctggaaggaaggtgcaccatccagcagcagcagcagtggctactggagctggagcgctccgagtgaccagtccaacccatccacgccctctccaccactgtcagctgacagcttcaagcccttccgcagccccgccccacctgacgatggcattgacgaggcagacgccagcaacctgctcttcgatgagcccattccgaggaagagaaaggtaggttcgcggtgcactgtgttgtgcacccaaggtcctggtatgcactctcacccaccccatgcctggtcttagtgctctctgacattgcagattccccaattaaagacaaaagtgactgaagcctccatgtctgtgtcccatccgacatgtatgctccatctgtgtatacattgtctaacacccttacctttcttagaagctgaaatactgaactgaggcttcctgtgcgtgcatgctcttaaaatatagtattttttttcttttctgcttctgttagcccaaaagggtttgttcattttatacagatagataggaaagatacataaaagctgacatatatacaagtctacttcatcccaaaaattacgtttaccaaacagaaatgtaaagaatagctaaatagatgaatagattagagctcattagacttactgaccatacatgtgttggtcctcacagtagagctctgtagagaccaaggtcccaggatacatttgttccatagccctgcagtccaccagagccaccatgcaaatccacaggctcttcattctcttcaggagtctttcatttattgtcaccattttctgggtttccagtgttttaacatttacttatttatgccgtgtgtcgtgtgtttgtttgtgtatatagaagttagacaacagcctgtgggagttggtctctctttcactatgtgggttctaagaattgaactcagacttggcagcaagtgctttttcccacctacatcattctcacggacctgtcaccctctgttttatagaagcatttttatttcatagactgcaacactgctactaaatctagggaacactttagcattgtttgaaagttatgtgaagctgtgatttttttatgctagtttttaattttatatgggtgtcatcattcttaaatatgactcataaacaaggcaaactgcagccccaaggatgtagtcagccttgtcctcccctgaatgtggtccagcatcctctctgcttcccttggcatcactcacagtgcgcagcagtgagcactaccatggctctctctgggtatgcccctaggatagggccatccaccagaaaggagggcctttgtgcagcatcccgctgttcccagaagcagggtcctgcctgaagagtccatcttatgcaagggcactctgcgagacacttggacccgtggatagaatacacagagagaatatacagcagcgtggagctgaactcttgcttagcctgccattcccagggaatctaagcaagcagtcctgagtatggccagtgttgtggcaagacctcatacatagagcaggggccctctagtgcttccaaagtgcattaatgaattaattgatcgatcacctatcagagatcagtttgtatgttttatagaactgaaagtcattttcctccctggtcaggctgcattggactggctcgggtaggctatccacatacctcagcaaaattagcaaacagttgcatcaccagaggaaagagtgggagcttccccatgggtacaggacttgacacgcagtgtgtggactggagttcagatcgtcagaatccttagaagatggacacagtactgtgcttccagagcctcagtgctctatgatggagatgagagactccccgagacctcacaagcccgatacacagaactgacacctagcgcgcacacacacaccacttatttgaagaccataggcttcatttacaaaatgctaagtgtggacacaaacaggttggttagaactaggtattatcttctagactcagccttccccacagtgataaaggaactgatggcgccatgttgtgcggccttggccatttgtatctaaacttactttgagtagtttaaaaagaaaataggacagctgctcttcaccctgctgtttacttagtgaactaatatttattgagcaccataggcaaaacactgaacagcctggaagcagggcacaagagctggtccattcattcactgagagctgggtgggcacaggttggtgtgtgaaggggctggagtagcttcaaacgctgtcttcagatgttgcaggatgcaagctctgccattacagttactgtacatttcaaaccgtatctcaaacggtctctacagaactcattgtaggacttgcaatgccaacttctgtctcagtctctcagacccttcctatctgggctgaatggctcccaccaaagagtataaaaatatacagcagcatttgcacattcacccagggagcttcaagaaatgtacctctcggacatcaaagaaatctcagaatttgccataagaagtgggaactccagctgtacacactgacaaccagggtagccacaccacccaggagaagagaaacaggaatgttccgtggcatgtctgcgtcggaggatgcactttagtgaccttcgtgcattaggtcggcaatcgtgagggatgagaactgactaccaagggaaaagatataaacctaagaaataactaatttgtctgggcagacagtctgtttttgttgatggagcttcctaatttcttacctgttcttttagatccttactgtccatttgaaatcaacagtcatttgcaggggaggttgttatctagtggaggttgtttgagaaccttctacttccagattgactgggaggctgtgagtcactgtaatgagaggtgagcgggagtgaggatccgctgaaggtgtggggtcagcactgccctctgttggggtttttatctcaacagtgtgctgacacgtgagtgggtcctgtactgtggcctgtcactcagaacgtttggaagcacctagaccatgtcaaatgatccccagtccatcccctcagccactgctctgggaccctaagaaagccagcttgaccctcaagatggcacctttttgtaaacctggtaatgcaccctcacaccttgagggacagttgtgaagttattaaatgtgattccacgtacgagagcatgcactcttttaacagacatccattccctagactgtaaacacagcgagagaagtgttcactgcacgtaggtatgggtcatgattgcggacaccctccgctctgtctgacttgctaacactcgaataaggaagttcaaagtgtgaagtgctatgcacagacacgtattatctgatgagcactgcatttacacgttttgtcacagtttatcagatgtgtatacatgcagcttttcatttcatcggacccacagttttcggtagagcctgattcccactttgcagaagcaagtgattaaatttgtacggcttgcccaaggttgtttatattgtgacagaaaaacagtgagctgagcataaataatagaggctgcttgtgagcaagatgagtaaaagaatccacagaggagaatggcagcctagtcaatgggccggtgggagctgaggcacaagagggacactactccttcctcagccacagcggtgaaatgtgagagaggcaccaagctgtcctggctctgcacgtcacttggccagctttgggagggcagaatctagcagacttttttcctctggtttctttctttctttttctttattagatattttctttatatacatttcaaatgctattccgaaagttccctacccctacccctgccctgctcccctacccacccactcccacttcttggccctgtcgttcccctgtactggggcatataaagtttgcaagaccaaggggcctctctttccagtgatggccgactaggccattttctgatacatatgcagctagagtcaagagctccgggggttactggttagttcatattgttgttccacctatagggttgcagaccccttcagctccttgggtgctttctctagcttctccattgggggccctgtgttccatattatagatgactgtgagcatccacttctatatttgccaggtactggcatacgagacagctatatcagggtcccttcctcaaaatctttctggcatatgcaatagtgtgtggggtttggtggctgattatgggatagatccccggatggggtagtctctggatagtccatccttttgtcttagctccaaactttagtgaggtaacccaatcacaaaggaagtcattagatatgcactcactgataagtggatattagcccagaaacatagaacacccaagatacaatttgcaaaacacaagaaaatcaagaagagggaagaccaataggtggatacttcattcctccttagaatagggaacaaaatacccatgaaaggaatttcctctggtttcaaatagattgtttccgaactactatggaatgtgactgggactctgagaagatgcagttcctgtcatgaccacgaggtgatgcaatgacccaaagtatgggcactatggtactctccagagaaaaccaattctgtagaagggtaaaagttaactaccaattccacaagaccttctggaaagtcagattcctggttctgtcatatctaggtgtgatgttctgtgtattctgaagttggggtgtgtcactgctgtgctgtgtgtgctgtgctgtgtgtgctttcgcccttggatgctgagtgggttgggagcttaggaaccctaggcatagagacaagatgccatgggcctgatcctgtattgatagatcagtgctgaatggctcacggtgactgtgaacccctcagtcacccagtgcacttttggggttaatgtgagaaaactcgctgcaatgttgtgagtttgggtagctctggcagaaattgggagtacacaggaaacctgactcaggagtctgtcttctggaccagcaacagtaacccagaggcgcttataaacctggttttcatcactttcccttggttcgtaggtgtggtgaccatggacagttttactgggggttggttggaggggagcttgaatcaaaacaggaagctgtaagctaacacaggagtttcggtacctgtgtggtcttcaaccacgagttaagcatttgctgcactctgcattttttatctttgggcttatacttatcccccaaaacacacagatctacaaaactcatgagtatgatgtgttgttttaaacaaaatcccaattgttcaattttaccaatgaaaacttgggagccagatgctgcagatgctggagttaaagcctgctagctcagacaggcagagaaagcaccaactgaccttcctccttagtggacctcccaaaaccgaatgtccctcccttctacttcctgtgcatctgcctatcaggtcctcctgactccctcttactatgtctttttgttaataatcacatattcgctccctgtcaaatgcctcttgacctatggttgattttacttaaatcttgtttacagtattcaagcaaaaagttcctggattaaaagtgtgtgttagggctgagctacaccacaactggaaataagtttttccaataaataacacaatctcagggtccacagtgtggttacatatcctgcaacaatggtgcccacctgcatcgtgaactctacagcgttcattccgaatctgcttctcaggagcagggaaggtctcccaagggagtgctgtgcagaagcggtcccaatgaggatagtgcgtgagcacaccaaccccaaaggtacactgggtgatggagaggctcaccaccctgagccactcggcactgacggatcaatacgtatcaggatggaggcaagtgttctcttgtttccatacctagggttccctagccccccacctgcccagcatccaaggcacagcacagcacagcaagcattagcagcattcatggctcttccatcttttcatccgtgtgtgtttctctggaatgacacatcatcaggaagagcagcaagcagttaaccaggagaggaagagcacagatcagagccctgggctcccagagtccagggtgggccagccatgtggtccctaggttgagggtgctggagcaccgaggaactcagacagcatctacagtcgtcctaaccatccaatctcacctaggagtcaacaggacaaaatgcacttctagaatccatggattaagaaaataattgactagggattcttattaactcaggaaccctcaggccacacgtttacctctatagtaaattcctatcactgcagtgccggccatggtgggactggctgaggggaagtggaaggatgcagggttcgtacaaggtcctaagttctggcaacaggaatgaatgctcactcgcattgccagtagaaatgcaaaatgtggtataactactttgaaaactagtttggcaatttcctacaagttaaatatgtgctaagcatacgacccaggaactctactgttgcatctgtatttacctaagagaaaagaaaatgcgtgtccacaaaaagactcctagacaaaggttcattgccgctttatttattatcaccccaaccggaagcaacgcagatgtctgccagcgggcatgtgaaaaaggagactggtgtattcatagtagaataccacactaccaaaaaagagaaaagctaccaatgcacagagcaacgggccactgtcagaatgtcagcgtgtggtggggattcagccacaggagactgcattgtgtgtatgctgtgcacagggacgtcttgattgttcgtcgtttttaagacagccttacttcaagaccaagctagcctcgagctcactgtggagccgaggatggccttgactgactttgtctacctcccaagtgtgcctatgtgtttatacaatgctggagatggagcccacggccccttggtacctgctagcaagcattaccagctgagccacaccctttgaatttactcagcactgctcgggaccaagctgtacacatgggtggctttacctaatctgtgcttggcatatttgaattcattcactttgtgtttacatcactagtactaatctcatttaatctgtttgttttacaaataaaggggcaagagaaccccataagcgtaagatcacatttataaagctggagctccatacagtagctatttctttagcttttgtcccttgataaggatcttagtgaacctgcttaccagagacaccaagacaggctgaaagggatacatggtgaggggcacttgactttgcacaggaacctgatccacagttcagcaatttggacatcaagtatctcccctccactgcagtataaacacacacacacacacacacacacacacacacacacacacacacacgaggtgattgtatccactgcagtataaacacatacacacacacatgaggtgattgtatccactgcagtataaacacacacacacatgaggtgactgtatccactgcagtataaacacacacacacatacacacgaggtgattgtatccactgcagtataaacacacacacactcatacacacacacatgaggtgattgtatccactgcagtataaacacacacacacacacacacacacacacacacacacacacgcgaggtgattgtatccactgcagtataaacacacacatacacacatgaggtgattgtatccactgcagtataaacacacacacacacacatgaggtgattgtatccactgcagtataaacacacacatacacacatgaggtgattgtatccactgcagtataaacacacacacacacacatgaggtgattgtatccactgcagtataaacacacacacacacataaggtgattgtatagacctcacaacaaccatattgaataataatacatccctgagggtctccagtgcatacaaaacaaaacaaaacaccaatatgatcctctaggctgtaaccatgggccttctatgcctaccccatggaggcttatctttatttacagtggtttggccttagtttattcttgctttccaactaactcttaacttatattattgcagttatgctattctgtgtctgccacatggctggttacctcttctcagcttcatatgtcagacttcctccaagtctgggtagggaatctgccatgcctcctctcccagagtcctctctgtctggaagtcccaccttactcttctgccttcattttaaccaatcagaatgtgccttaggcaggcaagggaggacagagccacatcttcacacagtgcacaaaaccatcacctcaccactaggccactgtgctacagtggtgctcttatggcctctggagtattaattcagtgtaagctaagcatgtcaaaatcaaagccatgcccctccacctggagtggaaagctaccgctgccagccacnnnnnnnnnnnnnnnnnnnnnnnnnnnnnnnnnnnnnnnnnnnnnnnnnnnnnnnnnnnnnnnnnnnnnnnnnnnnnncactccatatatcccaagtatgaaaccattttaaaatagcactgtggccgggtgtggtgctcaggcctttaatctcagcacagtctggggaggtggcatataggcagacatatctctgtgagagcctggtcgacacagtaagtttcaggacaggcagagctgcatagcgagaccctatcttggggtggaaaataggattgtgagtcaggctttgtggcacggacctgtggttccagtactcaataggctgaggcaggagggtctcaagttcaagaccagcctgggctacacagcaaagtactaactcaaaaagataaataaataaataaataaataaggaaaaataattgagacctgaggtcaaagggggtgccaccagcactggggcacttagtcttcaaaccagccatacagttaaggaatctccagaatttctctttaacccacgagcagatatcgaagagcctgccaggaaacatctacacacctcacatgggactaaaattctgagtctgcaactgtctggagtgcccagctctcctggaagtgttgtagtattagctgaggtaggaggtgcaagttcccgctaataggggcctcctctgcccttcctctgtccttcagctgctccctgtgaagagggcctgtctgtgaggcttcaggtcagctgacaggactttgatgttcaacaaaatcactttggactgggggtgaattttcagctgttgcccatgcctttgtgggcagcacatctgttggcgccctaaggaggggccagcactgagcacagataggccgttcacacttggttgctgtgacttggccaggagctgcttggtttggcttcctccagacagcttggcccacgcagcattttggccgttgtttatttagctattttttcctcctcctgtggcttgctttgctctgccagagcagcaagtagtcagtctgtggacagaggttgatttcaactggatagagtgaatatattgaaaagaattaagcttccattaagtggctctggcctagggaagcggacccttggcttgtgtagagcaaagctgccggagcccattgaagctgcgacacacctcctctcctgtttgcttgtctccagttttaggcaggctctattagtcaagtcagggtcagtttgctttggttttgttggcaggatctcaccatatagtcctgcctggtctggaactccctgtgtggaccaacacggcttcaaactcacaagagattcacatacctctgccttctgagtgctgggaataagaaagtgtgccaggttgcccagacgagacataatttgtgtaagttaagaatagatagcagtgggtctcaatatagattgttcaccaagctcagggccctcagttcaaaccctcagcaccagtgaaggccaagaaacataccagcaaacaagccaaaaatagggtactttttaaatgttgaaattaacataaaatataatttttcccagttttttgattggttggggtttgtttgtttgtttgtttgtttgtttgagacatagtctctctacatagctctagctgtcctgggctcactatgtagaccaggctggcctcttgggtgctgggattaaaggcccagtatttgctttataaagttttagtatcagttttgctttatgcttggttgctttcaccctcactagcaaatccattccttcattggcattagagcccaggattccaggttctagtgaagacccgttgtaacatgtagccttttaaacggagaaacttatggattcttattagactttctgttcgtagccaaccattaccgattagctggaccccacagcctgtttatttatttttgtgtatgactgtttcgtctgcatgtacgtacataaaccatgtgtacacttattcttggcagaggtaagaagcgggtgtcaggtcccctggaactacagttacacacggttctgagacaccatatggatactgggaatcaagcctgggtggtctgcaagaacaagcattcttaactacccagacacagaagtgttgcaactggttctctacacccatacttcacctgccctctttcttccacgtctaggaagactctgctaagatggatggggagatgtttttgagaaactctgggactggaccaagcttattccgatattctgcaggtcctcccgtttcactccactccctcttctcagttcctttttattgtgtaatctaaaactgtgtctgcttaaatctaccttaaaaccttgctcgtccatccagtctgggctgggtgccctgagcagaccttgagcacaaactccacagccagtcccacaacacccagaggaagctccactcccaggagctctaacacgcccaggatcataggatcccaggatcccagaattgtaggatcccagagacagctgaactctgaggagttctgacacaagcaggatcacaggaaggacaggctccagttacttggcatcatcagaacccaattctgtcaccatagcaagtcctgaatacactatcacaccagaaaagcaagatttgaatctaaaatcacttctcatgatgatgatagaggactttaagaagaacataaataactcccttaaagaaatacaggagaacacaggtaaacagctagaagccgttaaagaagaaacacaaatgccccttacagaattacaagaaagtacaatcaaacaggcaaaggaaatgaacaaaatcattcaaaatctaaacatggaaatagaaaaataaagaaatcacaaagggagacaaccctggagttagaaaacatagatgcaagcatcaccaacagaatacaagagatagaagaaagaatctcaggtgcagaagataccatagaaaacattgacacaacagtcaaagaaaatgccaaatgcaaaaggctcctaactgaaaatatccaggaaatctaggacacaatgagaagaacaaacctaaggataataggtataaaagagagagagaagattcacaacttaaagggccagtaaatatcttcaacagaattatagaagaaaacttgcctaacctaaagaaagagatgcccatgaacatacaagaagcctactaataaaactccaaatagactggaccagaataataatctcatcacataataatcaaaacactgaatgtactaaacaaagaatattaaaagcagtaagggaaaaaggtcaagtaacatataaaggcaggcctatcagaattacaccagacttctcaccagagactatgaaagccagaagagcctggacagatgttatacagacactaagagaacacaaatgccagcccaggcttctatacccggcaaaactctcaattaccatagacggagaaaccaaagtattccatgacaaaaccaaatttacacaaatccagccctacaaaggataacaggtggaaaacaacacaaggagggacattataccctagaaaaagcaagaaagtaatctttcaacaaacccaaaagaaaatagccacacaaacataattccacctctaacaataaaagtaacaggaagcaacaatctcttttccaaaatatctcttaacatcaatgggctcaattccccaataaaaagacataggctaacagactggacatgtaaacaggacccagtattctgctgcatacaggaaacacctcagtaacaaagatgggacactgccttagagtaaaaggctggaaaacaattttgtaagcaaatggtcccaagaaacaggctggagtagccattctagtatcaaagaaaatcaactttcaaccaaaaattatcaaaaagataaggaaggacacttcatactggtcaaaggaaaaatctaccaagatgaactctcaattctgaacacctatgctccaaaaaccccacattcataaaagaaactttagtaaagctcaaagcacacaccccacacattaatagtgtgagacttcaacaccccactctcagcaatggacagatcctggaaacagaaacaaatcagagacccagtgaaactaagagaggttatgaagcaaatggatctaagatatttatagaccatttcaccctaaagcaaaaggatataccttcttctcagcatctcatggaaccttctccaaaattgaccattgacaaaacaggcctcaacagatacaagaagattgaaataatcctgtgcaccctataagaccaccatggactaaatatcaacaaaaacaacgaacagaaagcccacatacacatggaagctgagcaatgctctactcaatgataacttggccaaggaagacataaagaaaaaattaaaagactttttagaatttaatgaaaatgaagacaacataccaaaacttatgggatgcaatgaaagcagtggtaagaggaaaactcatagctctgagtacctccagaaagaaactagagagagcacacactagcagcttgacagcacacctagaagctctagaacaaaaggaggcaaattcacccaagaggagtagacagcaggaaataatcaaactcaggactgaaatcaaccaagtggaaacaaaaagaactattcaaagaatcaaccaaaccaggagctggttctttgagaaaatcaacaagatagataaacccttagctaaactaactagagggcacagggacagcatcctaattaacaaaatcaaaaatgaaaagggagatataacaatgaaatatatgttaaaataatttttctgtttgatgaatattaacagttgaaaatataatcatgttctataaatatggaaacattattgatactttttctcactgcttgaaattattattttcttaatgtttttaacttcaaagaatttttgctattttgaaatttttaaagtgtattactgataaaataatatctctcctagaaatgctggtaattttttttaagtaaactgattgttagacaatatacacagaaatataatgtgttttaaatactctctcactatgtcaggggtatcatataagggcttttgaatgtatttcttaatgattcatttttaatattttatgctcctttactatgcttaatttccaaagaatatcttgtatgttttggaacaatttagtattccacattagatataggatcctcagttatggatagtattacatattcattaatgatatttttagggtatgaaaggatatgaatttttgtaaaagttgaacaaagtttatgtgtattatttgattctcaaaatactcaatattattaatatgtttgatatataaaattcacttaattaataaaaaatttaaaaaataaattttagtatttaaaaaacttacaaataactataaacatcacattttcacttcctctctcccacagaaatattatttatgttctttgataatatgtgttcttaattgctcaagttctggcagagggccatggtacactcaggtagccttaaagtttagtcttacaaagggagtgtgagcaggcatggtgggagaacccagaatctaagcccatcccccccaccacagcctgaggaagcgccggaccagagggactcccagaaccttggaataaccggagctctagaagaaaacaataaccacacacaggtgtggccaggacaagggaatcgggattttctccagccttctgcattctgacatcacctcccattggccacacccaccacaagccggtgggcctgagcccttgattgtaccctgggcctcaggtgggcaccgagtgggataagaggtcagaacaggatggcctgcagagccaagcagggcaaattctcttcagccgcgtaagcttatgaactgatgaggtcgcctgctcagtcccacagagtaaagttaattcggaaaaaaaaagaaagtactgggccagagaggtgaccctgcagtcacgagcactaagtgctgggttctgttctaagcaccagaatcagagcgcacagctgcagctgctgcggctgcaggagatcagtgcattctggcttcatcgggccctgcacagccatagcacactcagacaagcaagtccacgtggataaagaagaatagattattttcaaaaagaaattaaagaatggaaaaatatttattatagctttcatttttagcatactcagtgtatatgggatggtgtcagctgcttttctcttgctgtgatgaaacaccatgactaaggcagcttactgcagagttgggtccatgatagtgaatataaagggaggggcaagaaactgcgagctcacattttcaatcacagcacaaaacacagagagagcaccaggctttgaagactcaaaaatcccccccccccaccaccaccactggtatacttcctccactgggactatacctcctatcttagggtttactgctgacaacagacactatgaccaaggcaactcttcgtttgtttgttcattattaataattatattattatttattaattattttatttacatcccaaatgttgccccctcccagagttcttccccccaacccctcctcttcgcctatgagaggatgcccccctccagtgtccctcctccctgggtcatcaggtctctacaggattaagcacatctcttctactgacaaggcaactcttccaagaacagcatttaattgggcctgcttacgggttcagaggctcagtccattatcatcaaggcaggagcgtggtaacatccaggcaggcacggtacaggaggagccaacagttctacatcttgatcggaaggcagttaggagactgagtcttctgcactgggcagagcttcagagcccacccccacagtgatgcacttcctccagcaaggccacccctcctaataatgccacttcccatgagccaacggatttaaaccaccacacctcctcagcctatcctaacagctcaatcaactgagaaaccaagtattcaaacacctgacccagtgggggccattttcactcttaaacagccacagggattaacttagctaagccccattaccaacctaaagattggtatgatgactatctttttgcatgtatgctacagcttgagtgtgatgttctcaccctgtctacacacacccttttccaagaagcttatgtgtgaagacttggtctgcggcttgtagtcattcagaattttttttaacccattgagtctaattagctttgcccaaatttgtatgggtgtggggccatctactcttgtgtggttgcaccagccagcagccacagactccccctcgtccagcagcctgccactctcagtagcttctctgctagagacaggatcccactcacttggcagtgctgactggcttgatcttgggcacgtcctctacagcagcctcacagctctaacttggtgagcgcacagtgttgtcacgatcagaagacactgtttagctgtggtcctccccagcctctggctgtacagcctttccccctcccacctcagagatggtccctgagcgtcatggaggaggggtgtaaaatcgatgcctgacttttggctgagcaaagcacagacactttggcccattatcagtgcctgtattaactgccatcagctgataagacctgagagccgcagtcgtcaaatgctttggcatagtataatcaaaagacacaggatttgatacttacatgctgaggaatgagaataagaaaattttgttttatataattaagccatgtatgtttctataagagcagaaaactttctatgtactgtaaaacactgcaattataacatatagtaggcttcaaagctgaatccagatgttcaggggtataggcattgggtggcgtaacaacatgtgctatacagagtgtgtatgtgtctggtgtgtgtgtgtgagagtgagagagagatgtatgtannnnnnnnnnnnnnnnnnnntgtgtgtgtgtgtagtgtatatgtggggtgtttatgtgtatgttgagaacaaagcctacagtgaagttaggcaataccccatgggtaagggttcccagcagacacttcagaattactctgcttttagtattgaattaattgtgatcattgttgtttggaaactgtttgctgggcagagaaggtagctcagctggtgatgtgcttaggaggactttagcttagtccccatgtgtaaacagtgtataaaagctaggctcaactgcatacacttgtaaccccagtgctgaggtgggtaccagcagctcctggggggcttgctggccgaccagcctagtattcatggaaagttctaagtactgaaagaccttgcatcaaacaatcaggtgggtgatgcctgagaagcagcccccaaggctgtgctctgtcctctgctcgcatgtcttcctgtgcacatacccatgtcccctcacacagtaatacagccacaaaaaggaaaactattgctgagttattccagattgagttatcttgcgtgttgcatgactgcagcaaaggctataaattaatcaagtgttttaatgttatgatactttagtctacaggcagtagacacagctcagcaggtaaggtaacttgcccacctgggcctgaagacaagcgtttgattcccaggacccacatggtaaaacaagactcctgccttccacatgcaagcaaaccatggcataggtactacctctgtctcagtcaccgttctatgctgtgaagagccaccatggccaaggcaactcttcgaagagaaggcatttaattgggggcttgcttatagtttcagacgttattttatcatcatcatggcagagagaatggcagcatgcagacagacatggtgctgcagaagtagctgagtcctaaatcttcattcataaacagagatagactgggcctgatgtgggcttttgaaacctcagttcctagtctcagtggcggccacatttcctaagtgacgaagtattcaaatctgtgacgctaagggaggcattctcattcaaaccactacacccctcacacacatgcacacatgtaaacatacaaactgaacacaatttcattccaggggaactgcttgcttagcttgtccaagccgctgagacccatctgagcactgcaaaaatgtaaaagtgcagaccagggcacgatgacagtaattcaatgacagctgctctagggggtgatcaccccagatgccgttctgctggttcctgcccatggcatcatggaggctttacgctcatctgtaggacgttgtattacggttcctgttttgtgatcaatagcactgtggtggggggaaaaaaaaagaacaccgtggtggtcagaacaggcccatgtggtggcctcgtgaagcccgtggtgggctcagtcactgtgctaggaggcatttggaaaatgctaaaccctcactgaggagcgttgtgtaattgtgtgctgggtaaagtttggcttctgcagcagatcccaggtttgctccttgagtctctgaaactctttagcatggaggccactagcagcatcggtctctggggatcaactgcttagaacagcactccccccactaatcacttagtttaagtactttcagggtgtccccagtggttcttaggaagaaatggaagttgtctgggttcacccagctctttgcccactgggaaagcccagagcggagattccggttgtcaggaagatggagagcgagcaaaggatatagcacgcagtggggacgagagggagactggatggacttgcttgcatggtgatgttgtccttacctcttcctgtagaactccatgaaggtgatgttcaaatgcctttggaaaagctgtggcaaggtgctgaacacagctgccggcatccagaagcacatccgggctgtccacctcgggtaaggcagcgcgccctctgtccacctcgggtaaggcaagacagcgcgccctctgccaccttgggtaaggcagcgcgccctctgtccacctcgggtaaggcaaggcagcgcgccctctgtccacctcgggtaaggtaaggcagcgcgccctctgccatctcgggtaaggcaaggcagcgcgccctctgtccacctcgggtaaggcaaggcagcgcgccctctgtccacctcgggtaaggtaaggcagcgcgccctctgccatctcgggtaaggcaaggcagcgcgccctctgtccacctcgggtaaggcagcgcgccctctgtccacctcgggtaaggcaaggcagcgcgccctctgtccacctcgggtaaggtaaggcagcgcgccctctgccatctcgggtaaggcaaggcagcgcgccctctgtccacctcgggtaaggcagcgcgccctctgtccacctcgggtaaggcaaggcagcgcgccctctgtccacctcgggtaaggcaaggcagcgcgccctctgccatctcgggtaaggtaaggcagcgcgccctctgccatctcgggtaaggcaaggcagcgcgccctctgtccacctcgggtaaggcagcgcgccctctgtccacctcgggtaaggcaaggcagcgcgccctctgccaccttgggtaaggcagcgcgccctctgtccacctcgggtaaggcaaggcagcgcgccctctgtccacctcgggtaaggcaaggcagcgcgccctctgtccacctcgggtaaggcaaggcagcgcgccctctgtccacctcgggtaaggcaaggcagcgcgccctctgtccacctcgggtaaggcaaggcagcgcgccctctgtccacctcgggtaaggcaaggcagcgcgccctctgtccacctcgggtaaggcaaggcagcgcgccctctgtccacctcgggtaaggcaaggcagcgcgccctctgtccacctcgggtaaggcaaggcagcgcgccctctgccatctcgggtaaggcaaggcagcgcgccctctgtccacctcgggtaaggcaaggcagcgtgccctctgccatctcgggtaaggcagcgcgccctctgccacctcgggtaaggcaaggcagcgtgccctctgccatctcgggtaaggcagcgcgccctctgtccacctcgggtaaggcaaggcagcgcgccctctgtccacctcgggtaaggcaaggcagcgcgccctctgtccacctcgggtaaggcaaggcagcgcgccctctgtccacctcgggtaaggcaaggcagctcgcctctgccatctcgggtaaggcaaggcagcgcgccctctgtccacctcgggtaaggcaaggcagctcgccctctgccatctcgggtaaggcaaggcagcgcgcgtctgccatctcgggtaaggtagcatgctgcccctctcccctttggagctggtggaagtctctcagtacagccccacacatgtgtacctggcctctggctcttcctggttcctccagtaggggtgatcctgctgatagtcagccaccaagtcaccaggccgcagagcctccctaaactagtgtgagtcaccttagtataatccttactctgagccctgggtccatttaaaatgaaatgtcggctgtgagggtcagagttaaactctgtgcaagagacactatgtataaaccacaccacgagggcatcaccatgcgagctgtgaatgtacttcaaagacacctcatgtgtctgtaacatgaaatgtgtatttacttttgcaataattgatatcatgacttagaacctctcagaatgagcaccaccaccccacccgacccccgannnnnnnnnnnnnnnnnnnnnnnnnnnnnnnnnnnnnnnnncctcacaccttcgatgacagagtctaatgtgatggtctggctcagcctgtttctaagatgactgttttcttccgaggctttaacaaccttcctatagacagacgagttgtgattaggaccatacagctggacttacagccaggggcagtagggggctaactgtccctgccttagtccccactctgtcttgtccatgtagctggggtttagaagagatcctgtgtgaccatagttatcaccaatgtgcataaagcaagcatcactgccttagtagctctgcgtgctcgacacagaagggtcctttttgacaaaatggctatggatgattcggccctggggccaccttagccagaaagaagcacgctactctgaaaactggtataggcgagccacaagaaagtgtgcaggcagccagaagagagtgtcagatccagaatgtatggtctcagccaccaggccacacctgcctctgttgtctctcagtcatactgtgcttggtaggagcctgctcagtgccacacatgctgattacgtgtgcagtggtacagagagcggcaaaagacacagccctggagaatcagtcatgagaagacaaagaggctttcagagctacagaagcaggctgcagagatggctcagtggtgagggctttcagcaccagcactgatacccaggcaatcaaggtcctctcttgtgttccatgtctcattattaagatcatttaaaaacagactcccatggaaacttggggacaatttcattagaatttaaaaggaccccaggacaggcaagctataaacctcagcagctgcctagagaaagaatagagataagagggattaaaaaacaaacagaaaccatgttgagtcagcatggaggacagccacagggccttaggcagtgcctagtggggactgggctctcgaggaggaggggaggcccgagtgtgggcaaaagcatgcttatctctgcagctaaaggaagaggcagaaaaaagagtaaaagccggactcagaaaagtgggcagagccacctgagctctcagtgggctgtgagaattctgggaaggagaactggagtgcttgctaaaaggttggatgtggtggggcaggcttttaattccagcactcagggagcagagggaactctgattgttgaggtgaattccaggacagacagagctaaagacagacaccctgttgtaaataaaattagccattctgtccacccatagaaaaaacaaacaatccaggttggtattttatttgcaagctggaagcctaggttgggcaggtttggagctattctaacttatttcccagccataattcccttgttccttgctgtttctcctggctgggtgctcatggcctgtctcctctcatggctgcctcctccacctccttcctctcccccccccccctctctctctctttcactcgatcctcaagtcccacttttctaaccttttattgaccagttaaattggggagcaaggtacacgtagcatcacttgatgcacatgtactggagagaaaagcgtgatagcaggtggtagaagcaagcaggaagaggttaaggctgtaagcactcacagcaaggctagacttcctaaaagttacataacctctccaaacagcaccacctgctggggagcaagtgttcaggtacaggatcctgtgagggacatttctcagcaaaagcaccatccgcaccacctgcgggttctgctttcttcctaagcctcagcatgcaggtagatgcttacctgtcacttcttctaaacatcctatgtaaaaaccagtactactcccaaccgtggacccctctcctaagggctcgcagatattgcttaatcttttcttactaagacttaacaaagcctcatatattaaatagccgtttactagggatatcttgtctgcctctagactataaaagttccatcaagctgggtggtagtgtcacactcaggaggcagaggcaaatggatttctgagtttgaggccagcctggtgtacagagcaagttccaagacagccagggctacacagagaaaccctgtctcaaaaaaaaaaaaaaatcaaataacaaaaacaaaaataaacccataaaaacaaaagctatcatcaaaacatagtctttgttttgttcctgttaggaagtagaatgttttatatgtaatgtattctccataaatcattctcagattagtaaatgaatgaccaggtaggtaggtagatgggtaggtggaagatagactgctttaagaagtcttactctagtttttgttgctgtggtgtaatactggatgccatgggagttaaaggcatgcatggtagtttatttggctcatggttctggatactgggtcatgctgcactatgaccatagtcaagggtgagggtgtccttactacatctggttttcctttcagaaccacttgggccagtgtaccagcccatcttcttgtcatcgtgccctgcccccatcttcataccatggtgcttgcctcacttccccagtcctcttgacctctcctaattctgattgcttttcaaagactctcttcccaaacaccattaacgcaaggatttggaaagtaagttactaacagacagtgctggtggggggcacatttaaaccagagcagaagctgatgagaaccttcttcagtaggatggttgagtgtcaccgcgtagtgtagggttgccaggccgacagagaggagatcattccgagaggagagaatggtctgcacaggtcgcaagcacgaggacaggctgctgagcttcgctctgctctctcctgcctaggcgagttggggagtctgactgcagtgatggggaagaagacttctactacacggagatcaagctcaacacggatgccacggctgaaggcctcaacactgtggccccggtttcaccctcccagtctctggcttcagcccctgcgtttcccatcccagactccagccgaacagaaactccttgtgccaaaacagacactaagctggtgacgccactgagccgctcagcccccaccaccctctacctcgtgcacactgaccatgcttaccaggtgcgtgctaaggaccttgtgcaaaagcagtagctaagttaacacacacacacaaaccacagcaacacacgtggcagcaactccgttggtttttctattttccctcttagccaggatctcaagccataagtggtggcttgtgatcccagcactcaagaggctgaggcaaaaggatcatgaatttgaggccagggatgggctatagagttttttcgacagggtttctctgtatagccctggctgtcctggaactcactttgtagaccaggctggccttgaactcagtaatccgcctgtctctgcctcccaagtgctgggactaaaggcatgtgctaccaccgcctgggctatagagttttaagggcagcctgggctacatagttatgaccaagtctctgaagccaaaccaacaacaaaaagggtctggtagtccagggctgtatgtactcttggtcagtctagaggccgggtacaaaaccactgtaactagctgaaagatttgtaattaaaaacaaaaccaaaaacctaagcctggagaaaaaaaatactttgcagacttgagtcctggcatctcagctatgtttatttgttcaattttaaggttttaaattttttcttgcatttttattttgtgtgtatctacttgtgtatgcacgcatacacccgacacattgcacttgtaaaggtagagaacaaaaccctctctggtcctaaggattgaactgggatcttcaggcctggcccctttccctgctaagctatctcattggccaagtctttaagcatgttcaaaatacatgctgtgcagtgaccatcattgtatccattttcttaggaacaaccttagatgtgagatgtctaatgaccaaaacaattgcactcctaaaatatttacatcttagatgtgcccatttccaaatttattgtttaagttatttcctaatatggtagtcatatttatgtccaaaagcaggtatatgtgattttcagacactgacatccaatctcccatatttctcctatacctcaggtagactgcttatatgaaaagcttctttctggctactctctgaccctgttcagtctctacctgttagcatatgttaccagagtagccctgtgtgttcctacagcccagcttagaaatgagaactcagatgctgtggacagtcgctctttcaaacagctttctctgctccctgcctctcaggccacacccccggtgacgattcctggatccgctaagttcacccccaatggcagcagcttcagcatttcctggcagtctcccccagtcactttcactggcgttccggtaagtacgcagagcatagcaaggtgagccaaggcaaatgtacacttagagaacaaactttgaaacagccatgaaaaagatgggagtccatgcccaaaagcgctactacattttgattcttctctttcttgaggttgtatctcaaggctagccttgaactctatatagtctaggatgacctttgaactgctgaccctccactgcccaaatgctgacagtacaggtgtttaccatcatactcacattccaaaggcgtttgcttctatcttttttttttaagatttttaaaaattttatgtgtataagtattttgcttgcttgtatttctgtgcgccacatgcataaactgcccatggaaaccagaggaggatattagatcgcctggaactggagttacggatagttgtgagccgcccgccgtgtgggtgctggaagtctggaagagcaggccttcctggctcagctagctctccagtcccacatgtatatttcctaagcgactcacatttacctgcaaaggccgctggtgagttaggtggctgcagctagggaagatgttctgactgatagaagaagctgtcagctgttggtgttggaaatgtagtttgtgttggtgttggaaatgtagtttgtgttggtgttatagttatgtgcccaaaagatgattgaattcgtagcttgattcactcttcttacagaaaagctggtgtttatcattataaaatgctcataaactttgttagtttgatataatgtcttaaagatatgctacttgaaaatccaaaaattaaataaattgaaatcacagtttttttcaaagcccaagcaacccatctttgatggataatttgaaagtaaatgaatgctaaaatatgcaccagtggtttatgtaggaaataaaaattaactcaatatattaagtgattctgataaatcaccttgaattaatgtggttcctaacagttcatttaaaaacttactgggccttacatagcttctcacagagtaccaagagacctccctgcacaacagccatgctcacagggtgtgactcctgagaagggtcagaactaggctcccaagagcagatggtagcttgtccctggccagttccggaggttcccagcgagtctagaagcctccctcggaggttctgagtaactggataaactctgtctgctctgcccatgcgtgtctaccaaactccataaaaggagtcagtgagcagccccctgctgacagggctaggcgaggaaggctttccagaacatactctggggttgtggtttttaagcactgtcataaataaggaataactttaaaagccactgaacagtggtggcccctgttaatgctcaaatggtgaccttctacatttttttgttagttttacttgtggcacaaacattgctctgcccatgtggccaccagataactgtgaagcatttcctctgggagacgttttccttggtggacaaaagcctagagtgatttgccatttgacactacctgtctgtgacggttagtgttgtcaacttgacaaaaatctaaaattacctgggagacaggcctctggacatgcctctgggaaattatctaattatcttgtgttaatagaaatggaacgatggagccaccatggttggcattaactctagacaatacagatggagaacaggaactggagaaaagaggagcctgcgttcatcattcctgtgtcctgaatgtggacacatcgtgtcccgtgctccaggttcctgctgcactggcttcccggcgtggattgtacccttgaaccagagtatgttatcacagcagcagaggaagaggctaagatgccttctgtgatggcctggtgtattcactctccccatggctgtcagtgcctgacagtaggaactgaaggaagagggcttattagggctactggcccgccatggtggggaaggcatggcagtaggtgtatccatggcctggagcagaaaggtgaatggtggtgctccagttggtgctccacttggctccatctttttttttttttttttccaaccaggcccaggccacagaatggtgccacccatactcagcatagatctttccttcctcctgggaaagctatcccagaaactcccagaggtgtgtatgctaaatcttgtcaagttcacaatgaagattagccaccatcacacctaaagtgaaagctatagttccaatttcagctacaggctgagagtgcagcagtttctcagctcctcacagcattccaaacacataggccacacggctggctcatcagtgtgagaagagcttgtcctggccaccacgctccacttggtgttcacaactgaatgcaaggcctctggctaggcacctgcatnnnnnnnnnnnnnnnnnnnnnnnnnnnnnnnnnnnnnnnnnnnnnnnnnnnnnnnnnnnnnnnnnnnnnnnnnnnnnnnnnnnnnnnnnnnnnnnnnnnnnnnnnnnnnnnnnnnnnnnnnnnnnnnnnnnnnnnnnnnnnnnnnnnnnnnnnnnnnnnnnnnnnnnnnnnnnnnnnnnnnnnnnnnnntctctccctctctccctctccctctcccacttaaactcactctacagcccaggcataccctgagtgtgctatcctgtctccagatccaccgtgcctggcttatgctgtgctggggtttgggagaagggggagttgttgttgtttgttgtattttgttttgagaggcctgggttttgagacaggggtttttttttttttaagatttatttattattatatgtaagcacactgtagctgtctctagacaccagaagagggtgacagatcttattaaagatggttgtgagccaccatgtggttgctgggaccttcagaagagcaatcagtgctcttaaccactgagccatctctccagccccgagacagggtttctctgtgtagccctggctgtcctggaactctgtagaccaggctggcatcgaactcacagatctgcctgcctctgcctcccacgtgctgggattaaaggcgtgtgccaccacccagctctactctgctctttttaattagaccattctagagacatggttctggtttgtaccggctgtctcttttcccagttcctaaaagtgtctttagcatgccagccaggattccttgtgttgtttgttttccaacaatgaaattttagaactcttccatggactttatagctgttgatagcctcagtctcgatgcaaccccccccccttttttcatttctgctttagtttccaggggcatcctagcagggagattgcacagaagatagatgtagtatctgggtcaactggaaagtctaccttctgtggctgtttctcatttattcttttcattttgttttgtgatgggtggtacttttatgggtatgtgtgtgtagaccggaagttgacacagattgccttcctcagctgctgccccgtattgtggcagggtctctgaacccagagcacacgttaggtaaaccgactggctggctagtgagggccctgggattggccgggctcccacggcgactccagagttacagatgcactgcgtgtagcttgtccattctgcatggtactgtgttccacactcagggcctcatcagtacgcagcgggagctataacaactgagccttcccccagcctctgcctcccatgtctaatttattcttagagtctctggtttgtaatctgcttcggccaagactcgagataaacacttcagcagtcaagcttgctgctcctattttaaggttgtgggtatatttttaaatgcttagtttgactctagaaagactggaatgtagctctaaaattattccttatactcctgaacgcctggcagtgctttcaaagaacacaaggttgggtgcctcccgtcctgtgcccttgctggtgggctcactttcctaactgcatcgaggcttcaggatcggcttgaaaatctcttctgtctttgtattcccaaacgaatgccctgaggttgctctcctaggtccacccctgagatctagtgctgaagagaagccttgggggacttcctatgggaagccccttctgagctgtcccgggtctcctgacttttgctttattcacttctgtgcgagatttcttgagtacttgctttagtgaaccccagcatcaaagcccttcccaacgtgtagccgtgcagacttgcgtctgtagacaccactgccctgccgcgcacacgtgcttctctagcctgaggcctaggagtgagcaggagagttactacagcagcatagactgagcggtgtgagtggcagtagtgtatttcctggaagctacaagcccagaatcgaggtgtcggctgttttacatgtggtgagggctctctcctggtttgtagttgtccgcctttagagctgtgccttcacctggctttttctggtgtgtacggtcaatagtaagagatggaagtgggggctgagagaggtaagcatgcataccggccctctacagtctctggttgaagtgtgtgcactcaagtgcactgtctggtatctcttcttataacactaatcctattgttgcagggccctactcttataacctcatctaactttaattccttgaagggcttattttttaatatagccaggctcaggatttaaattttccacataacgttttaggggaagcagggaggccaggcctggtggtatttgcctctagtcccagcacttgagaggaaaagacagaaagatcaagagttcaagacccacctccaccacataggaaaaaaaaataggaggtggggtctagctggaggaagtgggttgctgtggttgtgtctcagagttcatgtctgcttccagcctgagctgctttgcaaactcaaaagttgatcaggctgtacccaagctcctaccataccctctcccaccatagtagagaacatttccttgaactgtgaaccaggataaacatctcctgtgagccatgctgtcatatactctgtcttgaccacaagaacaataactctgaagatgctggggttttattttttcattgcctagaagcagggtctaaaatgctactgaaagattccttcagtcaaaaatcgttcctagtccatatgacaggagatcacaaggaacattctctagaacatatatagaagtgcattgcaaatccgaatcctgtgctatagcacccatcaactctgacctcgaggcactcatacgacctttcttaagcaattgcttccattccaaaacagccctgtagagttgtactgctcagcacagcagctggcagtcagctcgtgttgcaggatgcccactgttcctgctgtcagagtgggaaacgacaaagtcaaatcttcctatgtaaaaacatgtgttccagatccctcacgtgtctcactatctgaacagattagccatgatggaaaaactacaagttagagttctttaaactcactggaagtcatacgtactgagtaagcatggtgtgggcacatagcataataattgtatttatttataaataatagcatatggtactatccgtagtgatacaaagtgtactttatatttagtaaagttgacttcaaggtagacttttggacacgtttgagatacaagacaaaaactagaatgtagagagcaggccagtgagatggctccatgggtaaacagttgataagactgagttctgtccctgagcccacacagaggtggcacaagacagtgggctgtggctggagtagacctggccatattggttttcagagtatgactgtggaagtgtttggaacttggagctggaaaggccgttgtttgcttagagataatgggcttttctgtgggagtttggaagataatgacaatgagagaaatgttggcagcactcccccactctctgggctctgaggtgagttaaagagcagttatcaggtcagcatagctgtctcataccagctgcaatcccagagttcctaaccttggcagtttaaccctgacgttcattttactctgcagttgagaacaaaacctttctgctttgggaaacatgcaagggaagggggaggatctgtccgtcaacctgcctgtccttgtttcccaggtgtctcctccacatcatcccacagcgggctcaggagagcagagacagcacgcccacacagccctgtcctccccgcccagagggacagtcaccctaaggtatgaccgcttgatgctacttcacctcaaagggatttatttcctaagaaatggagaactagcaaaagggaaggaaatatgacccactgtaaaatgtcttcccaggccatgagcgcgcttccctcccttcccatggtttcctaaccagtaactagttaagggcacttgtagtgtgtaggctggagagctgtactcactgtcctcgattaacttctctatgataggaacagttagttagttttagtctacatctaggagagtctcctaggaagcctcagccagaattctgaacactggaaagacactgaaaatttggaagagcactgttgttctctgatgttatgtgttttgtgtatatttgttgttgtttgtgtgtttgcttgttttgtagtaggcagggtactagggggtggagacagaagatgcatatggtgcacatgtggggtttgtcttggtggggtgtctcactcacccactgcagtcaagctggtccaagagcttgcagggatctctgtcagcatctctcaccttgctctataaacactgggattacaggcaattgcatgcacgcgctatcacatcaagctccatataggttccaaatgtcctcctcgtgcttggtgagcagggctgccccaggtccccctccacagtccccacctcttgtgtctaccccttacgcttacaccatggccaaggaaacatttccatgaatgggatttagaaacagtgtaatcacagtggccagagaagtccccagccctacgggaagtcctactccatgctgggctttttgtcttctgttcccccttattctttgcaactctccccagaaggccgccccgttcctgtccctaaggctgtctgtgtgccgtctttcttacaggaagcccagaggagaaggcaaaaagtgccgcaaggtttatgggatggaaaacagggacatgtggtgcaccgcctgccgctggaagaaggcctgccagcggttcattgactgagccattcctgcctctccttccaaaggaagctactcaaggcccagggaaggccctgcctggaatcccaggaatataattccttggtggaattaaagcaaaaaaaaaaacaaaaacaaaaacaaaaacacagcaaaaaatcagcactgcactgctctgagaaccaggcgagagcgccaaggaggaccttccttcgaaggaaaagcccgcttccttagctctcagtctggtcttaaagctggtcttctgtagcagcttagccaaccaggcccatttcacctagagagaaggcacattttgataagctttctgaactctggcattttcgagggtttttgacactgaaaacaatatgcccataagctacacaatatacccataagctacacagtctgaggtagcatttgtataaaggatagtacctaccttgtgaataggcatctctctgtttttccgtgcgactccttggatcagtctgatcatgatgtatttcaaaaaagagtttttctatgtctgttttgttttcaagaaggaccccaagtggaaccattgtaaagatgttagcttggaggccctgagtaacttacataaggccaaaagtgattgacagtgagtgcgagtcacctcagccatcacctgaggtcaggacaccaagaggcactgcagaaagcatctgaaaatcgtccttggatcccatgtgagtggtggcaccactaagtctctgcctgccatggctcagacgagagctggcgctagtagcaatctggtaaaccttgatgctgctttcagggatatcacacacactgcagcctggatagtgtgtcctgcttggttctgccaagaccatagccaggactctgggttagcattctgctctccaaccccgcccaggtagaaaactccagactggcctgcaggtttgcttccagcagagcatagctgtgggaaagatccactagggcatcaagccaacttccattgtgagtgcacttttctagatggcgaggggatggctaggggatgagttagtggactcggtgacgtatatggataatggaacgctaaactttgttgtcttataggaatattgaaactatgaattaagaatttgctcagaaactaacttacaggatgcccaaaggcagatgcatcttggtataggactctctccattgagtagggccaaggcttaggctgggttccagccattggaacctgatgtacttggctgttggaagggtggagcttggagcagctatcaagccttgtaaggacttattctgtctgccctgcttaagagaggagtgtcctgtacctatgcatggtaagagcaccttataggagccactaggtagggatggggaacatggtgtcagcaatatgaatgttaaatgaacttgcacagaggaaaacttaatatatgtttaaagattgtacatagtgcttttttacagagtagagaaggcatgtaggcgtctgagacacctctttgtatataaggggtgtatatggaggctctacagcggaacacccttaactggtgcgttcatgtattttggcaattttattttttaaattcatgtggctttttaccacggaaatcaaggaaaacgggaaagagatgctgatcttttcctttggatacttaaaaggaaaacaaaacacttacttcaagagaaaagagaaagctttctctgatttccctgtaggttgataaccaacatcagccataccacctgttccagatgcttttacctgcaaccaggaaacaactttttgcttttaaagtccagagctagatttctttcccctgggcatgtcctctccttatctcctgtagcctcactccctgaaatggtgttctagctgctccaagaggccctgagcaacgtggagattgagacatcaactgtttggtcaagttcaccatgtgcttaaataacagatggatcctaggctagagggttttctcctcagcaaagctcccttaatttttaaaatctcagatgaagactttaatcaaaacattaaagtgatgtgaaattcaatccaccttctcttgaagaacttggaggtgaaggaatgctgtcgtctgtgtgagagagagcagtccttaggtgctgagctgtcgcccccagaaacacagcctaagggcaggtctgagcccgcttagctgcatattgtcagcacaatcgtgacaccaaatgcacctgacctgagtccctcgttttctcagaaacctccatcgtgccagctcgtgtgcatccccagcccacctagggccctcatctccaggccagccttaggcactgaacatttccttatctggcttccaaggtgcaggcaaatcctgagtgcagctctggacacatgcccattccctgtgtggaagggtgtaatgccagggaccggaagctctgaattgcaacatacagttaactgattatatgagttactttttgtgtgagttacatttcttaagtagttattttgttatttggggacccaaacaaagtgccaaatgaagcctgacttttcatttcatgccatgtccatgaaactaagttctttttgtgtcttcattttgtggagaaacagaaagcatgagagttggtgagctggctgctagcctgaggctctgtgcaccccagggcttccagccctgtctgtcaaaggagcagtgatgtaatgaattcttgtccatggaaatgtctagttcttcttcttccatgatgcccattcttacaaaaaaggtttctcatttctcccggaaaaagcatgtcacagtgactagcaggacattctccagccagctaggaagcaatgtgtgcaacaggcaatagtttccagccttagccttcctggaatatggacacttattttgtgaaaatctgtgagataacgtggagaaacccccaggtagcatatgtgtcaagggggcagtgcgggagacctgcacacccctatcttctgctcatcttcttgggctgctcagctaggactcctccatgtctgctgtagatgtctgacacaagacaggagctgcttcggccaggaactatccatcaggctcacctgccaccttatgtctgggaagttaggttctctggattagcaaaagctagcgccaggaagaagacagtgggtttccaaaccagagtggacctctcgtgcacgttgatagtaccatgtccaggaggctcccttatgaacctcccatgaccaagctataaaggacgatcatctctagagaaaaacattactgttgagctctccaaaaattccttcagacttcatgtatgttggaaaaattatttgaagccaaattgttccccattgcaattgaagatgacaagatttggagtctgccatctctggtatccaagaacaagtacgtcacactttgccagaagccctgggcttaaagtgagtagtgagcccctataaaagagtctgtttcatctctcacttcagctgccctgcaagacaaaggtggcattcaccggagaaggttctgagaaaagaggtgagaactgtacatacaagaatctgttgagcatagcagcagaatactgtaaatactactcatttcctcagggagacaaggatgctgtgggaagagatctggagaaccccgagaccaggaggatttttatctcctcaagtcttttcttgtcagaacaagtttttctttatgtaactctccgtgtcatttcaaaacaaatccgtgttcagctggacaggcagacgacttccatgaggtgtggcagagggactgtctgttcgtagctgccctaaagctgattgaggtttgagccacaggtgaagagcctgctgggcatccatagacatggtgaggcttcctctgaatgtaattgggaacaaaaagccttgctgttccttgttgtagttcctcagtctggatgctgtttattatacacagcatcctctaagggaggaaaagctggccacgacgtgtggtttgctttagtggcatgttcaggagcacactgccatggactctggtggacaaggtgctgtctttgctcttgtccgtaggatttccaccacccacatcagctgtggcattgacctgtgtgaatatgtgcggatgagtggagccagcatggcccgtcagtatgacagcgttgggagcgtgggtcattttgaagggcatgttaggcatatgagtcaactgacaattctatttctgtaagaaagaaacctaccagcagcacacaggtgccaccaatcctcccacgtggagggatttctccatgttacgatttcatcctgtattttctgcattgtaagtagccacaggggaagttagtaaataagatgaggttagcacttttaggtaccagttgtcctgagtaactgtactccaacagagcaaggacatatgaaatgtactcaagacttgcttctggtgacagacttggaaaaggcccatttccaatgacacacatgctttaaagagtgtacctatcacaggaccaggaatcaaaacgggaattttatctcctgtcctgttttgtaagtagcttttttttcctaagacaatctcatgttttataacttgttgtgtgtgtctgagaatcataatggtaatgtgttatggtaaatgtaatcttaaatacaataataattacaacttaaatttccaaatgaaagaaatacactgcttaggcttctgcaagagacatgacacttttataataagcattagtacttctcaagtttaacagaactggaaatattttacaagataccgcgttttgtaatcacagagaacatgaacactttgtgggaaatgaccttggttttatacattgtagcttattttttaaaatgcagtattttaaccggcaggaagtgtagatatggcacacagttcctgtccctcaatccaagggctatgcctcttttaagcaagtgttttgatgcgtatcttttcaattaaccctctgagcaagggtagaaatggagaccagatagcaaggtcatttgcaagagaatcaatgaagcagcaactattccctcatgaccagtgtgtattcaaagcatctttgtgggggcagggggcatgtcacatgaagattcaccttctatattttaaacccaagaaaagatgctagcacataggcttctaggccaaggaagaaatatccctttagtgtggtatgagttttcttatgagttttcacctatcagaactacatgcctgcattttataagcaagcgtcatttggtggcactgtctaaaactgtagtatatatgcccaaagaacctttaaacggtcagcagtgtttgtgattttgttgttcttaccaccgccaactgagaaacttcctcatcaggaccgtttgacttttgtttgtttttcactatggaaaactcacaggcacagaaggttgtgagcagaaaaatgacagaattcccatgggacgtaagaaatgggagccacatacacagtgtgagcactgccaaggctattttaagctgtcccacatcaacaagcccactcgctgttaagaaaacatcttcccaagagtttattgactcaaaaagctaggccagttagccacgtatgcgacagtttcagagtagaagctgaggtggggcagctgtgtacctgccaggtaactgtaccagttactgagaggccattctagcttttctagccgtatcttccatgtacggctgacagtctgttagacgggaactataaaggcattgtatgagggaacagggggttgtgcagccttgcacccagtgcctgagtgggctggcttgcagctagctcgccattgccatcccctaggatagtaccactgatggatggcattcgggtgcccagcaggttttcactgccacatggttttgaactatgtgcgacttactccacctgtgcgtggaggcttccttccagagactgtgtgcgcatttagacactttagaacagctggaaaaggactgcagatgttcagggcgtgtcaggaccaacaacggtgttggactagacaactgacatctaccgaacaggaaggaccctcactcagcttttgacaatcaggccaggttgccagatccaaactggagacatggcaccacccgacaattcagtgttgaccactaacatacgttctcagccaatcctgcagaccaagaaaagctgtgtgggggcagaggcatcctgtggccacagtatcagctatggcaaacttccacacttgtgagctaacaggcccagattcctccatgagcatcttagactcatgtgctgccacgatctgaacagcagacatttcaaaagagggaagacactattcctccctagaggatatcctcatggaagacaaaaatagaaatgtcatctcttcagcttagcattgctcctgatcagaatgcactaagttgtcacccggctcttgcaagagctgcctcctgccatacccaggccacaccccaaagtactgaatagctgtaaccctgatactgtgtctgctaccgtgaccactgtgatgaagggcagagggagggaggaaggaagggaaagagggaggcaggaaggaaggaaggaagggaggaaggaaggaaggaagggaggaagggggacaaagtaatcgggagcctttgatttggcagccgggtaccctggtgctttacagtagcacatggcccctcccatgccagcgccctctgcctacgctttgtgctccctagcttcctaggccatctctctccttgtcccactataaatgtatatataatttcacctctgatctggtaaggcccctgcttcagaactagcaggcacttaggtgttttcaggagtccattcaccttaaaggaagtttttccacacaggcaacctcagtctctttctcgcagggtgaaataaaactgagaataactttgtcacatgagtggagggctacacacattagactttcattgttctgagaaagtacattattttaaactcttgtcttctattgaagtctattgaagttctgatgtcacagggagagttctgtatggtaaagtatgtgtcattcagacattacttcctttgatcttcatatgaatctagtatagaaaacaagtcctaaggccactaatagccatgccaagacactggctcaaacctatgagtcagcaccgtcattacctgcagagagagacctggcccagctggcctccgctgtgactcagccgtggattccctgggcccaccatgttctcagcccagaagtaaagagcaccctcattcatgtcactaagtgcaagtttaatcatccccaagttccgtccagtgaaatggtaaagtgtaggaggagtttgttagctaaagcaatattctgataaaaatgttgacttcttaggaaaaaatagcttgcttctggcctctggcctttcagactctaactttaagctgatgctggatggtggttaacaaccagctcagaattaccatgtgtagagacgactcaaaacgacctgcaagcatgctgcagtgcctaggtcagttaagttgtatgtgtctgaatgcagtttctgctggcaagctttgacattgctcccactgtggatgatgataaggctgtccagtatatgaatacactccatccaaggcttccagggtgtcaggtgagcatcctgagttcagaggaaagctctcacaagaaatcctgtcataagaccagaaggaacccccagacagctagactggccagttccctagctgatgagcagggaggcagttagtttgcccctttctcctctgacaaaaggcagtgggctgtatggtttggctgcctgtgcttggctggcagtgcacagaaagggcctagtgttagcaagggaaaaaacaaagcgcataccagatactgaaggattgggttagagtcaaatagtagttggttctttttaaaaatgttccttttcagtggggattgctgcactgtgaccctccgaggagaacaccctttgatgtgacaaggccacctgagcgatccctaagactgattaactacttcactttctattacaatcagtcttcccaaaatgttcattcagaaaatagccaaagcagagcatggcagcccctagaaaggacaagaaagggattactaaagaacggaatcgagccggacgtggtgacgcacacctttaatcccaacacttgggaagcagaggccagcctggtctacaaagtgagttccaggacagccagggctacacagaaaaaccctgtctcaaaaaaccaaaaaaaaaaaagaaaaaaaagaacagaactgttggggaaacacagctgtctcctgttttgtctctatctgtgactggaaacagaaaccaacactctggagaagacataactttaagtgagagtctgaaagaagactccccatctagtgccatctgagcagatagttgggtagacactttctttcccttcttgattctcatctcctaacccggaagccaaatgtgtttgttgccagatccagagacagctattattgttacttggttgctgaatgcttgctctgaagtcaacaccccagtacatggatgcttccctctagacactcattctgctcagcgagtggctaccctccctgcaagagaaagccgttctctgtctgagcagatgtagtctctgggctatgaggacagggtctgcattggcaccaccctgccacactcagcccacggcaaagcagcagctactcacgtccatgtgccttaagacactcagtgtggtcacctagccagagctagagtcagcaagacaggatgctgtgttagggtggaagagaatccaagagggctcagactaaatccttccaggctctgtcccctccctgccgccctgctcaaggattcaaggggatgggattggccttctccacgtggcgatggagtttagttgctcctgttatatatctctggaaagcaaacactgcttccatttgcttacctgtcaaacattcattccttggcccaggacaggctcatccctcatttcaggcacagacagcaagacagagtggacagagggctccctgagggcttgtgattgtttgtgggtttgagctgcccctcagggatctgtccctgcatgggggaaggatgcctaatgtggcagattgcactcagagagagggataacttttaggcccttactctatatccttactggaagtatgtggctgtgacatggcataccagcaggagctgatcacagggagaaagcttcaggtgaaacctagatgtttgagaaaacacgtcacactcctaaagcatgctatttccatggcttccaaaactaaaagcacctgtggctcagctagcgcatgaacatgccagtagtcacggtttcctatcgtgcaccctgaaatccctatttttgtaatttatgattagactgtggtcagtcacttaaataaacactcttatgaattaactagtataccctagtatagtttccaaaatatatcatactgtatagccctatgtgcatgaagatctcagggggaggaagtacacgctaggtcccaaagggtccagactatcatcaaaagcgcatgccaagtggcctgaggccactgctcatacacgagggggcgggggaggggatatgggctgcagcccctcagctgcccttagtggtgggaatcagcatggtcgctgttaaaggtaagccatcttttgaatttttcaacaccaaatcttaaagtatcaaaaaaagttaccgaatgttaaaagtggggtcgttagtggaaatgttgtctgtaggaagtttttctcatagtgtttgataaaaacaacaaaagccaaactgaagcccaagaagtgtcctctgggggacactggcattagggtggtcgatgactgaaggatacagcagtgctgtcctgtacacagagctcttttgaggtacaatctttccatcgtttcaggggtaagtacttccttacaaagtctttaataatgaatgaatgtataaatttataaactatgcattttcagagagaaacatgtattttgtatcaaatccgagtacttttttttttcatagagatttatcacaactacagattattcaaaataaatgagaatgccaatcctcataagggtgtggggtgcctttgtttttcactctgatggtttcaagaccatgcatccagactttgatctgaaaagctagccagtacagtaggcgaaggatgattcgccttctcctggaggggaccactcgcacaccacccagttcttagggatggataatttagtaacactgggttagcggatagaagggccagggtgtggcttacagatagagccctggcctcacgtgtgtgaaggcctgggttcagtctccagtacccaagtagtaacaataagcaggcaggcaacgctgttaccatagtaacattacattaccattgttaccattgcatcggctaaagatgacccagcttaggtagttgtggctaattgtcgatccaactgtgggtgaggaagagtttaggttatagttttcaaagaacaaaatataaagttattgtctgacaaggcaaataattgtttttttttttcaaaattacttggaggtgatctcttatagaaaatgtagactatacccagatttctccagccttgtgctgataggccttttcacggagcctttcccactggtaattgttctttcctccttggtcagtactcacctcatcactccagcagcctccccgctatctgacaaggaggaagtgaaccccatttctttgctgttccggttctctttctgtatctgtcgaggaggtttctaggctgtctataaaatatggggaaacacatttctaaccctggtacttatggtcatacaagatatgtttgctccctaagtaggagctagaggggagggcaatgtgtctttttacatgatttttagccaaatccagctgttctgatactatgtttctgaatccttttctgactgtaaatactgcctgcagaggtcccggttgacagccttttctgagactggtcctcagccatgctccttgccagctgttggcacattgtacatagatgcgtcgagtgtttcaatgatgttggttttctaaatgctattctctaacacattttttgaaaaaaaaaatgtctttgttgttctggactttgtgtgttcgttttacaaaaacatttcctaagatttaacaccaggaaaaaatattttaaaatacactggtgctaattggaaaagaagaaaatttttaacttcaagatttacaaaagaaaatgatcacagcagttaactgcactttcccacggggatggctgctgtccacttacaatgggcatcaagaggaccagcaaaagtttacagtagtgatgacccattgatgtgtcatagagcaaggagtccttgtcccccagagaggaggatttgctgggtagtcctcaaagcatgtagtagagaagggatatagagttaactctttagaaatagtcttctggtccttggactttcatgttctgtaatgcttagctgtaacaatgaatatggtgttgccaatctagtctgacttcattgtcaacctgtactgactctgtgtatggctctgtccttggcttgcactggcacaaaccaagccagaacacaagtctttcagaaagaccattctgatttctatgatgttcacacacatgaatttagatgcacttgtaactggttaattaccatgaagtaagtctaacttccacttaataaaagtttttttgtgtatctgcttctatctgggagccattcatttatgtaaagcttaacattcatatcaagggttgttgtattggtgatttgtttagttttccagaagaatgtctaaaacagcctgaggggggggttatttggctcatagttcatacaaatgcacactccctgtgctcagcctgctgtcccactgaaccactgcctgtgaccctgtgctaggaaaacaatatctagtgtgcattctggttctaagccagctggtcttcctctgcagagacctgctatccactagaactcactatgtccaccttcaaaatcacagatgctcttccacttctgttcagctgttaggtctcctgttacacatagacacacaccaaaccacaccaggaaagcttggtgctactttcgtagccaacaagtagaggtttctttgttctgagccatagcatagtgcaggccactttgatgccagctctactttgtcattcatgctcaggcctcatgctcctggcctttgacttagtgcctgtgttttagccacaaggacacataagaacattggtgttggtgaacagtgctcaaactacctatatggcctccagggcctcccagggctccaggatgctctccagggcagatggcagctgcaggaggctggaaagccttaatgtacaggaagcaggaaaaactagggagggtctaagctacaagtaaacacctacaaagtggtatgaaatcatacatccagccctttatagctaggggttctgcacaagaattcaaccaaccacaggttggaaatttctgaagtgggggagtcattttggtactgagcatacaaatttttcttgttatttctccttataaatagaataactattcagataccatctacattagatactgtagataatcttgaggtggttggaagtattccaggagatgtgtgtaggtcacgtgaaatactacatgacttaatggaaaggacataaggataaggatctgtgtgctcagggggtccctagaaccagcccccccccccagtgagtcagaggagcagttgtatttgctgtctccgtgggtactgtagtgaactcataggaacataacaaattctgctaatgcagactttaaagcagctgagcgtcaagaaggcccatgccagccttttctcgggggtgcaggctaactcctcgctgtggccaccatgttgctgcattactaagtgagctgcacaattttaaatgaataaacaggttgtgtattctttcaatctgccattccctggcccaagccaaacgcacagaagtgggcatttgaagactgacacagacatctgttggctctcaggactttgactgttctttagaatatgtacattctcagaatcaccaagtaccaatgactatcacttacatagcaattatctaacacatgagacaaaacgtagaattacatacaccatttttatgtagaaatgttttgtacatagaaaggatttaataagtggggaaaatgaatgcttctaaatgaaataaatttcagcattggtcatctgtgctattaaaagagagtagagaggctaggctggctttaggatataacacactttcaagagtggagtctgggtgtcctggtaaatggtcctccagctctagctgcacagcatgtagctatagttttaaagctgaaggagagtgagtgagatgctgagagtaaaagcaggcccttctaccttgaccccatcaccctgtcagcctgctggtgctttcaacccgtgtaactgctgcttgagtagatggcatcactttcaatttaattccaggtaagtattgctgggccagcaaacagcagcccctaagaacctaacagtatcaagtatggggcccacaggcacaggtagaattggtgaatgccctctgtgagaaagggaccatctgctgctctgaacagcatagagtgctttccaggcatcaagacactggcctaatggctgactcctgagtctgttcccccaaaggatgctactacaccctgggacctgaaaacaaccagctgttctcaccaccaagtaaaatcccacactagccacaaaacctagatcaaatccttcaagcagccgcagtcagcgggtctggccttaactcttaatgccactacagcctgtggggtgcagtccattcatttccctggctgactgcactgtcatgccaaggccatcacaaggaaacatgccaagtcaagtattgtaatatggctcatttcaggcctcgttagcagtggttagagatgtggggagcctactgcacgcatgcagctggcagtgtggaataaccctgctcagatacaattaagcacacacaactagggcgttggccagaaggatgaatgactttggaggaaccaaagtcaggcacatgtctggaaccaagggtaagatgccttgggaaacagatgggctttcagcgctatcttccatgactttgggctttccaaccttataggccttcagatcaggacaccataatgccaagagacacgctaaagatctcctgaactccaaatgtcttttttttttttttttcacctcatctggagatgcagaccaattttccgcagtgatgagggccaatgccctgccgtacttctttcttagcctgttgactctagggaccaaggtggccagggtgacgtcttagcttccaaaccagttggatgtttattgtgtctcttgccagaaacacttcctgctctgagtcaaggcttctaagccagccacaagtccataagacaggaagccaaaatttttgcttatgggaactgggcatagtagcatttaattccacactcaggaggcagaagcaggcctcttgagtttgaggccagcctgatctgcatagttccaggacagcctgagctgcacagagaaactctgtcttaaaaaacttatattaacaacaacagtaataatagcagctaatgggtcactagaagtgatagtgaatggtaccattctcctcttgattcctaaaccttcaaatcctggctaccagagaagccatattctacattgattcagagcacatctagccttctgcagagctctgccctagcctgcaggctgttgccacctagttggcatagaaactgcattataaaaaggtcactcgactgttctgtcaaaccaactgcttcaggctggtgggaacgtggcaagaccagtgaatccatgagcgtgaactcactgctgtccttccctggctgagcggtgagttcctttgtcagaagcaatgccgtgtagattaccatagtgatggaaaagacatttaatgagttcatcgatggcagtcctggtggaagcattgggtcagaaaagcaaatctataaccaaaataagtgttccagtaaggacaaagcattgacctttccacgatggaaagaatctgatgtgttcagtttaccatgagtcactggctggtggctccatagataatgatgtattaggagctctgtgttggtatttgccattggcagatctggtactcagcaaccacaacagccagcccagccttgtgcggaagtcatttatttccttttctcagataaacaaatgttttaacaaagaggtctgtgatggatgctacatcctcatttggtccaatcatcataatataatcagacctgtgttataccttgtggaagaagcaggtgatcaagacccctgaggactaagttatgatactgtagtagagaaataatagatgtcttaggtaggtcagtagagtaatgtgtctacaccacatccaccctccatgcccagcctggccagcacactctgctctggcccagcttggtgagtccaccctgggagcgataagcctgctccctccttcatcctaacgctcagatggagcccgaaccccacacccagggctggctcagtctgaaggcctttgcctgtggtttcccaacctccatgatacaaacaggctaaaagaattcatatccaccaagccagtcctacagagaaaattagaaacgatacatcagacagaagagagaagtgaacatggccaagagactctagaaagaaaatgagtggaactataattactaaaccataggatgcaaacaccaacactctacacacacttgtcaataataacaaatattagaggccccaattgtccaatcaaaagtcaaaggcagattaaacattaactttatcttactgttgtctacaagaaactcggctttaaagattggcagcgtcttaatttggcagctcttaacctgtgggtcatgattcctttggaagttgaatgatgttttcacaggaatcgcctaagaccattagaaagcacagatatttccattacaattcataacagaagcaaaattacagctatatagtagcaacaaaaataatttcacggttggaggtgttaggggattgtagcattaggaaggttaagaaacactgtcttaagaaaagacatgcaaaaaagtattctaagcaaataggaacatgaaacaagcaggcactgctatcctaacaatgacaagacagacttcaaactaaaactaagatatacataggacacttcattctaatcgagggaacaattaactatgaagacattataatcctaggtgtgtgtgtgtgtgtacatatgtgtccaattttataaaagtacactactggaactaatgatacagatgtgcatcaacccaataacattaaatggatctggcagataggaacagaatatccattcaaacaccaaaaattatcgattctaccaatggcctagggaaatgtctctgaaaacagactacatcctggaacacaaaacaaatcttgccaaattcataaaattacagtgattccatgtgatcacacagatccttacctccaaattgccttcctcccattcctccctatcccagcccccaactctgtctggcatcccctgggagcccacagcacaaggcagggaaacggaggctgacttctccctttaccccctcctctttcctaacttaatcctctgcatcatccccagctctgggcctggctgggcctcattctctgcccccatccccaggggactaagcagatcttggtagaacaccctgctttccttccccctgtggagtccttcagtcacccagactcctagcccttccccattactgcatgtcagctcccactatctagaatcatattttacccagaactcctttggccacacatatcagaatcctagaatttcataccaggccacatacacatcattccctcctaagaagcagagagagcaacagaaacctaggacccaaacatccacttacccaacaaagacaagaccagacatcagcaccaggaattacagtcttcccaagcccagatgactagataccactgtaaacatgcaatcaatataagccaggacagtatatctccactagagcctaacaaccctaccagagagttgcaacatagctgaaacacaaagcaaagaccttaaagtagcctttatgaatagcagaggagtccttaaagaaaaaaaaaatcgctcaaagaaatctatgaaaacacaaacattggaagaaaatgaatgaaccggttcaagtcctaaaagtagaaatagattcaataatgaaaacctaaacagatggaaatctggaaatgaaaatttgaggaacttaaacagggacctcagagacaagcctcaccaacagattataagagacaaaagagagactctcagacgttaaagacgtgatagaagattttgaccaaaaatggatactttggacaaagaaaatacaaaatctgaaaaaaaaaatctgccccaaaacatccaggaaatctggacatgataaaaaaaaaaacaacaaaatataagcacatgagacacccaagaaggaagagaaacctgtgtccaacacagaaaatatttttaagtaaaaatggcctgggtggccaggtgtggtggctcacgcctgtaattacagcacttgggaggcagaggcaggtgaatttctgatttcaaggccagcctgttctacagagtgagttccagaacaaccaatactacacagaaaccctgtttcagaaatgaatgaatgaatgaatgaatgaatgaatgaatgaatgaatgaataaataaataaataaataaatggcctaaagaagataactatcaagatgcaagcactatacttaacagcaaacagactagatcagaaaaatttcccttggaacataataatcaaaatactaagcatagaaatctaaaacaccatcagatccttctacaaaaggctatactcaacaaaactggaaaacctggacgacatggacaaatttctagacagataccaggtaccaaagttaaaccaggatcaagttaacgatataaacagtcccatataccctaaagaaatagaagcagtcattaatagtctcccaaccaaaataagctcaggaccagataggtttagtgcagagttctatcagaccttcaaagaatatctaattccagttctgcacaaactattccacaaaatagaagtagaaggtactctacccaactcattctatgaagccacaattactctgatacctaaaccacagaaagatccaacaaagatagagaacttcagaccaatttcccttatgaatatcgatgcaaaaatactgaataaaattctcactatccgaatctaagaacatattaaaacaatcatccatcctgaccaagtaggttttatcccagggatgcagggatggttcaatatacggaaatccatcaacataatccagtatataaacaaactcaaaggcaaaaaccacatgatcatcttgttagatgcggagaaagcattgcacaaaatccaacacccattcatgataaaagtcttggaaagatcaggaattcaaggcccatacctaaacatgataaaagcaatctacagtaaaccagtagccaacatcaaagtatatggtgagaagctggaagcaatccccctaaaatcagggactagacaaggctgcccactttctccctacctattcaacattgtacttgaagtcctagccagagcaatttgacaacaaaaggagatcaaggggatacaaattggaaaggaagaagtcaaaatatcactttttgaagatgatatgatagtatatataagtgaccctaaaaattccaccagagaactcctaaacctgataaacagcttcggtgaagtagctggatataaaattaactcaaacaagtcaatggcctttctctacacaaaggataaacaggctgagaaagaaattagggaaacaacacccttctcaatagtcacaaataatataaaataccttggcatgactctaactaaggaagtgaaagatctgtgtgataagaacttcaagtctctgaagaaagaaattaaagaggatctcagaagatggaaagatctcccatgctcatggattggcaggatcaacattgtaaaaatggctatcttgcccaaagcaatctacagattcaatgcaatccccatcaaaattccaactcaattcttcaacgaattaaaaagaacaatctgcaaattcatctggaataacaaaaaacctaggatagcaaaaactcttctcagggataaaagaacctttggtggaatcaccatgcctgatctaaagctttactacagagcaattgtgataaaaacggcatggtactggtataacgacagacaagtaggccaatggaatagaattgaagacccagagatgaacccacacatgaaacttatagaggagaacttagggaaaagcctcgaagatattggcacagggggaaaattcctgaatagaacagcaatggcttgtgctgtaagatcgagaattgacaaatgggaactcatgaaactgcaaagcttctgtaaggcaaaagacaccgtcaataagacaaaaaggccaccaacagattcggaaaggatctttacctatcctaaatcatatagagggctaatattcgatatatataaagaactcaagaaggtggactccagaaaatcaaataaccccattaaaaaatggggctcagagctaaacaaagaattctcacttgaggattactgaatggctgagaaacacctggaaaaatgttcagcatccttaatcatcagggaaatgcaaatcaaaacaacgctgagattccatctcacaccagtcagaatggctaagattaaaaattcaggtgacagcagatgctggcgaggatgtggagaaagaggaacactcctccactgttggtgggattgcaagcttgtacaaccattctggaaatcagtctggcagtttctcagaaaattggacatggtactactggaggatcccgcaatacttctcctgggcatatatccagaagatgttccaactagtaagaaagaaacatgctccatgtactggctagttttgtgtcaacttgacacagctggagttatcacagagaaaggagcttcagttgaggaaatgcctccatgagatccaactgtaaggcatttcctcaattagtgatcaagagggaaaggccccttgtgggtggtaccatctctgggctggtagtcttgggttctataagagagcaggctgagcaagccaggggaagcaagccagtaaagaacatccctccatggcctctgcatcagctcctgcttcctgacttgcttgagttccagtcctgacttctttggtgatgaacagcaatatggaagtgtaagccaaataaaccctttcctccccaacttgcttcttggtcatgatgtttgtgcaggaatagaaaccctgactaagacaaattggaaccaggagtggggtattcctgtgacaacctgaccatgttttggggaggactgtggaaggactttggaactttgggcttgaagatccattcgctgttaagagctctgtcagatgttgtgtaggagcttagaagataatgttgaaaacagtgcagaagatggaggcctggcttgtgaaatttcagagggaagattaaagactcttttcagggccattgctgttttgattgtgaagattctgtggttctggttagctggggctgaagaatcagctgtgattaacaagataccagaactactaaagcaaaaacttggcattactgggacgattgatgctggttagctggagctaaggaattagtggtgattaagaagagaccagcatcattgaggtgacaccttccaggaagtgttttctgaaagcacagaggctgtgtcccagagatagccaacgttgtaccttgtgctgtggctggacttggtaatatgtaagagtcacccaggtggtactggttttgaaggcatgaaggggtcacgcagagcagctgaggctttggcactgtgagaggccatggaaggccattggtgaaggtgcagcctcagttgaaattgacagcccaggactgaaggggtcatgcagtgttttggagatgccagtaccatgagatgatcaccaagagcagcagcagtggagtacaggcatctggagcctagaggatggcgtgtgtgctacaaagggcatggctggagaagcaacccaaacccttggaggagcccagaagatcataatttggatcccaggcattggactgttggagattgatttttgcttttgattgtgactgtgccctgatattttccctcttgaaggaagaaactattttagtggagcccacagttaagagacttttaattgtaaaaaagactttggattttaaaagagatggacattttaaagagattgaaattttaagaatatgtaaagactgtgggacgtttaaagttatttatatcttgggaatgaataagaatgcaagggctgaggcttactagtgatgagtttgtgtgtcaagttgacaaggggtcaattgtactggctagttttgtgtcaacttgacatagctggagttatcacagaa

SEQ ID NO: 326 - DNA, 13230 bp, Mus musculus
cgcccaggacaccgcggtaggccctgagcgcgcgggcgcagggcccggagaggcgcgcgccggcccgtggttgtcgaggtggtggacggcgacgaggacgacgaggacgctgaggagcgcttcgtgcccctcggacccggccgtgcgcttcccaagggcccctcccgaggcgcggtgaaggtggggagttttaagcgggagatgaccttcacgtttcaatcagaggacttcagacgtgactccagtaagaagccgtctcatcacctgttcccactggccatggaggaagacgtgagaacagcagacaccaaaaaaaccagtcgggtccttgaccaagaaaaagaaactcggtctgtttgtcttcttgagcagaagcggaaagtagtttcttctaatatcgatgtccctcctgcaagaaaatcttcagaggaactggacatggacaaggtgactgcagccatggtattgaccagcttgtcaaccagccctttggtccgaagccctcctgtgcggcctaatgagggtctcagcgggtcctggaaggaaggtgcaccatccagcagcagcagcagtggctactggagctggagcgctccgagtgaccagtccaacccatccacgccctctccaccactgtcagctgacagcttcaagcccttccgcagccccgccccacctgacgatggcattgacgaggcagacgccagcaacctgctcttcgatgagcccattccgaggaagagaaagaactccatgaaggtgatgttcaaatgcctttggaaaagctgtggcaaggtgctgaacacagctgccggcatccagaagcacatccgggctgtccacctcgggcgagttggggagtctgactgcagtgatggggaagaagacttctactacacggagatcaagctcaacacggatgccacggctgaaggcctcaacactgtggccccggtttcaccctcccagtctctggcttcagcccctgcgtttcccatcccagactccagccgaacagaaactccttgtgccaaaacagacactaagctggtgacgccactgagccgctcagcccccaccaccctctacctcgtgcacactgaccatgcttaccaggccacacccccggtgacgattcctggatccgctaagttcacccccaatggcagcagcttcagcatttcctggcagtctcccccagtcactttcactggcgttccggtgtctcctccacatcatcccacagcgggctcaggagagcagagacagcacgcccacacagccctgtcctccccgcccagagggacagtcaccctaaggaagcccagaggagaaggcaaaaagtgccgcaaggtttatgggatggaaaacagggacatgtggtgcaccgcctgccgctggaagaaggcctgccagcggttcattgactgagccattcctgcctctccttccaaaggaagctactcaaggcccagggaaggccctgcctggaatcccaggaatataattccttggtggaattaaagcaaaaaaaaaaacaaaaacaaaaacaaaaacacagcaaaaaatcagcactgcactgctctgagaaccaggcgagagcgccaaggaggaccttccttcgaaggaaaagcccgcttccttagctctcagtctggtcttaaagctggtcttctgtagcagcttagccaaccaggcccatttcacctagagagaaggcacattttgataagctttctgaactctggcattttcgagggtttttgacactgaaaacaatatgcccataagctacacaatatacccataagctacacagtctgaggtagcatttgtataaaggatagtacctaccttgtgaataggcatctctctgtttttccgtgcgactccttggatcagtctgatcatgatgtatttcaaaaaagagtttttctatgtctgttttgttttcaagaaggaccccaagtggaaccattgtaaagatgttagcttggaggccctgagtaacttacataaggccaaaagtgattgacagtgagtgcgagtcacctcagccatcacctgaggtcaggacaccaagaggcactgcagaaagcatctgaaaatcgtccttggatcccatgtgagtggtggcaccactaagtctctgcctgccatggctcagacgagagctggcgctagtagcaatctggtaaaccttgatgctgctttcagggatatcacacacactgcagcctggatagtgtgtcctgcttggttctgccaagaccatagccaggactctgggttagcattctgctctccaaccccgcccaggtagaaaactccagactggcctgcaggtttgcttccagcagagcatagctgtgggaaagatccactagggcatcaagccaacttccattgtgagtgcacttttctagatggcgaggggatggctaggggatgagttagtggactcggtgacgtatatggataatggaacgctaaactttgttgtcttataggaatattgaaactatgaattaagaatttgctcagaaactaacttacaggatgcccaaaggcagatgcatcttggtataggactctctccattgagtagggccaaggcttaggctgggttccagccattggaacctgatgtacttggctgttggaagggtggagcttggagcagctatcaagccttgtaaggacttattctgtctgccctgcttaagagaggagtgtcctgtacctatgcatggtaagagcaccttataggagccactaggtagggatggggaacatggtgtcagcaatatgaatgttaaatgaacttgcacagaggaaaacttaatatatgtttaaagattgtacatagtgcttttttacagagtagagaaggcatgtaggcgtctgagacacctctttgtatataaggggtgtatatggaggctctacagcggaacacccttaactggtgcgttcatgtattttggcaattttattttttaaattcatgtggctttttaccacggaaatcaaggaaaacgggaaagagatgctgatcttttcctttggatacttaaaaggaaaacaaaacacttacttcaagagaaaagagaaagctttctctgatttccctgtaggttgataaccaacatcagccataccacctgttccagatgcttttacctgcaaccaggaaacaactttttgcttttaaagtccagagctagatttctttcccctgggcatgtcctctccttatctcctgtagcctcactccctgaaatggtgttctagctgctccaagaggccctgagcaacgtggagattgagacatcaactgtttggtcaagttcaccatgtgcttaaataacagatggatcctaggctagagggttttctcctcagcaaagctcccttaatttttaaaatctcagatgaagactttaatcaaaacattaaagtgatgtgaaattcaatccaccttctcttgaagaacttggaggtgaaggaatgctgtcgtctgtgtgagagagagcagtccttaggtgctgagctgtcgcccccagaaacacagcctaagggcaggtctgagcccgcttagctgcatattgtcagcacaatcgtgacaccaaatgcacctgacctgagtccctcgttttctcagaaacctccatcgtgccagctcgtgtgcatccccagcccacctagggccctcatctccaggccagccttaggcactgaacatttccttatctggcttccaaggtgcaggcaaatcctgagtgcagctctggacacatgcccattccctgtgtggaagggtgtaatgccagggaccggaagctctgaattgcaacatacagttaactgattatatgagttactttttgtgtgagttacatttcttaagtagttattttgttatttggggacccaaacaaagtgccaaatgaagcctgacttttcatttcatgccatgtccatgaaactaagttctttttgtgtcttcattttgtggagaaacagaaagcatgagagttggtgagctggctgctagcctgaggctctgtgcaccccagggcttccagccctgtctgtcaaaggagcagtgatgtaatgaattcttgtccatggaaatgtctagttcttcttcttccatgatgcccattcttacaaaaaaggtttctcatttctcccggaaaaagcatgtcacagtgactagcaggacattctccagccagctaggaagcaatgtgtgcaacaggcaatagtttccagccttagccttcctggaatatggacacttattttgtgaaaatctgtgagataacgtggagaaacccccaggtagcatatgtgtcaagggggcagtgcgggagacctgcacacccctatcttctgctcatcttcttgggctgctcagctaggactcctccatgtctgctgtagatgtctgacacaagacaggagctgcttcggccaggaactatccatcaggctcacctgccaccttatgtctgggaagttaggttctctggattagcaaaagctagcgccaggaagaagacagtgggtttccaaaccagagtggacctctcgtgcacgttgatagtaccatgtccaggaggctcccttatgaacctcccatgaccaagctataaaggacgatcatctctagagaaaaacattactgttgagctctccaaaaattccttcagacttcatgtatgttggaaaaattatttgaagccaaattgttccccattgcaattgaagatgacaagatttggagtctgccatctctggtatccaagaacaagtacgtcacactttgccagaagccctgggcttaaagtgagtagtgagcccctataaaagagtctgtttcatctctcacttcagctgccctgcaagacaaaggtggcattcaccggagaaggttctgagaaaagaggtgagaactgtacatacaagaatctgttgagcatagcagcagaatactgtaaatactactcatttcctcagggagacaaggatgctgtgggaagagatctggagaaccccgagaccaggaggatttttatctcctcaagtcttttcttgtcagaacaagtttttctttatgtaactctccgtgtcatttcaaaacaaatccgtgttcagctggacaggcagacgacttccatgaggtgtggcagagggactgtctgttcgtagctgccctaaagctgattgaggtttgagccacaggtgaagagcctgctgggcatccatagacatggtgaggcttcctctgaatgtaattgggaacaaaaagccttgctgttccttgttgtagttcctcagtctggatgctgtttattatacacagcatcctctaagggaggaaaagctggccacgacgtgtggtttgctttagtggcatgttcaggagcacactgccatggactctggtggacaaggtgctgtctttgctcttgtccgtaggatttccaccacccacatcagctgtggcattgacctgtgtgaatatgtgcggatgagtggagccagcatggcccgtcagtatgacagcgttgggagcgtgggtcattttgaagggcatgttaggcatatgagtcaactgacaattctatttctgtaagaaagaaacctaccagcagcacacaggtgccaccaatcctcccacgtggagggatttctccatgttacgatttcatcctgtattttctgcattgtaagtagccacaggggaagttagtaaataagatgaggttagcacttttaggtaccagttgtcctgagtaactgtactccaacagagcaaggacatatgaaatgtactcaagacttgcttctggtgacagacttggaaaaggcccatttccaatgacacacatgctttaaagagtgtacctatcacaggaccaggaatcaaaacgggaattttatctcctgtcctgttttgtaagtagcttttttttcctaagacaatctcatgttttataacttgttgtgtgtgtctgagaatcataatggtaatgtgttatggtaaatgtaatcttaaatacaataataattacaacttaaatttccaaatgaaagaaatacactgcttaggcttctgcaagagacatgacacttttataataagcattagtacttctcaagtttaacagaactggaaatattttacaagataccgcgttttgtaatcacagagaacatgaacactttgtgggaaatgaccttggttttatacattgtagcttattttttaaaatgcagtattttaaccggcaggaagtgtagatatggcacacagttcctgtccctcaatccaagggctatgcctcttttaagcaagtgttttgatgcgtatcttttcaattaaccctctgagcaagggtagaaatggagaccagatagcaaggtcatttgcaagagaatcaatgaagcagcaactattccctcatgaccagtgtgtattcaaagcatctttgtgggggcagggggcatgtcacatgaagattcaccttctatattttaaacccaagaaaagatgctagcacataggcttctaggccaaggaagaaatatccctttagtgtggtatgagttttcttatgagttttcacctatcagaactacatgcctgcattttataagcaagcgtcatttggtggcactgtctaaaactgtagtatatatgcccaaagaacctttaaacggtcagcagtgtttgtgattttgttgttcttaccaccgccaactgagaaacttcctcatcaggaccgtttgacttttgtttgtttttcactatggaaaactcacaggcacagaaggttgtgagcagaaaaatgacagaattcccatgggacgtaagaaatgggagccacatacacagtgtgagcactgccaaggctattttaagctgtcccacatcaacaagcccactcgctgttaagaaaacatcttcccaagagtttattgactcaaaaagctaggccagttagccacgtatgcgacagtttcagagtagaagctgaggtggggcagctgtgtacctgccaggtaactgtaccagttactgagaggccattctagcttttctagccgtatcttccatgtacggctgacagtctgttagacgggaactataaaggcattgtatgagggaacagggggttgtgcagccttgcacccagtgcctgagtgggctggcttgcagctagctcgccattgccatcccctaggatagtaccactgatggatggcattcgggtgcccagcaggttttcactgccacatggttttgaactatgtgcgacttactccacctgtgcgtggaggcttccttccagagactgtgtgcgcatttagacactttagaacagctggaaaaggactgcagatgttcagggcgtgtcaggaccaacaacggtgttggactagacaactgacatctaccgaacaggaaggaccctcactcagcttttgacaatcaggccaggttgccagatccaaactggagacatggcaccacccgacaattcagtgttgaccactaacatacgttctcagccaatcctgcagaccaagaaaagctgtgtgggggcagaggcatcctgtggccacagtatcagctatggcaaacttccacacttgtgagctaacaggcccagattcctccatgagcatcttagactcatgtgctgccacgatctgaacagcagacatttcaaaagagggaagacactattcctccctagaggatatcctcatggaagacaaaaatagaaatgtcatctcttcagcttagcattgctcctgatcagaatgcactaagttgtcacccggctcttgcaagagctgcctcctgccatacccaggccacaccccaaagtactgaatagctgtaaccctgatactgtgtctgctaccgtgaccactgtgatgaagggcagagggagggaggaaggaagggaaagagggaggcaggaaggaaggaaggaagggaggaaggaaggaaggaagggaggaagggggacaaagtaatcgggagcctttgatttggcagccgggtaccctggtgctttacagtagcacatggcccctcccatgccagcgccctctgcctacgctttgtgctccctagcttcctaggccatctctctccttgtcccactataaatgtatatataatttcacctctgatctggtaaggcccctgcttcagaactagcaggcacttaggtgttttcaggagtccattcaccttaaaggaagtttttccacacaggcaacctcagtctctttctcgcagggtgaaataaaactgagaataactttgtcacatgagtggagggctacacacattagactttcattgttctgagaaagtacattattttaaactcttgtcttctattgaagtctattgaagttctgatgtcacagggagagttctgtatggtaaagtatgtgtcattcagacattacttcctttgatcttcatatgaatctagtatagaaaacaagtcctaaggccactaatagccatgccaagacactggctcaaacctatgagtcagcaccgtcattacctgcagagagagacctggcccagctggcctccgctgtgactcagccgtggattccctgggcccaccatgttctcagcccagaagtaaagagcaccctcattcatgtcactaagtgcaagtttaatcatccccaagttccgtccagtgaaatggtaaagtgtaggaggagtttgttagctaaagcaatattctgataaaaatgttgacttcttaggaaaaaatagcttgcttctggcctctggcctttcagactctaactttaagctgatgctggatggtggttaacaaccagctcagaattaccatgtgtagagacgactcaaaacgacctgcaagcatgctgcagtgcctaggtcagttaagttgtatgtgtctgaatgcagtttctgctggcaagctttgacattgctcccactgtggatgatgataaggctgtccagtatatgaatacactccatccaaggcttccagggtgtcaggtgagcatcctgagttcagaggaaagctctcacaagaaatcctgtcataagaccagaaggaacccccagacagctagactggccagttccctagctgatgagcagggaggcagttagtttgcccctttctcctctgacaaaaggcagtgggctgtatggtttggctgcctgtgcttggctggcagtgcacagaaagggcctagtgttagcaagggaaaaaacaaagcgcataccagatactgaaggattgggttagagtcaaatagtagttggttctttttaaaaatgttccttttcagtggggattgctgcactgtgaccctccgaggagaacaccctttgatgtgacaaggccacctgagcgatccctaagactgattaactacttcactttctattacaatcagtcttcccaaaatgttcattcagaaaatagccaaagcagagcatggcagcccctagaaaggacaagaaagggattactaaagaacggaatcgagccggacgtggtgacgcacacctttaatcccaacacttgggaagcagaggccagcctggtctacaaagtgagttccaggacagccagggctacacagaaaaaccctgtctcaaaaaaccaaaaaaaaaaaagaaaaaaaagaacagaactgttggggaaacacagctgtctcctgttttgtctctatctgtgactggaaacagaaaccaacactctggagaagacataactttaagtgagagtctgaaagaagactccccatctagtgccatctgagcagatagttgggtagacactttctttcccttcttgattctcatctcctaacccggaagccaaatgtgtttgttgccagatccagagacagctattattgttacttggttgctgaatgcttgctctgaagtcaacaccccagtacatggatgcttccctctagacactcattctgctcagcgagtggctaccctccctgcaagagaaagccgttctctgtctgagcagatgtagtctctgggctatgaggacagggtctgcattggcaccaccctgccacactcagcccacggcaaagcagcagctactcacgtccatgtgccttaagacactcagtgtggtcacctagccagagctagagtcagcaagacaggatgctgtgttagggtggaagagaatccaagagggctcagactaaatccttccaggctctgtcccctccctgccgccctgctcaaggattcaaggggatgggattggccttctccacgtggcgatggagtttagttgctcctgttatatatctctggaaagcaaacactgcttccatttgcttacctgtcaaacattcattccttggcccaggacaggctcatccctcatttcaggcacagacagcaagacagagtggacagagggctccctgagggcttgtgattgtttgtgggtttgagctgcccctcagggatctgtccctgcatgggggaaggatgcctaatgtggcagattgcactcagagagagggataacttttaggcccttactctatatccttactggaagtatgtggctgtgacatggcataccagcaggagctgatcacagggagaaagcttcaggtgaaacctagatgtttgagaaaacacgtcacactcctaaagcatgctatttccatggcttccaaaactaaaagcacctgtggctcagctagcgcatgaacatgccagtagtcacggtttcctatcgtgcaccctgaaatccctatttttgtaatttatgattagactgtggtcagtcacttaaataaacactcttatgaattaactagtataccctagtatagtttccaaaatatatcatactgtatagccctatgtgcatgaagatctcagggggaggaagtacacgctaggtcccaaagggtccagactatcatcaaaagcgcatgccaagtggcctgaggccactgctcatacacgagggggcgggggaggggatatgggctgcagcccctcagctgcccttagtggtgggaatcagcatggtcgctgttaaaggtaagccatcttttgaatttttcaacaccaaatcttaaagtatcaaaaaaagttaccgaatgttaaaagtggggtcgttagtggaaatgttgtctgtaggaagtttttctcatagtgtttgataaaaacaacaaaagccaaactgaagcccaagaagtgtcctctgggggacactggcattagggtggtcgatgactgaaggatacagcagtgctgtcctgtacacagagctcttttgaggtacaatctttccatcgtttcaggggtaagtacttccttacaaagtctttaataatgaatgaatgtataaatttataaactatgcattttcagagagaaacatgtattttgtatcaaatccgagtacttttttttttcatagagatttatcacaactacagattattcaaaataaatgagaatgccaatcctcataagggtgtggggtgcctttgtttttcactctgatggtttcaagaccatgcatccagactttgatctgaaaagctagccagtacagtaggcgaaggatgattcgccttctcctggaggggaccactcgcacaccacccagttcttagggatggataatttagtaacactgggttagcggatagaagggccagggtgtggcttacagatagagccctggcctcacgtgtgtgaaggcctgggttcagtctccagtacccaagtagtaacaataagcaggcaggcaacgctgttaccatagtaacattacattaccattgttaccattgcatcggctaaagatgacccagcttaggtagttgtggctaattgtcgatccaactgtgggtgaggaagagtttaggttatagttttcaaagaacaaaatataaagttattgtctgacaaggcaaataattgtttttttttttcaaaattacttggaggtgatctcttatagaaaatgtagactatacccagatttctccagccttgtgctgataggccttttcacggagcctttcccactggtaattgttctttcctccttggtcagtactcacctcatcactccagcagcctccccgctatctgacaaggaggaagtgaaccccatttctttgctgttccggttctctttctgtatctgtcgaggaggtttctaggctgtctataaaatatggggaaacacatttctaaccctggtacttatggtcatacaagatatgtttgctccctaagtaggagctagaggggagggcaatgtgtctttttacatgatttttagccaaatccagctgttctgatactatgtttctgaatccttttctgactgtaaatactgcctgcagaggtcccggttgacagccttttctgagactggtcctcagccatgctccttgccagctgttggcacattgtacatagatgcgtcgagtgtttcaatgatgttggttttctaaatgctattctctaacacattttttgaaaaaaaaaatgtctttgttgttctggactttgtgtgttcgttttacaaaaacatttcctaagatttaacaccaggaaaaaatattttaaaatacactggtgctaattggaaaagaagaaaatttttaacttcaagatttacaaaagaaaatgatcacagcagttaactgcactttcccacggggatggctgctgtccacttacaatgggcatcaagaggaccagcaaaagtttacagtagtgatgacccattgatgtgtcatagagcaaggagtccttgtcccccagagaggaggatttgctgggtagtcctcaaagcatgtagtagagaagggatatagagttaactctttagaaatagtcttctggtccttggactttcatgttctgtaatgcttagctgtaacaatgaatatggtgttgccaatctagtctgacttcattgtcaacctgtactgactctgtgtatggctctgtccttggcttgcactggcacaaaccaagccagaacacaagtctttcagaaagaccattctgatttctatgatgttcacacacatgaatttagatgcacttgtaactggttaattaccatgaagtaagtctaacttccacttaataaaagtttttttgtg

SEQ ID NO: 327 - protein, 461 aa, Mus musculus
RRRARRGARRPVVVEVVDGDEDDEDAEERFVPLGPGRALPKGPSRGAVKVGSFKREMTFTFQSEDFRRDSSKKPSHHLFPLAMEEDVRTADTKKTSRVLDQEKETRSVCLLEQKRKVVSSNIDVPPARKSSEELDMDKVTAAMVLTSLSTSPLVRSPPVRPNEGLSGSWKEGAPSSSSSSGYWSWSAPSDQSNPSTPSPPLSADSFKPFRSPAPPDDGIDEADNLLFDEPIPRKRKNSMKVMFKCLWKSCGKVLNTAAGIQKHIRAVHLGRVGESDCSDGEEDFYYTEIKLNTDATAEQTVAPVSPSQSLASAPAFPIPDSSRTETPCAKTDTKLVTPLSRSAPTTLYLVHTDHAYQATPPVTIPGSAKFTPNGSSFSISWQSPPVTFTGVPVSPPHHPTAGSGEQRQHAHTALSSPPRGTVTLRKPRGEGKKCRKVYGMENRDMWCTACRWKKACQRFID

SEQ ID NO: 328 - DNA, 66315 bp, Homo sapiens
  misc_feature (1)...(66315): n = A,T,C or G
cagactgaatagtatcgctgcatggaggggcagtgtccctcttaatctaatactttgaggttgaaatgagactttactaaaaacagctgaatagcctgcctcccatttcctccctttccttaaattttccattttcactcatttcttaaatacagattgatcaccttactcccgggttcatgaatgttccatggatgcgctttgcttataggaatacaacaaaccactcatcctggcacacacacccccatagtctggctcaggctctgctctccttttccaccacatccctcacgtaggacccttgagtagtctcccagtaagcccagggctcaccggcttcccttccttgatgtgtttctcccatcttgaaatcctgttcatccacagaagccaggtcagcttcaggaacaaatcatgtatagagtgacaacgaatacttctgttacagattgagtatctctcattccaaaatctgaaatctgaagcactccaaagcccaaaactttttgagcaccaacgtgacaccacaaatggaaaagtccacacctgacctcatgcagcaagtcacagtcacacaacacacagtttgttcagcgtcccctagggtaaaataaacttacctcaggctacgtgggtaaggtgtatatgaaacataaatcaattttgtgtttaggcttgcgtcccatccccaatatcttacattatatatatgcaaatatttcaaaatcaaagaaatctggccgggcgcattggctcacgcctgtaatcccagcacttcaggaggctaaggcaggtagatcacctgaggtcaggagtttgagaccagcgtggtcaacatggtgaaaccccgtctctactgaaaatacaaaaatcagctgagggtggtgacacatgcctgtaatcccagctactcgggaggctgaagcagaagaatcgcttgaacccgggaggtggaggttgcagtgaggcaagataacaccactgcactccagcctgggtgacagagcaagactccatctcaaaacaaaacaaaaaaaatctgaaatccaaaacacttctggtctcaaacattctggataaggaatactcaacctgtatttttaaataattccaaatttaagtcccatactattcaagtatggctggaggaaagattaattgaaaaggtaaaagcctttagcaaacatgagtcttaaggttttaagttgtagattgaaattcaaattaggagagaatatttaatatcacctctagtggtttgttttttatcaataactccaaatctaccagaagggctttgcagcagttttctcaaagtgtaacaaattctactttgtatatcatctcttcatgtttaattataaggatttgaatttacagtaccagttaatcagtaattagatagtagtgtaccaaaagaaattaaacaaagataaaaacaaaaacacaacttagcacaaggccatatcatctggtaatgtttcatgtagcatgattaaaatattccctgagaaatgcaggttaactgagtcattgtgatgtattcctttgactttgttgttgttgttagtgatttccagtgccagcaggaaacttaaaggtaatccaaatccaaaaacactctgattatactaattattccttttttcattcttcattgtaaatctctttatgatgctcaataattattttgaaatgtggtagattttcgcaatgcaaaataaatgtatattttataatgatgcattctgtattgattgtcatattttaaaaaacacataaatcagtatttgagttaattatcaattagacctctaaagcaaaatgttcaccttaggtgtggaaaatcaaaaaagatacaaagcagattgagagaggggcaaaaaggtccctgaaaccaagatgtagaagacggaaaaaggttgtttagcaagtcattgtaagaatcaggggagggggcgaggggaccctctccttaccaaatcatgtcatccacctataccaggtgcacgggcctcctatcctggttcttaaacctttggttagtaagggaataaaagtggactggccgttggaaagagaagtcaacagccctcctaattcagtcttggaagagatgtgggcagcagccagctcaggtgtgccccactctgggtgatcctggagctgggctctgggaagggcagacagttggaggagccccaaggtagattagtggatatgcagcaagccccaacttatcccttctgtgaccagcgttacatgggcagattgagccaacaaaacactcagaattacctgaaggtgctttgcattctttccctggtgccatttcaagaggctttgtctgttttaagaaaatggctttacctttactcccaagtacagggatcttgtaaactgtgaatactgtaaaatctttaaatggtatgccaaatgaatgaacagttttttttgcctctaagtgtatgaggttgtcttgaaaactttgtatggagtggatttcattgtgcactcttaagcttgttttacagaagtattttaattgtcagcctctgaaacaagtaatttgtcttttgatagaagaatttgctaaaaaagagcataaggtgctttgagaagaattattgaagaaaatttcaaagatttccatctgttggtaccttggattgaaagaataggctttgtttaacaatttagtatcatgggtggacatcagagagccaaactgtaacaatttttgtaacttcatgatgaaattaattgagcagccccccaataattgggaaccatttgtttttttctccaatttaagaatttctcttcccactgttttgtgaagcagtgctatgaagtttctatctctaagagttcattgcttttacaaattagacagcacacctgtgaatgaaagccacatttgtcaaagtgacaattcatttgtggatatggcttattaatcctctgttgggcttcttcaactgttctctaatttgaaaatgttcgtctctcaggaggtggtacaatttatttgatttcatcgtacgacacaaacttttgcctctcaattttacctcctttattgaaataagcttaaacaagttgactccggtcaccatgatcataatcttatgaacctttattcagggttaactggccaaaattaatgaaccagagcaacctcttcatctcagtgaatgattaccagtggctcttcactttaacaacatggtaactattcccatgacctactctttctatagtaagtagttttaaaaaatttttttaaagctcaggagttcaaacacccctagttgcatttctcctccagcctctcccatctcagtaaatggctctagttagtgcttcagccaacacctgacagccttcctcgctcccttttgctcatctcccatgtccaagtgcatcagccagtcctgctgggtctcctgccactgtccccaccctagtccaagctcgcctggactcctagcagtcatctcctaagtggcctccctccttctattctaccttctctaagatccattctccatatagcagctcagctaattatattacaaatattcatcatattacttcactaggcctgcttaaagcctcccagggacttcccatttcacttagaataaaattaaaacaccttccatggccactggaccccgtctgactagctctgcaccgctctccccttctcacactctaggatcagcctttaaacattcccgcacattcctgctgccatgcctttctgcaggctgctgcctctgcttgggatgtacttccctgcccctcaggacagactctccctgaccttcacagttcacctcagacgtcactgcctcagagaaacatctgatcaccttagatgcagcccctacaggcaggcactgtcacgttagcctgtttatgcgcttcatagcccttgtcactatcagaaatgactttgttcctcctagcttgtttgtttcctgataagtgtgttgcttcccaccgtcctctaggctccatgaaagcaagaaccttgtctgctgttcacctcatatcactcgtggctagaacagagtctagcccacagcacactctcaatgaacagttgttagatgaagtatggatgatggaatccttgtcttcctaatactgtatgactttgactgaaacacttcacttcatgggcttcagcttcctcatctataaaataaagctaacagaacatcggttgttcatggggataagttaatggagtaaatgcgtgacagcgtgtcacaccttgtgtggcccacagcagatgcagagtgaacagtcaccagtgtcccttcctgttttacaggaaatcttcagaggaactagacatggacaaggtgacagcagcaatggtactaaccagcttgtcgactagccctttggttcgaagtcctcccgtgcggccgaacggtaagcccaggatatgggacttagggaagggccccttgacaccaagagcagggcctttctttgagatgtctcattcctgtcaagcgctatgaaccactgaccctcacccattagcaggaagcaaagagaaacgtggaagaagtcgaggcccccagagctgtcagccccctcttcatcttcccagggagcccactgcttctcattcacccatccctccattcaactcacttttattgagctcctttgttttctgccttgccaggacgtctttgcagtacttgtgtcccttttttcccaggtaaatgaagattgagctaatgaattattttccctagcattatttctgtttgactggggaggcagttggatcaaagaactctcagattaaataatttttaaaaacattttctcagactccttaatcaaatagaattatttaggtcattcatttattccacacacatttatcaggtaccatgctagatgaattgaatacctcattgaaaaagtatccacactcccaggtagtatactatctctttggggaagaaagaccatcaatcatagccatattagtggctagcatttattaagcattactatgtgtcagtaaacaaatactatgcttgccttatcgcctgtaattcccacaacaattctatgaggtattattatcactattttacagatgagtaaactaaggctcacagagattaactggcagaactgaaattctccatatctttttgattccagatttattctcttaatcatgatatgattttgtctcatataatccaatacaataaataaggaggtcaggcagtaggaggtgaagttggagagactgggagacctatcaggaggggtcatttatgcctggctaggagtttggactttatgctgaggctatgggagcactattaaagtgattctagcactgcaaagttatgattaggtttatcagccaaaggaaaaaaaaagatcttggtggtcacagtgcaggtagatacgacataatcgagaaatgtgaagaatgcagaatcaagagtttggtgctggacagagagagtgagcaggagggtgtgtcaaggatgacttccaggcagttggtgtgcttcagcaaggggaggacattcactggggcaggtgacagacgcacaggaagagatgtattggcaaatgtttggttcaagagctgaagttgctgaagaagacaataggaaacatgtttaataggcagtgcctgaggatcattcaaggggcaacatctggtagagatttgggcacatcttgggagagagatctgggctgaaggtacagaattagaaggcaacatttggaagccatgagagtagatgagatcatcatgagagagttatgtaaaagcagagtgagaagagaagatggccgaggaaggaagcagtgaagctcaccatcatgcaagggattggcagtgggaaaagagccgaggaagaccctgaggtgaccagagaggtagaggaagaccaggagagtgtggtttcatggaaaccaagggaaaagcatgttttaaggagaagtgtctgatgcttcagaaggtcacgcattaaaaagactgagttttccatcaagaaggtggtcactggtggctttgtcaagagcactccccaagggagaaagccagttgcagattgcagttcactgaaatgtaatgcactgagaccactgaatgagacttaggatcaatgaaaaccttctctcaaaaaccagcatggtcaatgatgagattaagatatggttcacacacaatttggttttaagcatgaggtgttaaaataaatttgttgaacatacattgaggccttaccaaaacttactccaacctcattataagagggaaagaatgattaagatgctaggaattcaaattaatgtcatgaatcagtattgcccaacaacatcatgattcatcaagctgggataacacttcctctttttttttttttttaatttgagatggagtctcgctctgtcacccaggctggagtgcagtggcactatcttggctcactgcaactgccgcctcctgggttcaagtgattctcatgcctcagtctcccaagtagctgagattactggcatgtgccaccacacccaggtaatttttgtatttttagtagagacagggtttcaccatgttggtcaggctggtcccgaactcctgacatcaggtgatccgcctgccttggcctcccaaagtgttgggattacaggtgggagccaccatacctagccgacacctcctctttatatagcagtagaaaagttgctcttgaaatgggcctgactactcccattcagtgacctgactgctcttctggggggtctctggcaaatgggtactctgatttacctttctcactttggcagtgctaaagaaggattatagtaaaggcaaaactatagtcaggtatggtaacacgcctgtagtcccggcctaggattttggggttgcattgagcttatggtgccactgcacttcagcctgagtgacagagcaagactccaactctaaaaaataaaaaattttaaaaccctggaaaacccccaagacatattctagggaaaaggaattgtagaatttcatggaatccttcgaggaaaaagaaaagtgtattttaaagtaatcattatttttaccattggcttcattttttaattgagaacatttttagtgttcctttgtacttaaaggtcagaattaaaataaaccttttggctcttcaatgcaaactttcgttagcacagtaataaagtaattcagtgctcatttatggtttaaaaactaactactcaactaataaccccaaattgtctgctgtctctcatttagtctgtaagaaaaagcaaattcttaaataggggaagcaatttattataatgaaggctttttttttttttaggaaaaaaagattttctctagaattattgcacatcaatgagtttttggaaactgttgtgatcattttctgtgcctaaaaaggatcattctatcaggaagtgagtctgcaaagagggtgagagtccagcagtgcctgtctccattcttgacaaacagaggtttaatataaggaggctctgtcccctaagaatattataaatcagacctgactttttttctgagaaaaatcatttctatatcacttatagtccttctgactaaatagtctttctaaaggaaatgtcattcacaaatcagtaagcaaattcacttttggcattgacatgaagccatgtaaccacactgtaataatagttggttttcaaaataaattcagtgcctcatacttaacatgattatacatctagcaccattagctttattttattttacaaatgcatactacagtatatttgtaagccacccgggcctgccaagggagtttttcacactaagtaaaatcatcaagccttatattatgctcttcttgaactcctgttgtactaaatggagctttcttatttacaataggcaaatctagtctggtgagcgtatcagtctctgtgtagactgcagggagtgagatgctagtttggttttgttgatgctggcaaagcatgagactgcataaatgaccatttcattctaaaagaacctagctgtaatgagatgggtagtttctcctatttcaacttaaagcttcactcctctaacttaactttttgcttgacatagttgaggaatatggtagaaatccataaataggtaaaggtagttatgaaatctccccatgaatgataatctaccatttgtcttcactccattactaattacacagacattaacagtatttttttaatgaggcatttggggatgttttttcctcgtagttagaacatagttttaatatattcaaaatgcacataaatatggaggagaaattatccaaaaaaaagtaaaatttatataaatgctaattaaggtcgtgcatcttgaaaggtaaagcaaatcttcagtgattaaaagagcacccagaagacttttttttttttttttttttttgagacagagtctcactctgttgcccaggctggagtgcagtggcaccatgtcagctcactgcaacctccgcctcccaagttcaagtgatcctcctgcctcagctcccccagtagctgggattacaggcacgcaccaccatgtccagctaatttttgtatttttagtagagacggggtttcgccatataggccaggctggcagaagacattctaactgggcagaaatctctccacattagcaaacatttcataatgctttccaccacaaatgggaaggtaatagccaatagcaatcttagagtaattattgccaataaattcttatcctatcccagctttgccagagagaatggaggttgtttacagcccagggactgcatgcactgaagaaataggtccaacctcttcctggtggcctgggcccatgagggatacttaccagtcatgtagcaagtcactttgcttcctgctgcctcagggtcctcatctataaaactgggataataatccttattctgaaggacagatgttgtgagaatgcttgagactgtgcgaataagctttgtaaaatgtaaaacactcacaaaatgtaaggcattactatttgttgtaataagcagaatggaaaggggctttagataactatccagaaattatttctcttagattcttaagtgttagactaacttcctataaatgtattctaagaataacagtcctataagaaccccccaccccccaactttttttctgaaacaggatctcgctctttcacccaggctagagtgcagtgacccagtcatagctcactgcagcctcaaacccctgggctcaagtaatcctccctcctcagcctccagagtagctgggactataggtgcatgccaccacgccgggctaatcatttcattttttctgtacagacagggtctcactatgtaacccaggctggcctcgaattcctggcctcaagcgatcctcctacctcagcctctcaaaatgctaggataagagaagtgagccactgccctcagctaagaaatccctttttaaaaaaatgttgaaatcggaggggttggggtgagagggaactctgtgaccaaaccattcaggagaatactgcaaatgatatttctttcttagaaatactgtagtcgataaacccagagctccccaaacttagtgaacaagaaaatcttttttttcatataatccccactatgatcccaaggaatttgtgttgcacaatacaaaaacacatcagaaaactcttagaaaaacctattatcatgaggttaaaataattaaatgtttataaactacaatgtggcttttgggagggggcgtataaatagaacaaaaacttacatacccagctgttgcagatgattgagagggctggggtggtttcactggtgtagaaccaaggctcccatttccccactgaaccatgcccgggcacgcaggggtcctggcactgactgtgtttgtgtgcatgcagagagcctcagcggatcctggaaggagggcggctgcgtgccttccagcaccagcagcagcggctactggagctggagcgcccccagcgaccagtccaacccgtccacgccgtcgccgccgctctcggctgacagcttcaagcccttccgcagccccgcgcagccagacgacggcatcgacgaggcggaggccagcaacctgctcttcgacgagcccattcccaggaaaagaaaggttggtggtcagccacgcggtcttctgcattcagtttcctgaaggtgctttctgtcccctctgaagggccggtgtgagcttaaccttggacctacaccccctttctgtggaaagaagcagcttacgttcctctttaatgttcttgaagtttgaatagaaattgttatggtgataatttaaaaatgacaaatactggtaagtttcctgaaggtatatacacacgtatcccatccatcctctggttataaattgctgacctgggacttaccagtatttgtaagttagaaaattggacctcaggcttgcttcggtatgaactcgctctcttcgtgggacttatttttttcatatgtaaaatataattaatatatttttctcttttctcaatcagccctgaagggttattgggaagaatattttgtatctcatttttatgcagtcatctgtgaaatatacataaaagctgagatataaacaaacttccattcttacatcctagagattatatattaactaaataaaaagtgaaaaagggccaggcacagtggctcacacctgtagtcccactgctttgggagacagaggcaggaagattgcttgagaccaggagttggagaccagcctgtgcaacatagcaagaccctgtctctacaaaaaaaaattaaataaaaaaaaaattagctcagtgtagtggcatgcacctgtagtctcatctactcaggaggctgaggtgggaggatcgctttagtccaagagttcaagactgcagtgagctatgatctggccactgcactccagtctgggcaacagagtgagaccctgctgctttaaacaaaacaaaaaggagtagaagaaaaaaaagacatctaattaattgatttagcaaattaattgattacacatttgtttaatcctcccagcagtcctatatggtaagttttgcatttccatcttgttatgaggaaactgaggatcagagagattgattgtacatttaactggcccctgtcaggcaggttagaaagggacagagccaccattcaaacccagatctgcctgagcctcaagttcatattcttttcattctctttaggtacatttcagttatgttcactcataatttttcgaaaacatttccatttcacagaataaaggaaaactaccactatactaccactaaatctgaagacatttggcattatttttaaaatcaccacataaatgtaaaactgttgttatatgtattggtttttaaatgttgtattggtagcttcattatgaatggctgttcacaaacaaaaatccaatacaaagccctgaggactgcagtgcaaacttttttcctcccccaattcatttcaaagaggaaaacaaagagatggcattgatccaacaatgccttccctccctgcatctctcagcatcattccacatgtgtaacagtggaggtgatatgggcactctctctgagtgtgtacatgtgaaaaaggctgacatttttgtccagaaaagaggatattactgtagtcccctgaccttcccagaggcagtggcctgaagagttgctgtttcacaccagtctgtcatgcaaaggggctgaagttgttctggcaccctgtgggtccccagggacactgggtcttcacttgaccagtaggggagagaggctggcacttgtatcagtgggtacctgcaggcaggacagtggtagggacctgaagtcttttcctgttactttgagcttcacagactgtctccctggggttttctgagtgtgtagttcgaacactcaataggcatggcccagggttgtgacaaggactcacggcccagggttgtgacaaggactcacagtacagggaaccccaatgttatttaaggcacattaatgaaagcctgtcatacccttccatttctgatgtagccactgagccaaaattcacactcttccatcacaattagactgcacttgttagcctcatatggaaggtctacaggctttaactaaattaaggtaaagtcaccaaaggaaaaggaaaaaagcttccttttttacattttttatttttttatttttttattatatatatttatttttattggatgagcacaggcccactccagaagaagctggatagtgggaaggaatgaacaaataagaatagtgtttatccttctttctttatgacttctccctctattcagactttagatgtccccaagccgagacgaataggatgctgattgtagccactaatgtttaatgcatggattttacacagaccaagttgttaccttggccttttgaatttaaagttactttgaacagtgaaaataacaagaaggtgaggctgatgctattcttttttaaatttattaggtgaaccaatatttattgagcacgtatcaggcaaaatgcttattgccctgagaataatgcatagttttttccttcaaggtgtcaaaagttgggtggctggaaattgatgtgtaaaaaggcaataattacaagtggtaaatgctgtgttcgtgatgtgacagaacacagtaactgtaatacagttattttagagatttaaaaaatcatgtttcaaaagatttctaagagttaatttgcttaaaccagacaatatgttctgtctagttggtagaactttctgagttcatcttattttcctctcctttccctcagtttcatagtacccatttaaaacccattgtgatagtcacttgttctgtgggtattgtttgagaaccttctagatcagttttttccaactgcacgtctcaatccaccagagggttgtgaatcaatttaatgagtcactctttaatcaataaaacagaatagaatacactgtacataataaggataagtattgtttcttgacaattttgtttcagtgtatacatatgtgtatgtgctgtgcaaaatgtatttcttattgtggctcatgagcaaaaaagtttggaagcttctgttctttgttataaagagataatacaatttgtggtaaattaagatgtcctgattggaaatcaaaagattcacattcttaactctgctaccctgagaacctaagaatatcatttcacctctctgatcatcaacttcttcatctgtaaaacaggcaaacaggtattaacatgcccctctcaggatagttatgaagattaaatgtggtcttaagtgctggaatgtggcaacattttaatagacatttgaggactctaaacaaaaggggagggagcattgcctatatctgactatgaagcaatgatcctgacctttgtcattattatggaagcttccttatctcttctcccacctccccccacacagagatggctcactcccacctcttgtggagatccatgttccacttatgtaaagaagatgacagtgtgtgatacactgcatagacaaggcattctctcttactatcagtagtgaggaggaaatatttgctgataatcactatatttgcttatttagttacagtttaccaaatgcttttaaatgtagcatttcatttcatcatcccccaaatctttggtgtattcttatccccattgtgccaagaggctcattgaggttatgttaactgtccaaggttgtgtagcttataatgtggcagagatcagtttaacttaaatagcagaggaaacgtttgaggccaagttaattcagtgaatccatatttccttcagcccacagaggagaaaaacgtggagagaaaataatcagacatagctacagctatgtggcagggtgggagcaagggtgcagaaagttcagaaagaaatggagagcagagataggaactccaggctgtctgccggagagcttacttcccacatgaagtatccgtcacccataaggaacctgcagccaaggtaggtgagagtgtgagaagggaaatgaaaggcttctctatcctagctctggaggtcagccagccaactttgtcaagcccaggtctagcagaatttttcctctgggatttcaagacagactggcagaacttccaagctcagagaaaaaccaggttgtgtgagccaggactcttgactttggggaggtgcaatttccgtcatgaccacaaggtgatgcagtgaccctaaatacagccattcggggagttcgtgggagaaaatgaattctatggaaggccaaagagttaaccatcaattccacaagaccccaagaaagtcaagaagcgctgatcagaaatgatttgtgtgccctttccatgccagatccctgattctgtcagattctggattctgtgcattccaaaattgtcatgccagctttaggacttacatgacttaagcaagtcacttggcctcttcagcatcagtttcctcatctgtaaaataaggaaaatggtggcaccatattgatgtggctgttgtcaggaatatacgagaggccctgtaaagagcaataaatgttagctgctaatactttgcctttcctcctcccccctcccccaccgccgtttggcaactgcctgaatggggaatttgagaagcataggtgtggagagaagggggtgcttgcctccaccctccaccctgacccacactgaccgtgccaatgccacagtggctcaggataactccagatccctcagccaccctgtgctcaattgggtgtgcattagcccccctgcaatgcactgggtgagtgcagcaaggacagtagcagaaattgggggcataaaaggaaatctgactcaggactctgcatttcagaacattggcagcatctcagaggcaatttctaaatttcagccttcatcatttccatttatttcacaggtatgtgtcttaaccatgaacagttgtacctgtgtactaggaagaacctcaagttagagaagaaagcactgagttaacataaggtgcttcagtaatagttgtacagtagcaaacaattaatcatttgctccactctgtatttttaatcttccagagccaaaaagctatgaatcactttaaattgtgaatggctgctccaagaagaaaacaaacccgtaaaaccctcacgaataagcatgttgccagtctctctgctgacttaattcctaacccactaattttgagcagagagtgcctcttgcaaaaagaacggctgttccagaaatagatccatctgttaaaactgctggggagggcgatgctaagaacagcagcttggatcaactgcatggatttcatggtgatggtacatacagcattgtcagccagggcagggagctgattggcctcatagagaaaattcaggataaagaggagtgatatctaggtaacttagtgacaagatcttagaataacctgccatgcagtatataggctctgggacattggagttcgaaggactttggaaatcttctagcccagtctcaatctttccaagttaaaggactactcagtatgtctagaaatgtccagacgtccccaaagatgagatgcacttttagaattcattgattgaggaagcacagaatgactagggatttctgttaattcagaaatcgttttgttgtttggtgttgctgttatagaaatcatttaaaatcaactttattaggtataattttcacagaataaaatgaacccattttaagtataccatttagtgagttttgactgtctctacctgagtaaccaccactctaaccaaggccagcactcctcatacgccgcttcagtcaaaggcaccaccaagccccagacaggcaaccaaccactggtataactttcatcactatagattaatgctgcctgttgtagaatttcaagtaaatggaattatacagtgtgtatttttagtatacaaaataccaaatgttggcaacaggaactctcatttattgccggtagaaatgtaaaatggtacaaccactttgtaaaacagtttggcagtttcttagaaagttaaatatacacttaccatatgacccagcaattccactcttaggtatgtatttacctaagagataagaaaacacatgtccacaaaaaaacttgcagacaaatgtttatagcagctttattcattatcaccccaaactggaaacaacccaaatgcccatcaacaggtacctggataaacaaattgcattataaccatacaatgggatacttcaccacataaaagggagcaaactactgatacaagaaacagtgagtgaatcaaaaaaaacattatgcagagggggaaaaaaagccaggcacaaaagaatacattctgggttattccatttacagaactgttttgttaattttgtatacacgtatcaccacagcatctataaacagcacatggaggtgggaggtgtttcatccgtgcttggtatacattgaattcacctgttactttgtattaaccccacacaccttgaagatccaaaatctctactctcattcagtcccctcatcttacaaataaataaataaagcccccaaaaggtaaggcaacatgtatactgtgtaaccgtgaggtagcatgaggtaacatagctgcttctggaacccctaccagcttctaggaagttactaatttttaaatacacgagcgcatttactgatcttttggcacctgctggggatctgtgtggacctcttgaccctgaaagagccattggagccgctgccaaggtgtgtgggttttcatgagacaggcagaggaagtttgtataatgcagccaactcacctgcacagaataacttggccctctctgtccgtcaaggtccctggtcctctctggagaggcttggatgtgtaagcccctgtccctgccctgccattccaaaaccacacacacaagtcacaatacaaaaaaaaaaaaaatacctgaagatccttttagtcacctcagaacatgacgttaactccaggctgctgactgataaagtgacgttcatgtgctttctagaatatagctttagttggacttacacgtcatatgcatgttatacaatactttgaagcacttcaaaaatgttacataattcttcaaattccagccatgtttccactcttggaactgaaggtgaccttcagcagtcactatatcaatcctaagtatcactctgggttctgtcaagaaaatagaagctacttcgtatattccaagtatgaaaccattttttagaaacaggattgaggcttactattggtagggcaagcagagagaaaatcagggacaccttggccaaaggtctcagccaatagacccaaggaagttctagagacagttcagaagctgctgcaaaggcgaaaatctctgggaagttctctccaaccattgtggcccacagcatcaatgttgagaaattctaaagagtttgtctggaagctgctatgcatctcacatcaggcatatgtgagattccaggagtctgctcacgactgcgtggagcttcagctcctcctgggcctgttgcgggtgttaaataaagtacacgtggaagctgctagcacaggaccaggcacagagtggttcccaatcaatggtggcctccctctgttccctttgctttacatgaagaagaccattctgttagacttgaggtctttgctgacgttggtgttctgcagaagtgctttccactggtgtgaattttcagctgttatccatgagatggtggacattccagctttgcaaacatctgttagctctgcgaggagaagctagggtagaagcacagatgggaccattcagatttggctgccgcaactctgccagaagctttgcttggtttggctttcttgggcaggcttggacccatgcagcaatctgggcgttgtttatttagctattttttcatgttctcctcctcccatggcttgcttttctttagtgtaacagcaactagtctgtttgtagacaaaggatttgtttcaactggatatagttaggggactttgaaaagtactgaactaccatttaaagagcctcatgctttgctgcaagaatgtctttggcctatgtagagacaaatcactttacaaaggtgtagacagggttaggggaaatcagtagggggtggtgcaggactccaggggctaacaaccttggaaggccattattaaccctaacccgtagagccttaagaggctctacaagggaggaatttctacaatccagaaggttaccagaactctggaaatatagctgttggagaggttacccaacagatagggtaacttttggaggagagatgtagccactgcccacctgtggccaggcagaaggagagagccaggaggaatcaataccttcctgctttccaatctctcctgcctcccagctgcctgccggtgcctctcattagccaaatccaaccagagatctatgaaccagaagccctgttaatgcagcctcctgggaccctgagcatggtgcagaaaaggcatggtgtagacctgacaggtcaaatacgacaggtcatcaagtcccttaatagatatgtaacttttcacatcaaagaagcttttcttacaacttcatgtttaaggtttaatatacagtcatatggcataatttaaccaatcccctgttgtcaaccttgaggttgtttcttatttttatctagtgtaaaaatctgtgtgatgaatgaatatacatatgtctttgcaaatattttgaattactgtctttggaaagattcctacaaattgaattggctcaaagttataggtgtttcttaagctcttattgccttaacctgtattgccctcaaatttaaagatggcccctatctgtgcatgtgtaaactatgaaggtagagctctgacagtctggactaaaatgggataataaatgtgagatgagatattcaaaaggaatgtcaaaaggaagaggaatgcaaaaggaagaggtcgaggagaaagcagaactttgttttgcgattgccccctcctccaaaacagttgacagtcttcccactatatgtaattatgtttctgagtccacatttgcaactgccttgcaaatccacagcaactttctatatctctaggatgcaacattgttttctaatcacttttgctaatgacctgagtcattataaattagtaatttttcctacagcagattttccattgtctggtggtgaactcagactttcctcaggtagctaccagtgtagggtatgcaagattggaagagaaatgtacgatataaagtgaagagaaaaccatcttataattcaatcctcacaatgcagggcatcaccatggatgtcccctgagaagttaatttacagccaggtaggataagcaagtgttaatcatactgagaaacattaaattctacagaacaaatctttttgacaaacattctttgaacacagatgattcactaagtaaattttacaaagtgctatttaaacaaattaagatatcccaaatgtggctcatctctgaggtcccaaaacacaacctttctgagattgaacataacaaatatttattgagccagacactgtgaggcactgggatagaatatagtctatccccaaagtgcctcttgaaaacccagcaaaaggaaaaaaggaaagaggagacaaagttcatcatgtttcttaatatcattacctaattttctttgggtaacagatttctttggaacctttagcaggggttcaaggaaggtgtgtgtatgtgtgaggaggagataaacaattgctgttggtagttatcctaattccaagtgacttgacagaggataatggtcagcttccttggattctgggggtttgatgcctccaaaatgtatcatctacctgaagtaacaaatgaaaattatggaaagaagttaaaccaatgatatttatttttctgtaatcaggaccaaccttaactacttgtcaatttaaaaaacaaatgcttgacatattattgcaaggacgaacagtaatcttgtaaatagtacttgttatggcacaaaaataccactgtgattatcatatcctaaaacaatcagcaatttgaggccttaaaaaagtcccatgatgtaggaggaatttggctttatatgtcgtacaataattactattatattcagtatgaaagcctacatctgactgactcattggtaagagccatcagatgacactgggtaagtcttgtaactttctggagtcttgtttcccatcatgaatatcagaaatatggaaatagtatcttatgctttgcccattcctttcccactctctaaggcgggggtccccaactcccgggcctcgggctggttatcagtccgcacacagccggttaggaaccccgccacacagcaggaggcaagcgagcattaccgcctgtgctccgcctcctgcaggtcaacagccgcattagattctcataggagcatgaaccctattgtgaaccagattgcgcgctccttatgagaatcttaactaatgcctgatggaacagtttcatcccgacctgtgccatcctctcccaacctgcgccacagtccctggaaaaattgccttccatgaaaccggtcctggtgccaaaaaggttggggactgctgctgtaaggcaagtattttatccttctcaagtatcctcaaacttcatacacaaccttccctctttgtcatcagttctgaccccacttcctgcctcattgaaaaattagaaacagtcatacaggaattcctttttttcccttctccaccaaattagcaaattaactgcatctgcagccaccatctggtttccctcctttttccagcagagaactgtcctgtctcatccaaggcagcccctctccctgtgctgtgtgtattggcgctgctctcctgaccttctgaagaacctcatcctgtagctaacccctgcttctctactgcaccatcagtttccctgtctttgcagtcactcccatcagcatagaaacgcaccttagtataacttatctttacaaaccctcccttgactgctcataggtcagcaaaatttcttgaaaacattggcacttactctctctgttttcctaaatcccacttactctccagtctattaccaatctgatttccatccacaacactctacgagatttactgctatttgggccaccagcatcctccatatgccaaatccaaggaacattcccagtccttgttcaacacagttggtcacatcttccttcctaagacactttcttctatttgtgcttttaatatcatgatctgctgaccacttctctctcttactgctccttctcaatctccaacataaaatattggatgctgcagtgcaccctaatcatctctaactgcatttttccctagatgggctcatccacacccaagctttcagtgctccatctcctgaccccaaatttatatctctatccctgactctccctgattccaggttcacatatccagtgtcctgcgtgcaatctccttttgatacataataggcatctcaaaattaacatatccaaaactcacccacaactcacccagtcattcaaacctaaaacatggaagtcatctttaacaccatccctcttatcattcctcatagtcaacccaacagcaagtattattggatctgcctccaaactatgtcttgaatgtgtctatttttctccatcctctctgcccaaagcctctaagccaccatctcttctcacctgcagtgacttcatgcactgactccatgctggtgattacatttgttttctatcccaaaacagagtaatattaaaaaaaaaaacaaaacaaaacttaagtcatacagtgtcactctcttccttcagtaacttctcttttattttagaagaaaatccaaattccttacctttgtctgcaaagtcccacatgatctgaccctgcttctgcactttatctcaaacaaatcactccctcccacatttcattctaaacacaccgtcattctttctggcctccaagaggcaaggtctttctcatcttcaggcctctgcttttaactcttcgctatgcctggaaaactctagctcttagcttggctggctccttctccaactttcaggtcccagctcaatagtcaccttctacaggcctcatgctatatctgaaatggtcatcatgtattataatttatgtctctcccctactagaatttcacttccttgaaagaagcctcatttctttttttgttctctatccccagaacgtagaatattccttgctaaatagatatttggtttaatgaatgaaagaatgccatcagcaaaaaggttaggaatgaatcaaaaagtgttttcatctatcatgacttcatttccagacagatacttggactgttgggtacgtgtatttttgcttgagtcattggttctcttaagtggaagatattttctacaatatagcttcatcatttgaaaaatgggcaggaagcatttgtagtgtgaggacttgttcattaatgtttgccatagtttgatatggttcatttacctccaccaaaatctcatgttggaatttgatccccagcataggggtgttgggaggtggggcctagtgggaggtgtttgggtcattggggtgcatccctcttgaatggcgtggtgccattctcacatggcatgagagtctcactctcatgagactggattggtttttgagagaatggattagttccctggagagtgggttgttgtaaagccagaacaccccttgggttagatccctcttggcatattcctgcatcacctttgacctccactatgatttaactcaacacaaaaaccctcaccagaacctgagcaggtgctggcgccatgcttcatatgcagcctgcagaaccactacctaaataaacctcttttctttatacccagcatcaggtattcttttatggcaatgcaaaatggactaagacagtattgttaagttatatgctttgaataaaatagtattttgaattctgcagaattcctttttgtgaacctagcaggtttgaaggtgggatttaaatcgccccatctggcgcatcttacatttcatgtgtttagatcactggcccaaggaggtcaggaaggctgaaatttgtgaaccgtctccttggaataaatacaggctcataaggatcatgtacttaaagtctcctaattgtgtctttgcttctccgcattttcacgtccctcaaagagcttcagctgtaactcatgtagctctgggtcctacgcccagcactgcacactgcaggtagaacatcatggagctgggtgtgtgtgcccaggagctgcagaagaaacagcaagattgctgtgctgtgaatgctggccacccaggcagagcctctggggcacagtgggccctgggctcacgaagcccatgtgaacagtgggctccttccgtggttggtaatctgctctagcagactgctgcaatgtgctgccacatttgtcctctgcttgccatgcttaaggcaaccattcaccaacacatgagcactcttcaattctggaagctcccaagtaccattttcaattcagaaacctatggaaaatcttcagcatggggtggctgtccagataaatcatctggatactgattccatcagtaatagctgatgagtcgtcttctaaatatgtgaatgattgcttcatagactcaagagtatgatggtgtgaaccagaagtacttgatggcagatattctagcaggcacataaatcaagctacatcagttccatcagtttgggaaagatgccaccactgctgtatgtgttggtcagggtgggcttactattggaacaacccatttttctcacatgtcagtagcttaacacaataaacgtttgtttattctcatgtcacaatccagtcaggtcagtggaggttccgaagagggtggatgtcttcgctccaaacagccctctggggatccaggcttcttccttctagtgcagaccttcttaacctggaatccacagatccccaaatggatacacagaatccaggaagtcggtgaacctgcatgggggaaaaagtgtatctttattttcaccaacctcttaaccataatttaacatttcctgtaattatgatttaaggcatgaagccataataatgttagcaccacctgtgactttaatacccatcaaaatcatagatgtttcatatcacattacaattttagtagatatcatgaaatatcatttattcataacactactttaaaattatggtaggcattaggcccacttcaaggtattgttatttactacgttaattagagagtatgcatattgccgtattacaaaattttttttttttaagttcaacttttattttagattcagggtacctatgcaggttcgttacatgggtatattgcgtgatgctggggtttgggatacaattgagcctatcacccaggtagtgaacatagtacccaatagatagtttttcaacacttaccccactccctatttccctcctctagtagtccccagtgtctgttatttccatctttatgtccatgtggacccatcgtttagctcccacttagaagtgagagcatgcagtatttgcttttctgtttccgcatcaattcacttaggataatggcctccagctgcgtccattttgctgcaagggacataatttcattctttttcatggctttgtagtactccatgatgtatgtgtaacacattttatttattcattacactgacacctaggttgattccatgtctttgctactgtgaatagtgctgcgatgaacatacaagtacatgggtctttttggtagaatgattcattttcctttgggtatacacccagtaatgggattgctgggtcgaatggtacttctatttttagttctttgagaaatctccaaactgccttccacagtggctgaactaattcacactcccgtcaccagtgtatatgcatcctcgtttctctgcagcctcgccagcatgtattattttttgacattttggtaatagccattctgactggtgtgagatggtatctcattgtggttttcatttgcatttctctgatgattagtgatattgagcgtctttttcctatttttttggccacttgtatgtcttctttgagaaatgtctgttcatgtcctttgaccactttttaatggggttacaaaatatttaatgtttttttctagctgtatttcaatacacttgcatttctttataattttgtgtattttattttaaacattaaaaaccactattctgagaaggattcgtaggtttcaccagactgccaaaagggttcatggcaaacaaaaaattaagaactctgatctggtggttttgctataccctaagacctttgtgtcctttgcatctagccagcagagcagactgggggtgacactgggaagtagttgaggggcaaggcttagaaggaatgtgtgtcacttctcatccatcagccctaattcagtgatgtgatcccatttgactgcaagggagtctgggaatcaaggtctagctgtgtacccagcaggaaaaggaaatggggcttggtgaacacatggaagtgactgtcaccatacccaagggaacagtcagcaaagaggtggcatcccaaggacaagggacctccctggagaaaactcactttctataaaatttactctaggatgcataatcataataatcctgtaatagctgctgttggttgaatggttattcctgtcagcattctgctaactgattcacttccatgatgtcatttaatcctcataataatgctgtgaaacaggtactgttattattcctattttataaataagagcactgagaactcaagaaataagcccaaaatcagtgctctcaatcatggcactggactgttttagaaaatattgccgcagcctgggcaacatggcaaaaccctgtctttaccaaaaatacaaaaaattagctaggcatggtggcatgtacctatggtcccaactacttgggaggctaacgtgggaggatctcttgagcccaggaggcggaggctgcagtgatccaagattgtgccgctgcactccagcctgggtgacagagtgggacccatctctgaaaaaaaaggaaaagaaaatactgtgacccttgttgaagaggtggaattttgtactggtggaggggatggtttctggagccagagtccctggattcgtatttcaactttgccagtagctggttcattgactggacactttttatggagctttctatgcgtctgtaaaatggagattaatattagtatctgtcttttaggattaaaggagataaacacttaagacagcacctggcacatagtaagtgctcagtgaatgttatccactgtttagacagccagaatggccctgtgactaccttcatgaacatgatctgaaatattccagcagagcccatttctcttgaaggatatgaggaaataactgaggtcaccaagatactcacaaacctagggatgcctacaatagtgtgctgagttatagtcaagaggctggggatgctgctacttttctaatgaaggaaaaaaatatgttgggatgacataaagaaaatgttgttagaaaatagtttccattctaatatcactctctcccctttacagaattccatgaaggtgatgttcaaatgcctctggaaaaactgtgggaaggtgctgagcactgcagcaggtatccagaaacacatccgaaccatccatctggggtaaggcagctctctcttcagggatgcagcccccatctgctcagtctagggccacccgcactcagaaattgcacaccacactgtgccttaaaggttctggacactgggctggcttggtcttcctaatctctagagagatggccactgcagatcatctaagccaatatggcacagtggaaagaacaaggatataacatcctagagcctcattagttcacttactgagtcactttaggcaagctgctgccctgagccccagttccctatggaaatttataataatgtcagctcttcagggtcaagtgtgagtgccaaagataaaatgtatgtgagagagactttaaagtacaaaacactagagtaacctggaatctgtgattggacttcaaggggtccttgaacccactgaaattacctgtggaatgaaatgtacatttattttccagtggagagtattcatgactttaagcctcacaagcatatatagcctaaaaagagttcaagagtcaccacaccaatcgatgctgctgttgctgttcttacgaaatcactttctgttgctcagataagccatttatttgtaaaatctatacttttcctcattatataacagccttctaaaggaaagataaagtgaaggtttaggagccatagcagttacaggtcaccccaggggggcagtggtattccgtcagtcttgtgctttttgccctgagtctatcttgcccagggatctgagaagggaccttgagaggctgtaagtcagaaccagtgttcataaggcaaacacaaatgcacggccaggctcctgtgtgcttggacacagaggagtcctttccacaagataagtgcagagaaataaatgcagcagtcactttacccagcaagggatacatttagaaaatgcttcatgcccaacaagtgatataggcagaaggtgaaaatagcttctaaggtaatctatgagggtggctccatagtgaccatggagagaaacagggatctagctctctaatcatccaggctgatgtttggggacacaccagagccttccagagcatatggcctggagagcactggagataggacctggtaaggcttccctggccagagtctaccttatgtgtaagaaataccaattgaaatacctcagggaagaacaccctccttctgctcctcaagccttcagggaaggaaatcctgcagtgtctcccctgaaatctcatcgtcaagacaattcacaatgtaagcagctcagtttttttaaaggtttagaaagaacttcccaaagctagagccaggaggtagggtatttgttttaaagtctgtctgcccagaaaattgagtcctattcggtcccatcagaagcatatgctgtttatatgtatttatagaccctggaattggtatcacgtgttagtcctgtgagttcctggggtgctctcacagtgggtggaatctaacatgcaaccactttgctttcctgggatcccctttttcctgatgtgcttttagaatttccctggtgaattatggttcatagccctgccaggcaccgtacaggaatgggcctgggttagcaggactctgaggctaatctatgcttatgaagcccggggcctgtgctctctgatgcactgggagagggaacatacatttgcctttatccatgaactcaattacatggctgtaggatgatggggcatttttaatgagtattagctggtgaggggatgaggagggaaacgtgtcaaagccagaagaaaatatgccgtcacctctgatgtgtctgcagtacacaccatgcctgtataaaaagcacacacttttcaatctcactccattcttgtacaccaggggctggtcctgatttaaccccacgtgggacacgcagtgtcccccaggcctatgtgtctattagcagcacttggcagccagcagcagctcaacctgcctttaactgaaaaggaagtggggacaggaatagaacagatgctcgttcttcttcccactctctggggtctttaatggtatgctggtcacaaggccaagccctgccagacctgatacggtacaaagacacctccccaggcgcctcagcctgggagctcaggggaaatggagctaggctgggacaagccactgatttgaacaaaaagacaggcctgtgaagaggtgaggcatggattttatgttagattctatgcagggctcattagtggggaaaaggtatgttccgagtcagggatctgctgctgctgctgcagtgaggggacacccgtggcctctgcccagccatccccaaagccaggtttctagagaagagaagcaccacttctctacaaactcacaaattatctaataaacattttctgacattatagggagttattttattttactcaaaactttctgtggaaaagtataatgttctatgtttcagggagaggaactttgaaaacacctaagaagctacttttcctggtgatggtgaaaattgagaccttctaacatcatctttctttttatttaataagcattttacgtagtgtttatattgtgtaagatctgcttctaagcaccctatatttattagcttaatcatcacaaaatctggtactataattaatgatccccattttataagtggagaaactgaggaacgggggctatatgtaggccaccaaaatcatgcacacaactagaatgtgtaggagtcagggtttgaacctaggaagtctaacctcagaatccattctcttaatcactgtgccacaacaacgtcagctccattcattcactcattcattcaggcaacatttgctaggtacctaccctctgccaaatacaccgatgtgtgtggagtgacacatgatgaacaaaacacatccctagagaatcagtcatagtgaagcgacaaagaggtttaacaaaatacagacaggtagccagtgattaacaaaacgatgagtaaacacacttcagagggagcacagagcactaacagttaggagtgaagtcctaactcccaaccttcagaatacacccaggacttaacgtctcagcccttgcactgcttgcctgtcctgctcatctggaatattgctgacaacagctccttggtggcgtctgcttttgcttttgtcttcctgtcctctatttcccagacagtatccagagtgatccttttaaaattaagttagagttctgaaaacccccagtggcttccaccacattcagaatgcaagccaaagccatcgccgtgggctgcaggccctggatgaccttgcctctgccctgttctcactcctcccgtcactccctggggtcccgagctccagcctctggcctctctgccaggcccacccacttgagagctgtgtgtcacttctccctggtgtgttctcactgcgggtgccagcatggtgtctccctcacttcctccaggcaggtctctactcaaacgtcacctcctcagagaggcttcctctggccactctctttaaaagacaaaattgacaaatgggatctaattaaaataaagagcttctgcacagcaaaagaaactaccatcagagtgaacaggcaacctacaaaatgggagaaaattttcgcaacctactcatctgacaaagggctaatatccagaatctacaatgaactccaacaaatttacaagaaaaaaacaaacaaccccatcaaaaagtgggcgaaggacatgaacagacacttctcaaaagaagacatttatgcagccaaaaaacacatgaaaaaatgctcatcatcactggccatcagagaaatgcaaatcaaaaccacaatgagataccatctcacaccagttagaatggcagtcattaaagagtcaggaaacaacaggtgctggagaggatgtggagaaacaggaacacttttacactgttggtgggactgtaaactagttcaaccattgtggaagtcagtgtggcgattcctcagggatctagaactagaaataccatttgacccagccatcccattactgggtatatacccaaatgactataaatcatgctgctataaagacacatgcacacgtatgtttattgcggcattattcacaatagcaaagacttggaataaacccaaatgtccaacaatgatagactggattaagaaaatgtggcacatatacaccatggaatactatgcagccataaaaaatgatgagttcatgtcctttgtagggacatggatgaaattggaaatcatcattctcagtaaactatcgcaagaacaaaaaaccaaacactgcatattctcactcataggtgggaattgaacaatgagatcacatggacacaggaaggggaatatcacactctggggactgtggtggggtggggggcgggggaagggatagcgttgggagatatacctaatgctagatgacgagttagtgggtgcagcgcaccagcacggcacatgtatacatatgtaactaacctgcacaatgtgcacatgtaccctaaaacttaaagtataataaaaaaataaataaataaaaaataaagaactatctgagactgggtaatttataaagaaaaaaggtttaattggctcatggttcacaggctgtgcaggaagtatggctgaggaggtctcaggaaacttacaatcatgaaaaaaaaataaaataaaataaaataaaatagtgcccgcattactaatcctgcttaacaacactgttatgctgttgaatttttctttctgggacttagtaacacctgatatattaaatatctattttttaaattattttttaattttttaaatctctgttttcagaggttgaatgggggggtacaagtgcagttttgttacatggctgtgttgcacagtgataaagcctgggcttttagtgtaaccagcatccaaatagtgaacgtggtaccccttaagtcatttctcatccctcacctccctcccaccctccccgtttcgaagtctctaatgtctattatttcactttctgtgtccatgtatacacattatttagcttccacttaatatctgtttctttaggggtttcttgtctgcctgtaagttcccactataagttccatcagggcggagtctatattttattcactgtgttatcaggagaccctggaacagtgcctgaacatattagattctcaataaatcgttgttgaataattgattgaatgagtgaatgaattaatgaattgctttaagacatcaaggaagggttccctggaagtggacagttgaactgagtgctgcaggataaggaagagtttgcaaggcaaacaagagggaggaaaagcattccagacagaggggaaatgcatgtgcaagatttcaaggcaagaaaacagattggcttagtatgattgttttactctcttttgcattaggcgcgttggagactctgactacagtgatggagaagaggacttttactacactgagatcaagctcaacacagactcagtggcagacgggctgagcagcctggccccggtctcaccttcccagtccctggcttcacctcctactttccccatcccagattcaagccgaacagaaactccttgtgccaaaacggagactaagttgatgacgccgttgagccgctcagctcccaccaccctctacctcgtgcacactgaccatgcttaccaggtgacttgcaggggactgtgagagcaatcactttgaccttgaccaaaaccaggggccatctggcctatgagtaaaagacaactcagtggaaaaacagcatcacacacggcagcccggtagctttgatttttctccctttaaagcctaagatctcacacagatagggtcctatggtctagtctcagattgcccaatgctgcctgtggattcgatcccgtagagattgttatgatgataaaaatcccttgggcacagtggctcacgcctgtaatcccaaacactctgggaggctgaggcgggcggatcacctgaggtcgggagttcgagaccagcctgaccaacatggtgaaaccccatctctactaaaaatacaaaattagctgggtgtggtggcacatgcctgtaatcccagctactgaggaggctgaggcaggagaatcacttgaacccaggaggcagaggttgcggtgagccgagatcccaccattgcactccagcctgggcaacaagaaaaactctgtctcaaaaaaaaaaaaaaaaaatccctaatgttatctgggcatggtggcgtgtgcctgtagtcccagctacttgggaggctgaggcgggagaattgcttgaacccgagagacggaggttgcagtgagccaagatcgcaccactgtactccagcctggcgacagagcgagactctgtttcaaaaacaaaaaaaatccctaatgttgcaaagccctcaaaatggtgcctggcacattacataagtatctgtttaaaaaaaaaataaggccgggcacagtggctcacacctgtaatcccagaactttgggaggctgaggcaagtggattgcttgaactcaggagttcgagaccagcgtgggcaacatggtgagacccccatatctacaaaaaatacaaaaattagccaggcatggtggtgcgtacctgtagtcccagctacttgggaggctgaggtgtgggaggatcacctgagcccagggagtttgaggctgcagtgagctgtgatcatggcactgcactccagcctgggtgacagagtaagaccctgtctcaaaaaaataaataaaatgtaagcattggaaagctttggcacagtggcagaatcacactccaaatccgggacttcatgccctgccttctaaatggataattaannnnnnnnnnnnnnnnnnnnnnnnnnnnnnnnnnnnnnnnnnnnnnnnnnnnnnnnnnnnnnnnnnnnnnnnnnnnnnnnnnnnnnnnnnnnnnnnnnnnnnnnnnnnnnnnnnnnnnnnnnnnnnnccacccctcttcccaccctcctctgtgccccccaccaaccctgcattctgttttaacaggccctccagggaatcctgagtcatgctaaagtctgagaagaccttagggacaaatcctgcaaatttaggacatgggtaaaactcccttttttcctgccagaagttactttttttttttttttttgagacagggtctctatctttctctcaggctggagtgcaattcactgcagcctcgaactcctgggctcaagcaatcctcctgcctcagcttcccaagcagctgggactacaggtgtgcactaccacatccagctaattttttaaattttttgtagagacgagctctcactacattgcccaggctggtctcgaactcctgtcttcaagcagtcctcccatgttggcctcccaacatgctaggattataggcttgagccaccatgcctggccattaattcttttaaatgttgatttgtttttatacaatgttaatacattcaaattttaagaaaatatttttcacataattctcaactaccttattcaactttttaaaatctcctttacatacttgtaattatgttctcccacccttgttttataaaaacttttcatgtaactaaataatatccaattaaattgaaacaccaaattgttttaatcattcttattgttaggtatttactttttaatctatcctgttttttcgtcattaataactccactgtaaacatctctgtgcctgctgtgttttgttttttgtttaaattctcagaagaataattattgagtccgaggatgtaatatgagggaacagtttatggctcttactatgtattgccagaatgctttccagtggtaccaagtacaaagccactgccactagcaaatatatttgtaattagaaaattacacctatagaggaaaaatttagccacttatttagcagacttaaactcaagagtaattgaatagagctaatatttgaattagttagtgtaataaatttcattcctgactcttattatgttggtcaaaacgaataattcattcatcttcatttatcactgtttcacttaggtcagaaatcctgggtactaacttagttaaatcattttgctcatctatataatgagagagttggaacacacactagttgatctacaaggtccttcccaaagcataaacttagaaatattgagacttttctgtttatagaaattataaatgttcagcatagaaaatattaaacacagtaaagaaagaaaattcatccctaattccaaaccttagttaatattttttgtatgtacttcaagactttgttctgtgtttatacatttgcagtttttaaaagggatctgttgcagaactgtttttactgtattttattttttctatttaatatatcatgaacattttcccatgccaatgaatcttcttcaacaacagtattttaaaaattgatgcctaatatttatacgtatttgtggggtacacagaacattttgttatatgcataggatgtgtaacagtcaagtcagggtattttgaatattaatcgccttgtgtatttatcatttctgtgtgttgggaacatttccagtcctctcttctaggtattttgaaatataaaatacattgttgttagctatagccatcctactctgctatcaaacattagtactcattctttctatctaactgtatgtttgtacctactaaccaacatctctccctaccttgtcccatcacacccttccccatctcctgtaactatcattttattctctacctccatgacatcaattattgtatttcccacatatgagtgagaacatgtgatgtttatcttcaagtgcctagcttatttcacttacatagtgacctctagttccattcatatggctgaaaatgacaggatatcattctttttaatggctgaatagtactccattgtgttcttaccacattttgacacttcatctgttgatggacacttaggttgattccatattatctttgctattgtgaatagtgctgcaataaacatgagagtgcaggtgtccctttgataggctgatttcctttcctttagataaatacccagtagtgagattgctggattatatggtagttctgtttttagattttgagaaatctccatactgttttccataataggtgtattaatttacattcttaccaacagtatataaaagatcccttttctctgcttcctcaccagcatctgttattttttgtctttttaataatagccaatctaactagggtgagacgatacttcattgtggttttgatacacatttttctgatattagtgacgttgagcattttttcatgtacctattggtcatttgtatgtgtgcttttgaaaaatttttattcaggtcctttgcccactttttaatggaattatttggtttttgctattgagttgtttgaattcattgtatattctggatagtagtctcttgtcagatgaatagtttgtggatattttctcacattcaacaggttgctcttcacgctgttgattgtttcttgtgccgtgcagaagctttttagtttaatatagtcacatttgtctattttgtttgtttgtttgtttcttgtgcttttgaagtcttagccataaaaatatttgcctgggcccatgtcctagagtgtttttcttgtgttttcttccagtagttttatagtttaggatcttacatttaagtttttaatccattttgagtggatgtttgtaaatgacaagagctaggggtctagtttcatgtttctgcacgtggatatccagttttcccagcagcatttattgaagaggatgtcctttccccagtgtatgttctcatcgccttggtcaaaaatcagttggttgtaaatatgtggacttatttcttggttccctgttttgctccattggtatatgtgtctgtttttatgccattttaacaacattttgaattactctgtaggtatatcatgatttatttacctttttccctattactgggcatttgtgttatttccaggtttttttttttttttttgagacaagatttcactctgttgtcaggctggagtgcagtggcatgatcatagttcactgcaacctcgaactcctgggctcacataatcttcctgcctccatctccaaagtagctagaactacagatacactccaccacccctggctaattttttttaattttagtagagacgaagtctcactgtgttgccctcgctggtctcaaactctgggctcaagcgatcctcctgcttctgactcttaagtgctgggattacaggcatgagccaccacgcccagccccaattgttttttataatatatagttgtgcaaggaacattcttgcgtacatttctttagaatgaatgcctagagtggaatagctaacacagagaatgctaagaatttttatatgtattgtcaaattaccttccaagaacattgtactagttcacacccaccctcacagtatagcagggtgtattccccaattttatagtgaagaattctacctcacaggtatcctaaaataggtatatgtacatataataaaatttcttttcagaaatcaacagtcaaaaaccatctctttttataccttagatagcttgcttaggtatatatacaaagtttatttctggctactccctttaaccttgtttaatctcttcctattagataattagtccaagttattaatatagctgagaccatttctgaggtcctcctttggtaataagagcttaaagctccgaaggaaaatattccttcataacagctttctctgttttttatttgacaggccacaccccctgtgaccattccaggatcggccaagttcacccccaatggcagcagcttcagcatttcctggcaatctcctccggtcactttcacaggcatcccagtaagtagaaaaacgaaaaagccaaaaatctggtcaaagccaatgtagactaaatttagcgaacaaatagtagaggcatgcaagaaaaatacaaacatcagaatgccagaagtactatatttcttaaatgatatttgtaaactcatcagcagatatcacttcttttcgaaaaggtgttttgactggcatttcagaaaactataagagagtttcaactgttcataaacaacttgttggaaatatatcaagattttttgtgtgttggtagtgtatttgtatgtttccaaaagactgtaaaattaatagctgaactcagatcttatatggaaaaaatggtgtttatcattataagtaactataaaatttattacttaggaagtgttctgtacgtatgtcattttgaaggctcaaaaaatacatcaaaatcattttttctttcagagtctgaataatccatgctgatggataatctgaaactaaatgagtgctaaaatatgcaatcagacttaagtagtacataagaattgatttgacatattaaatgattcctgtctgataaatcactgtgaattaacttgattcctaaccattcatttaaaaaatatattggatcttttatagtttatcacagaacagccacatgcatgcacactgttgatgctcacagtggtgtataactcctgataaggttcaggaagtggcttatgataacagatattaaccttattttctcttctccacccgtctccccaaggacctcacaaaagcttcttattgtcaaccactggcatctcccggaggtttccagcaaagtctaacgccttctgtggaactgataaaaatgaaagtggctgaatgaattgtgctgtgctctgttgatgaatatttattaaattccatagaggaatagccaagaataaaaagcatactgctagaggcaatttgggaaatggtggcttccagaaaagactctgggaatgtgatttgtaaacaacaccatgggtctgaagtcatttttaaagttgtattttcattgaatagtggtaacttctggtagctctgcaagagtgaccttgttagtagacgttagaagagggcagcttagacgtgttggtattagttttgcttctggcaagaacactgatccactgatgtaggtgtcaggggttaacaatctgtttggggacttttttttttttttggtagacataaaaagacccagagtggctcttgatacatttttgagacagccactctgtattaacctaaaatggcagccacagttacagaattattgagaccatcttttctgcatcctattaattcctgcctttgacttgggaagaattttcaatgatgtatgggaagcatacaccatgttgctcatctggtactatagcatgtagatggaacagcccagttcaaacctctttcagactacctctgtggccaagcaaactggaatgtttttcccctttgcttttctaactaaattatcttctgaagtatagggaaatcactctgaggggctctttactagctccatgtcctccatggttcttatgtgtcttacacactaggataccagccaggataccttatatcactcgtttttcaacaatagaatgttaaaactctgctatggacactgtgtatttctaccctcatctcagtgcccttgattttttacagaatccctcatttcactctgtgttgattacctgggacattctagacaaaagctttgacagaaagtatatatatgatatataaaacataccatatatacgatatataaaacattccgtatatatgatatataaaacataccatagctgggttaagtaggtattccactaaaatcctatgtgagctttttttttttttttttcttgaaacagggtctcagtccatgacccaggcttagagtgcagtggtgccatcacggctcactgcagcctcaacctccctgggctcatcttccccacttcagcctcctgagtagctgggactacagaagcacaccatcacacctggctaatttttgtatttttagtagatacgggggtttcccatgttgcccaggctggtcttgaactcctgagctcaagcaatctgcccacctcagcctcccaaagtgctgggattacaggcttgagccactgcgcccagctgagagcttctaatttattctttcaccagagaattcccaattgtgctgattgtgtaacctgtttcagcaaagactttagactgattttagcagtcaagcttgccattcctatttaaagataaagtaagggtggggtggaattttcaaaggtttttgttttaccctagaaagacaagaaggctacaactaagaatgttctttttgttgctaaactctctggccatgctctaaaaaaaacaagcaggtgctgctgtcctcctcctcctccttctcctggtgggctagctctcataacagcccacccacacagatgcaggactgttgtacacccacggacagcatgccagcagctgtccctgaatgctccaggagtgccaggcaagccacgtagaatttaaaaacgtgaattcttaccctctaaattggtgtaatagggttttcagaccaaagctctaaaagttgtaagttataatgaatttgtattagtgatggcttcaattgtgtccaaactgaagaacagagaaatattcatgtgataaaatgcttttcaaaaaaaaaatacctttatccttgtactctaaaataaataccctgaggttgtcaaccctgtttagagttcacttttctcccacatctttgagacgtggtattgaagagggatacttttgtacacttcctagaaagtgagaaaaacccctttctgaaaaatcccaagggttgcaggattttatttattcatttgcctatgctagatttcctgaacattggactttaataagttccctgggtaagacctcttcccggaggtgtgtagctgagaaggctgaactgcatatttaacaaatgtaactggaagttcagtcttttgtagcctaaggctgtggggagaggggtaggaaagagaacatccttaattacaactttctttgacatgtttttccctaatgacctgccttctctcctaattatctccatttctttctctctcttttcatgacagaaaactaagagccgttggcccctttattaatcagctcaagactgccataaaataccacagacttggcagcttaaacaacagaaatttattttctcacagttctagaggctagaagtccaaatcaacgtgtcggccaattcagttctggtgaagaccccttcctgcttgtagatggctgccttctcactgtgcatgcacagtcgagagagaaagagagagagagagaaatcgagagagagagcacaagcacatgccagggcactggcaagccagggagagcaagcatggaggaatgcaccagcctctgctatcccttcttaaaggacactaatcctgttgggtcagggccccacccttatgacctccttaaaggccctatgtccaaatacaaccacactggggattagagctttatcatatgaatttgagggacacaaacattcgatctataacagcccctaggaaagcaagtataagctagtcaacctgctatccaagttctaggaggcttcaggctgttggggagggtctccaaagctgaaatagcagtgcttatttgtcaaatgcttagctggtttgaggtttcttttttaatgccttgagggaagattcagaattatatgaggttaaaaccaagccagaggcctttttttcctccctcttaagagaaaaacttacaagaaaagaaatttctcctgcatacttacagaagggcacagcatctttagtgtgaggcttacttgcaaatcctggctctggcatttgtgaacgccatgtgatccttctaaagtaatatcctctactctagttctacctcttagagttgtgtcgttcacacagtgcctggcatgtagctgacaatgcagatttcctaccatcattgctgcctttactgtgtctaagcactgtataatgggtcagagaaagcggctcctccctatttaggattgattcctgtaacacagatatactcaacacatgggagagattagtcacaatttttacagactataatttaaaattctttttttttttatactgggaactttccaaatacgttttgtttttgttcttttttttaaattaaagttttagggtacatgtgcccaacgtgcaggtttgttacatatgtatacatgtgccatgttggtgtgctgcacccattaactcttcatttaacattagatatgtctcctaatgctatccctcccccgccccccacaacaggccctggtgtgtgatgttccccttcctgtgtccatgtattctcattgttcaattcccatctatgagtgagaacatgcagcgtttggttttttgtctttgcgatagtttgctgagaatgatggtttccagcttcatccatgtccctacaaaggacatgaactcatcattttttatggctgcatagtattccatggtgtatatgtgccacattttcttaatccagtctttcattgttggacatttgggttggttccaagtctttgctattgtgaatagtgtccaaataaacatacgtgtgcatgtgtctttatagcagcatgatttatactcctttgggtatatacccagtaatgggatggctgggtcaaatggtatttctagttctagatccctgaggaatcgctacactgacttccacaatggttgaactagtttacagtcccaccaacagtgtaaaagtgttcctgtttctccacatcctctccagcacctgttgtttcctgactttttaatgatcaccattctaactgatgtgagatggtatctcattgtggttttgatttgcatttctctgatggccagtgatgatgaacattttttcatgtgtcttttggccgcataaatgtcttcttttgagaagtgtctgttcatatccttcgcccactttttgatggggttgtttgtttttttcttgtaaatttgttggagttcattgtagattctggatattagccctttgtcagatgagtaaattgcaaaaattttctcccattctgtaggttgcctgttcactctgatggtagtttcttttgctgtgcagaagctctttagtttaattagatcccatttgtcaattttggcttttgttgccattgcttttggtgttttagacatgaagtccttgtccatgcctatgtcctgaatggtactgcctaggttttcttctagggtttttatggttttaggtctaacatttaagtctttaatccatcttgaattaatttttgtataaggtgtaaggaagggatccagtttcagctttctacatatggctagccagttttcccagcaccatttattaaatagggaatcctttccccatttcttgtttttgtcaggtttgtcaaagatcagataattgtagatatgtggcattatttctgagggctccgttctgttccattggtctatatctctgttttggtaccattaccatgctattttggttactgtagccttgtagtatagtttgaagtcaggtagcgtgatgcctccagctttgttcttttggcttaggattgacttggcaatgcgggctcttttttggttccatatgaactttaaagtagttttttccgattcgtgaagaaagtcattggtagcttgatggggatgacattgaatctatgaattaccttggacagtatggccattttcacgatattgattcttcctatccatgagcatggaatgttcttccatttgtttgtatcctcttttatttcattgagcagtggtttgtagttactcccttgaagaggtccttcgcatcccttgtaagttggattcctaggtattttattctctttgaagcaattgtgaatgggagttcannnnnnnnnnnnnnnnnnnnnnnnnnnnnnnnnnnnnnnnnnnnnnnnnnnnnnnnnnnnnnnnnnnnnnnnnnnnnnnnnnnnnnnnnnnnnnnnnnnnnnnnnnnnnnnnnnnnnnnnnnnnnnnnnnnnnnnnnnnnnnnnnnnnnnnnnnnnnnnnnnnnnnnnnnnnnnnnnnnnnnnnnnnnnnnnnnnnnnnnnnnnnnnnnnnnnnnnnnnnnnnnnnnnnnnnnnnnnnnnnnnnnnnnnnnnnnnnnnnnnnnnnnnnnnnnnnnnnnnnnnnnnnnnnnnnnnnnnnnnnnnnnnnnnnnnnnnnnnnnnnnnnnnnnnnnnnnnnnnnnnnnnnnnnnnnnnnnnnnnnnnnnnnnnnnnnnnnnnnnnnnnnnnnnnnnnnnnnnnnnnnnnnnnnnnnnnnnnnnnnnnnnnnnnnnnnnnnnnnnnnnnnnnnnnnnnnnnnnnnnnnnnnnnnnnnnnnnnnnnnnnnnnnnnnnnnnnnnnnnnnnnnnnnnnnnnnnnnnnnnnnnnnnnnnnnnnnnnnnnnnnnnnnnnnnnnnnnnnnnnnnnnnnnnnnnnnnnnnnnnnnnnnnnnnnnnnnnnnnnnnnnnnnnnnnnnnnnnnnnnnnnnnnnnnnnnnnnnnnnnnnnnnnnnnnnnnnnnnnnnnnnnnnnnnnnnnnnnnnnnnnnnnnnnnnnnnnnnnnnnnnnnnnnnnnnnnnnnnnnnnnnnnnnnnnnnnnnnnnnnnnnnnnnnnnnnnnnnnnnnnnnnnnnnnnnnnnnnnnnnnnnnnnnnnnnnnnnnnnnnnnnnnnnnnnnnnnnnnnnnnnnnnnnnnnnnnnnnnnnnnnnnnnnnnnnnnnnnnnnnnnnnnnnnnnnnnnnnnnnnnnnnnnnnnnnnnnnnnnnnnnnnnnnnnnnnnnnnnnnnnnnnnnnnnnnnnnnnnnnnnnnnnnnnnnnnnnnnnnnnnnnnnnnnnnnnnnnnnnnnnnnnnnnnnnnnnnnnnnnnnnnnnnnnnnnnnnnnnnnnnnnnnnnnnnnnnnnnnnnnnnnnnnnnnnnnnnnnnnnnnnnnnnnnnnnnnnnnnnnnnnnnnnnnnnnnnnnnnnnnnnnnnnnnnnnnnnnnnnnnnnnnnnnnnnnnnnnnnnnnnnnnnnnnnnnnnnnnnnnnnnnnnnnnnnnnnnnnnnnnnnnnnnnnnnnnnnnnnnnnnnnnnnnnnnnnnnnnnnnnnnnnnnnnnnnnnnnnnnnnnnnnnnnnnnnnnnnnnnnnnnnnnnnnnnnnnnnnnnnnnnnnnnnnnnnnnnnnnnnnnnnnnnnnnnnnnnnnnnnnnnnnnnnnnnnnnnnnnnnnnnnnnnnnnnnnnnnnnnnnnnnnnnnnnnnnnnnnnnnnnnnnnnnnnnnnnnnnnnnnnnnnnnnnnnnnnnnnnnnnnnnnnnnnnnnnnnnnnnnnnnnnnnnnnnnnnnnnnnnnnnnnnnnnnnnnnnnnnnnnnnnnnnnnnnnnnnnnnnnnnnnnnnnnnnnnnnnnnnnnnnnnnnnnnnnnnnnnnnnnnnnnnnnnnnnnnnnnnnnnnnnnnnnnnnnnnnnnnnnnnnnnnnnnnnnnnnnnnnnnnnnnnnnnnnnnnnnnnnnnnnnnnnnnnnnnnnnnnnnnnnnnnnnnnnnnnnnnnnnnnnnnnnnnnnnnnnnnnnnnnnnnnnnnnnnnnnnnnnnnnnnnnnnnnnnnnnnnnnnnnnnnnnnnnnnnnnnnnnnnnnnnnnnnnnnnnnnnnnnnnnnnnnnnnnnnnnnnnnnnnnnnnnnnnnnnnnnnnnnnnnnnnnnnnnnnnnnnnnnnnnnnnnnnnnnnnnnnnnnnnnnnnnnnnnnnnnnnnnnnnnnnnnnnnnnnnnnttgcttggtagatctttcctccatccctttattttgagcctatgtgtgtctctgcacatgagatgggtttcctgaatacagcacactgatgggtcttgactctttatccaatttgccagtctgtgtcttttaattggagcatttagcccatttacatttgaggttaatattgttatgtgtgaatttgatcctgtcattatgatgttagctggttgttttgctcgttacttgatgcagtttcttcctagcctcgatggtctttacaatttggcatgtttttgcagtggctggtaccagttgttcctttccatgtttagcacttccttcaggagctcttttagggcaggcctggtggtgacaaaatctctcagcatttgcttgtctgtaaagtattttatttctccttcacttatgaagcttagtttggctgaatatgaacttctgggttgaaaattcttttctttaagaatgttgaatattggcccccactctcttctggcttgtatagtttctgctgagagatcagctgttagtccgatgggcttccctttgtgggtaacccaacctttctctctggctgcccttaatattttttccttcatttcagctttggtgaatctgacaattatgtgtcttggagttgctcttctcaaggagtatctttgtggcattctctgtatttcctgaatttgaatattggcctgccttgctagattggggaagttctcctggataatatcctgcagagtgttttccaacttggttccattctccctgtcactttcgggtacaccagtcagacatagatttggtcttttcacatagtcccatatttcttggaggctttgttcatttctttttattcttttttgtctaaacttctcttctcacttcctttcattcatttgatcttccatcactgataccctttcttccacttgatcgaatcagctactgaggcttgtgcattcgtcacgtagttcttgcgccttggttttcagttccaacaggtcctttaaggacttctctgcattggttattctggttagccattcgtctaaatttttttcaatgtttttaacttctttgccatgggttcgaacttcctcctttagctcggagtagtttgatcgtctgaagccttcttctctcaacttgtcaaagtcattttccatccagctttgttccgttgctggtgagtagctgcgctgcgttcctttggaggaggagaggcgctctgatttttagagtttccagtttttctgctgttttttccccatctttgtggttttatctacctttggtctttgatgatggtgatatacagatggggttttggtgtggatgtcctttctgtttgttagttttccttctaacagtcaggaccctcagctgcaggtctgttggagtttgctggcggtccactccagaccctgtttgcctgggtatcagcagcggaggctgcagaacagtggttattggtgaacagcaaatgttgctgcctgatcgttcctctggaagttttgtctcagagaagtacccggccgtgtgaggtgtcagtctgcccctactgggggatgcctcccagttaggctactcgggggtcatggacccacttgaggaggcagtctgtccgtcctcagatctccagctgcgtgctgggagaatcactgctctcttcaaagctgtcagacagggacatttaagtctgcaaagttttctgctgccttttgtttggctatgccctgcccccagaggtggagtctacagaggcaggcaggcctccttgagctgtggtgggctccaccctgttcgagcttcctggctgctttgtttacctactcaagcctcggcaatggcgggtgcccctccccagcctcactgccaccttgcagtttgatctcagactgctgtggtagcaatgagtgaggctccatgggcgtaggaccctccgagccaggtgcaggatataatctcctggtgtgccgtttgctaagactgttggaaaagcgcagtattagggtgggagagacccaattttccaggtgctgtctgtcacccctttctttgactaggaaagggaattccctgagcccttgcgcttcccgggtgaggcgatgcctcatcctgcttcggctcacactcggtgtgctgcacccactgtcgtgcacccactatctgacacttcccagtgagttgaacccggtacctcagttggaaatgcagaaatcacccatcttctgcatcactcatgctgggagctgtagactggagctgttcctatttggccatctaatttaaaattctttagactcttctgaggtcacacctaaccaacaaactatgtacatatagcccaataattttatttagctagaaatattatcatattatactgtccaagcacattatatgctttataaaacatgctacaaaatagaacttggaaatggttaagaaataaacaaattgaaatgcagagaccactaagagagagagtatttgctttatagggctttattttagggcacacattatttacatcaacgatatggcaggatggaagagtgcaaaaagcagggctttgacatcattcggaagtgagttccaaggccagctgtgttcaagtcagacaatggtgttcaaaccctgagtccatttactgtgtggactggacagtgcacttaacttctccattttctcatctataaaatggaaattatggctatgatagggttgttgcgaagattaaaatagataacatatggaagacacttagcttatatagcaggctctcagcaaattacttctgctgctacttttgcctctgggatgttctgcaggccatttccctgctcaaagcctaaatttctctatctgtaagatgtagatatagattatttattttgcaagttttctgtgagaattaaaagagataatagataacctacttgcctgtctttcacattcgcaagcactgaataaatggtagttgactgccccagttactcccttggtttctccaccctcatcctcaactaaaataagaagctgaaacatgactgtcttgccattaaaagtctgaagaaaaaactcacatgtcatattgagcctcctactgaactcagccacatatggaagtttgaagtgggtcctcgaaatgcatgtactgaactccagagttaagagagccattagcaggaagaaggactttggcgaggggtcattcctgcaggaggtccatgttgtggtttgcaagtgtcccccaaagttcatgtgttggaaatataatccccagtgcagcagtgttgagaggtggaacccttaagaggtgatggggtccagaggactctactctcatgaatggattagtgtcattatcaggagagtgggtttgttataaaaacaagctcagccttctcttaagtgaactgttacccttccaccctttgccctgggatgacacagcgagaaggccgttgtcacatgccggcccctcaaccttggactttccagcctccagaactttaaaaaataaatttctgcttattataaatcatccagtctcaggtactctgttatagcagcacaaaaccgctgaagacaatccatgtccctcaaaccctgttcctggaattttcaaaagcctgttcctcatgcctccccgaccctgctgcttctgtaactttctcatctcagaaagtggcaccactgtgcctcctgccacttgggccagaacctgggattcatccttgactcctcaattcatccttgattcatctagagatgcaattttctttgtgccccatcctaacccacaagtcctaggctgtgcctctaaacaacaggaatccagaccctccccaccactgccgccatacctagtctaaaccaccagtatgtctttgcctggtatactgcaaaagcctcttaactccagggctcctttccaggctgtctgctgtccattctccaaagtgccaaagtgatctgtttaaagcattaatcagatgtcttacttttaaaaacactccaatggcttacttattgccgttagaataacattcagatcccttattgcaggtcagaggcatagcttgatacttccgtctcctctcctcccaccctccacctcccacaaagtgcccacccctttttctgcagtgccttgtaggtgaaaggtaacctcctcaggaagccttctcttaccactcaagataaataaatgtcctctccttctattacactttagcctgttatcctatttcatttctgtcagctacttatcactaaaatgatcttgtgtgatttcgtatttattgtctgtcttctcactagaacgtaagctccatgagggcagagaatttgttttgttcacagctatatcctcagaatctgtaacaatgcctggtacatagcaagtacttaataaatatctgttgaatgaagagtatccaataatctcatatcacttcatgcaaaagggctatggcaactttgcatgatctagaaacttccacattatccgtggctgatgggagtagtgttactgtcatgtcaaccaaacttttccagttctctgactaaatgaagtacagtgttcttgggattctataagttctacaagaattgttaatttttatgtttattttcctgataatttaaaacaattcatataagcatatcagagatcatctacagtgactgtagatgtctcaggtattcactccctctagtttgctgttattcatcctgtacaaaaccaaagccattatgagatggggtgaggaggattctgctcttggaggaagctgcgtatctatacacatgaaatgaatgcactgaactccaaagcttttatttttaaaaactctgaatgttacctctgctggcccttgctccacccaactttagcatgaagaccagtggtatagaatagttcaaactcatggcaacaatggttccaaatgttagatttttacttacctgtataatttttttttttttttttgagatgtgtctcactctgttgcccaggctagagtgcaacggcacaatctcgactcactgctcccttgaactctccacactcaggtgatcctcccacctcagctgagtagctgggactttaggtgcacatcaccaatctggctaatttgtgtatttttagtagagatggggtttcaccatgttgcccagactgggctcaaactcctggactcaagtgatccattcaccttggcctcccaaagtgctaggattacaggcataagctaccactcctggccctacctgtataattttttaaatgtctaagttttgtgctgctataacagaataccttagactgggtaatctataatgaacagaaatttactgactaacaacctggaggcggggaagtccaacatcaacatgccagcctctgttagggcctttatgctgcatcatcacatggcagaaggtgagagggtgaggggggccaaactggcccttgcagaacactaatcccacccatgggagtggagccctcatagcctaatcacctcttaagggccccacctcttaatactattacaatggcaagtaagtttcaacataagttttggaggggacaaacattcaagccatagcattaaaattaatgtctgggaaaataacactgatgatctctattaggccatacttgcattgctataaagaaatacctgagatagggtaagttataaagaaaagaggtttaattggctctacaggctgtacaggaagcacagtggcatctgcttctggggaggcctcagggagcttttactcatggtggaaggtgaagcaggagcaggcacgtcatgtatgaaagcaggaatgggcataaaacaaccacagtcttatgtaaactcaagagtgagaggtcacatatcaccaagggaatggtccaagctattcatgagggatccatccccataatccacacacctcccaccaggccccacctccagcattggggattacttttcaacatgaaattcaggcagagacacacatccgaactgtgtcatgtgcattcctttacgttgaaagagaagagaaagtactaatacctgtactagagaaaagcaattctctaaggatgtttggggaatgttcccatgacttttaagtgacaatgctattcctgtgaccacgttggctcctaggtttttaaatttattaaatgtctatcctcctacatatggcaatactgattaattagttgaaacattctttttccgggaggttggcggcgcggggctgaaggctagcaaaccgagcgatcatgtcgcacaaacaaatttactatttggacaaatacgacgacgaggagtttgagtatcgacatgtcatgctgcccaaggacatagccaagctggtccctaaaacccatttgatgtctgaatctgaatggaggaatcttggcattcagcagagtcagggatgggtccattatatgatccatgaaccagaacctcacatcttgctgttccggcacccactacccgagaaaacaaagaaatgaagctggcaagctgcttttcagcctcaagctttacacagctgtccttacttcctaacatctttcagataacattattatgttgccttcttgcttctcactttgatatttaaaagatgttcaatacactgtttgaatgtgctggtaactgctttgcttcttgagtagagccaccaccaccatagcccagccagatgagtgctctgtggacccacagcctcagctgagtgtgaccccagaagccacgatgtgttctgtatccagaacacacttggcagatggaggaagcatctgagtttgagaccatggctgttacagggatcatgtaaacttgctgtttttgttttttcctgccgggtgttgtatgtatggtgacttgcggatttatgtttcagtgtactggaaactttccattttattcaagaaatctgttcatgttaaaagccttggttaaagaggaagtttttataatctaaaaaaaaaagaaacattctttttcctttgttaaaaaaattaatttgttgcagcttttaagaattccagaagctgggaagattacttagtgttaggagacaggtaatgcaaagggctgaagtgagtaatccaggaggggctgaggacagtaggggccctcctctatgactgagggacagaaaagcaacagggttaaacacaggtcctggtgccagggagagctgcagcacagccctgggtctaccatcacacatgccatgacctttggcaagttacttaacctccatctgccttagtctcctaatctgtaaaatgggaacaatagtaatactgcgtggggtcgttgtgaagactaaagctgctgtgagtgtacctgcacatagtgagcgctcagtaagtgttcggtgggtggcatacgttcttgatttgctcagactctctgcctcttgcctttattccttcctgttgggacgtgagagtctgctgatggggtgttttttacaagaatccatgtatttagtggcagtgattgatccactagagccaacagaagacctagacctgcactgtgtcattgtcgcttactagctacgtaatgttaaataaatctcttaacctctctaggtatgtttcatcctctaaaaagggaatcatgagccttgccctacttgacagggttcatgaggatcaaaagaaatagacaggaatgtactttaagatttaaaatattattcaagtgaaaatatggtattatgagccacttgaaatgcatagatatgaagtaaaaaaatgtttgagatattggctgttggtgggtcttctctgtttgggaatgcattttaattctgccatgagcagccctcctccatttaatgtgtggtctctgtgaggaaagtatttcatttcatctctgcttctttttttttttttttttttttttttttgagacaggatctcactctgtcacccaggctggagtgcagtggcacaatctcagctcactgcaacctccgccccggggttcaagcagttctcctgcctcagcctcccaagtagctgggattacaggcacacaaccccaacttggctaatttttgtactttttggtacagacggggtttcaccatgttggccaggctgattgaactcctgaccacaagtgatccgccctccttggcctcccaaagttctgagattacaggtatgaatcaccgtgcctggcctcatctctgcttctaatggtcaaggatcagtgtccacacagcaaaggttaactaactgcatgggtggagaacctgccccatcaactttcttttccatgtattcaccaggtgtcacccacacatcatccggtgggcacaggagagcagagacagcatgcgcacacggtcctgtcctccccacccagaggcacagtcagcttaaggtacgacagcttaaaaaactccacacacctcaccacaagggaattaactgtaaaacagaacagcagagagaaccctgagaaatgatcttctataaaatttctccacaattgacaaaacaccctttctttttttcccatggtttttaccatccattacctattaatgaagatttgttgtttcggggggtaatgatttacaataaggtttttgttttttgtttttgtttttgttttacagaataggtaatggtgattattgggtctatttggagccatgttgtattaatctctatattaaatgaactataagatacaatttttaatgcagatcaagagtgatctccccagaagttccttaaccaaaatacaatagtccccttttatccacagttttacttttctgtggtttcagttacccaaagtcaattgtggtccaaaaatgttaaatggagaattccagaaataaatgattcataagttttaaattgcacaccattctgagtagtgtgatgaaatttcgtgccatccagctcagtcctgcctgcgatgtatgttatccctttgttcagtgtatctacactgtctacactactcgcccattagattgactgtaacgaactgtacttgtgttcaagtaacccttcttttacttaataatggacccaaagtgcaagagtggtgaggctagaattcagatatgctaaagacaagctataaagtgcttcctttaagtgaaaaggtgaaagttttcaacttaacaaagaaagaaaaaaatttttatactgagattgcgaagatcgacagtaagaatgaatcttcaatccatgaaactgtaaagaaagaaaaagtcatgcataatatatatatagggtttgtactatttgcagtttgaggcatccactggaggtcttggaacatattccccacccttagcagggactgctgtactagaaattgagaatggtggaagcatttgaaagtacctacttaaaaacttgaaagagcaatgttgctctctactggcatttcttgtgtttacttgtttaattcagttttatgaagatgcccaaatggacatgtccacaagtagacaaatagaagcctaagggatatggtagcaaattttaacagttgagtgtagtggctgtgaaaacaaccagcacatattagagtctgaacctagagagaagtcgctgtctcccaggctggagtgcagcgcgatcttggctcactgcaaactccacctcccgggttcaagtgattctcctgcctcagcctcctgagtagctgggattacaggtacatgcctggctaatttttgtgtgttttaagtagagacagagtttcaccatgttgacaggctggtctcaaactcctgacctctggtgatccgcccacctcagcctcccaaagtgctgggattacaggcatgagccaccatggccagccttttttttttttttttcctccctcactcttgcaagggatttttgagctctccatagaatgcccattgaattcctcccactaaactaaccttcctcgtctgtcttacaggaagcccaggggagagggcaaaaagtgtcggaaggtgtacgggatggagaaccgagacatgtggtgtaccgcctgccgctggaagaaggcctgccagaggttcctcgactgagagacccccaggcagaggggctcagggccctgagccgctcctgccctggcctgccactgcaggtgttggaaagagcttttcctactgaataaaacacagttgaagccaggaaaagccctttcaggaaccttggaggaataacagcaaaaacacagaaaaattgtttaagtcaccacctatgacaaaagaaagttgctcttactgagaacccagcttggagcagctataactagttttttttccttcaaaagaaaagtcaactttttttgctgtatgtctagacttaaaactgtggacttctgtagcaattgaaccaacaaagcccattttacctagaaaggaggcatattttgataagctttctgaattatgccattttcaagatttttttgacacttaaaaaacaagctacaggttattcagtagcatttgtacaaagatcaatacttacttttgttgtgaataatcttttccgtatcttccatttgacttcttggagcagtatatgtcaggatgtgttgcaagacagcgcagcactctgggcatcttttctatggctttttgtttgtttttcttttaagaatggccccacactgaaccatggtagagctattagtttgtagggccccagatggcataaactcgagaagggattgtccacggaaatcaccagcagacttcagcccgaagctgagttcaggaagtccagctgtcactgttgggaaacatctaggagtcttccttggatccataagaagctcttcccctaaaggcagcacagctaactctactctctacctgccacaactcagtcaagaattggcacctgtagccatctgggtaagcctcgatgcttctttcagggatgtgacacaaatggcaactcggagctatttgttactgcttgtctgtcaagattgtagccaggttaatgggtcattttccttctctccagactccaccactgactgatttcagaagaggtagagaactccaaactgtcccagcaggtttgctttagacaacagagcacagcccacatggccctacctgttcagaaagtcatgttagatcaacaaaccacttccattctgagtgcacttttataggttttatgctttagcatgtccgggagatgagttaattaacaatataaacattatgtgagtaaatggaaggtccaaactttaagtttttcttataaaaatattggagctattcatttaagaatttgctcaaaagggaacataacgccaaaaggaaaatgcatgtaggtataggaatttctcagtttagtagggccagggcttgcactatgttccatttattgggcttcgtaacttacttgcttgtttgtttgggggatagtggtgtggggagaggggagtcgtcaagccctataaataagctcattctctatctacccgactctcaattgccctgctaaagagttatttctcctatacctatgcaaagtaggaagagcaccttataggaggcactgtatagggacaggggacatgggatcagccataggaatgttaaatgaaattgcacagaggaaagtttaatatatgtctagagattatacatacacttttttaagcgtaaaaagaagacatctagtaatgacagatattctttttatatacaagcaaaagaaagtataaggaggttctacagtgcaacatccacaatctgtgcattcacatattatgggacttttattttttaaactctcatataaattttttaaaattactccttggaagagatcctggtttttttcttcatttatttttttctttaaaaacatttattttaagagaagagaaaaagagcttcatctaattttgcatcttgattaccaatcagtactagtcacagcaccagcaatactgtatgttttagactgacaaggtcagccaggaaatggcatttttttaaacgcagaaatgtgtttgtttcctctactctaacacgtcctttctcctcctggtgtcctgtcaccccccatgcagcaccactgatgcgagatgatgctctggcctggtccaggaagccctgagccatgggcagattgcccagtggccttgggcggccagagcttgtcacctgtttaaacaagttcaccatgtgtttaaatgacagggtacagtcctggaccagaggtttttctcttcagcaaagctccctggcccttgatcgttggactgttactaatagaaaaagattcaagtcatgaagtataaaatccatcccccatcccagaactttgaaacacaaggagggagagatctttgctatggagcagtcctggagcaaagccccgtggcttccacccccagatatataccccataagtagtgctgagctccagcttagctgagccaagctcagtccttatctggtgttcagccagtgcacaggtataagcagaactacagagctgaatgtagcttccctgggatctcttctcctttctaaagcatttttcacacagttctgtacctcctacccaagttggggctgctttctgcctgctagcccacggctctgtgtactttcttttctggcttcaggtgcagacagaccctcagtaccttcctggacacagacacatattccctggaccaaggcgtggaataactagtagaccaccaagccacaggtggctggtcttgaagaaaagggattatactccttacaggccacccagaaagctatgaattccaatatacaccactgatcgtgcaagttagggttttttttttttaaacgtagcattattttgttatattttggaactaaatgaagtgccaaattaaccagacattcgtttgatgccatctctgtggaaccaagttctctgtgtgtgttcgtttggctgggaggagggggaggactgggcagactgctcccacagcaggctggcagtggaactggagccctggccaccgcagggagctcagaggccaatctacgcaaaaggcatgcaaaacaatggattctggtcccaaaatatttctaagtaaggcatgatgtagccttttgattttttttttatcctttgacaccccagccttcagaaaaggtttttcatctctctccaaagaagtcatttcatagtgactgacaggacattctccagagagcgacaaagcagagtggccagcaggcagtggtgttaagccttgggccttcccagcagatgtgtgctgcattggtgggtgggaggcagtgtgacagcctggagaaaacacacaggtagcaagggagtcaggggggaggtacaagagggctgtggacacctggctcttgctcatcttcttggtgctgatcagctggtggtcaccatccctaagtacctcccagggagctgccattttctcctctgggagcagctgcctgaagcaaggagagaatgacctgaagggaagtacctccggccaagagtgcagggctgctgtgcctagcctgagcgggccatctctagcagatatggacttctctccaccacactagctgaaaagttttctcccttggttggcaaaagccagtgtcaggaaaaaagctgtgggtttctgaccaagaatgtgtgcgcttagctgcaaagtgcctgtcagcagctccaggcaccaacaaggtgcccttttattagacaattcctgcccgaacataaccatattgcagatgaaaattttcaatagagaatgacacaattcttgacctttctaaaaacttttcaaagagatagtcacatgtgtatatgttgcaaaagatttttgaaactgaaatgtcctccattaaatctcaagagcactcgagttttaagtctgctgtttctggtgtcacactaagacacacttttgaaagcagccctgggttctgaattagttggcactgctgaatccatgttcccccttcatcagactccaaagtgcagcattcacttgcaaaggttgagagaaaagtggccagaattgtacatataacagagaataccttgagaatagtagcaaaatactgtaaataatattcatttcctcagggaaaaataaagggcatgcaaaaataggtctggagactcctgaaactaggaagaattttgttatcactaaagtcttttatagtcagaacaatttttttttcaaatgaacatggtatcatttcaagacaaatttatgtgaactgggcagtactgacatttgtgaggcataggggagtgccctgggaaaacggtttggagctgacctgtagcctaaggctaacatttgaaccacaggtgcaatgcctgggggtgggggagggggacggggtgggggtggtattcctagactcacgtaaggctttttctgaatgtaattgtgaatacaaagccttgctggtcctttttatcattacccaatggatgactgtttattagctatcagcagaattccgtaggcgaaagcaagccgtgaacgatgtacattttgctttaatagcatgttagcgaacaaacttccatggacttttgtggacaaggtgctgctttttctcatgaccctgtagaattgctatcgaccacatcttctgtagcactgacctgtgtgaactcagggaagaatttgtgcatacaaatgagtggaaacagagcaggattcatgaatatgaatgagaatgtgaatcattttggagaatgccctgggcacacgggtcaactggaaatttcatttctctaagaaagtagccctaccagcggcacggactgttcctgttcctcatacctgtggggattcctccatattggaactgtttcatgtatcttttttgcattgtaactagccaaacctgaagtcagtaaataaaatgagattagcactttttttaggtaccagttgtatcactgagtaatgcacaccaatagagcaagaaagtataaaatgtatttaagaccaactggtttgcttattatgactgactttgaaaaagcccatatccaatgatatacatgctttaaaaggtatatctatcgtaggaccaggaaccaaaatgggaattttacttctggtcctgttttgtaaatagttcctttttttgaagacaatctcatgttttataacttttgttgtgggtctgagaatcacaatggtaatatgtcttggcaaaacataacctttaaatacaaaaacaattataacttaattttccaaataaaacaagaaatacactgattaggcttctacagttctaagagacatgacactttggtaataagcgtcagtactctacttctcaagttaactggaaatattttacaagatgcagtgttttgtaatcacaaagaacgcagacattttgtgagaaatgaccttggttttatacattgtagcttattttttaaaatatagtattttaccaggcaggaagtattaatattataagtaattcttgctcaccaaacaaagggctatgtctcttttaagcaaatgttttgatgcatatctttttaattaaccctctgcagcaagggtagaaatacagatcagatggaatgggtattataggagaatcaagatagcaacagctactccttttaccattactagtgtgttttcaaagtatggaaaaagatgcctgaagagtcattttatatattttaaatctaaaaagtgttaacaggtatgcttataggccatgggagaaatattcttataaattttttagtgtaaaatgataaattctgtgtcacaaagacaagtttaccacttgacctaccagaatcacagatacttgcatttaactagcaagtatcatttggtggaaatttctaaaatcatagtagacaggcccaaagatagaattcttaggtgatcagtagtgtttaaaataattttgtcctcagcactaactatataactgtaatttctacataagaacaagtgcttccaaaatatagtggagggaaaaaataaaaaaggaaaataaaaaaacaaaacaaaaagaacaagtgcttgatttttcactgtgaagaactagcaggcacatgaggttgtgatcagaaagtgactgagttcccaagaaccaggaaacagaggggagttgtgaagagtttattaaaactgtacaaataattcagagctttgccaaaaccatttcataatgctgtacagttttttcaagcccactcactgttaaaacaagaaagcaccttttctttctaagattttagtaatccaaaagctagcctaattagccaagtatgcagataacatcaaaagcaaagctgagatagaacagccatacacccgttgggcagctcttatgaggtggtcagaaggtcactcagaccttggtttcaaataggctttagaatctgcacacttgaggactagaaatgcacagagttagggaaagccatgtacaggcttggctcctagtctttgagatgaggcgtcttgcaaatctctgttttcactccttggaatgtctccattgttagcattaaagtccccaagaagtttttattgctgtacggttttgaacccaatgagtctcatttccaaaagattcctaattctatataggagaggttgcaaatgtcagtgcctcagaaggaccaggcaagttctgtaaatgattgatgtggataaggcaaagaggaacacaagaatggtggagaccaggttgaactgcagaacacatgccctctttgaaggggtgcccacactcagctctagacaatcagaaccatgcagaaatcaggcccagggctgctagatcttctgacgtggaagtatgatattacctgacacgtaagtgttgacaactaactcaaactcttggccaacactgtgcagaccaaagagaagctgtacacagacaggtgcagcctgcagcccccagtttcaactattgggaaaagtggatttcacattccacagttgtcaggtcaggttcatccatcagccccacaaactcacatgtcggcactatctgggcaactaaaataaaagaggggaaagagatcatttctccccagatatcattctcatggcagacttgaatatagatacgctgagttatccagctctctcactctgcctccttttggcatgcccaggctgtgccccgtaaagtgttgaatcactgttatcctaattttcttagtgttttctaccgtggccactgtgatgaggggctggcaaagagcagcctcgtgccttccgagaaggctgccaggagcctctgaagcttgaagcgagcacacattgcctccttgtgccaaagcccttggccagcctccccacactccttccctctccatccggcctcatgagtcttcgttaccaagtaaaattaccactgcttcacctctgatacagcagaagccttgcttcagaactggtaggcatttaggctatttcagagtgtccactaacctcaaaaggaggtttttccacatacaaaaccctagcatctttgaggggaaagcaaaatgagaataaattatgtcatgaaaaaaattagaagttgcttccttcatttagatggactaagttattttaaactctatcttacatcagagtcctgatggtgttgggatagtcactgaccctttcacgtatgtaataagatacgtctcgttcacacactatttcatttgatctttgtaagaacccagtgtagaataggaatatttaaaatcaacattacccacctccaaggccaacccagagtagtcttgaacctgagtcagcctcagtattgcttgcaaggaagagggaaggggctcattaaaggcctggctcaaaccttagtcttccagactgactagggacgtaagaagacccagggacccaccatgttctcaaaccatctattcagtccaggcctttcagcatagacataaagagcccacccgttactcagtcatgttgccaagtgcaaactgatttatccccagatgaatccctttactgtagcagatccctaatccctaaatttcagccaatttggtagttaattataggagtttattagctaaatgtatgttctgagtaaaagttttgactctttggggaaaatttattttgctgctagcatacaacatttgctatgtatataaacttaagtcaatgccagaaattttaaaaccagctcaaatttataatctgtaatgatcaaatcaaaacatactgtaaactcagagttggaaacgcctggtaatatggttaagtcatgtttaaatatgaatgcaatttaaatgacattggcaatgcctgagatttctttcattgtgaatgattaaaaggcagtccaatatatgaatggatttcatcttacctttctcccgttaatttactaggtgtaacatcttgagtgtaaagtcattcacaggcagttgggttgtggagctagaaggagcctcaaaaaaaaactttttggccagactcctacatcatgaacagggtttttgatgaataatatttattattatgtttctaaagtaatacagtgttggagaatgaaacagtttagtcctttcctcttctgatggaaaagaatcatagcgccgttgccatgacaataacaggatgtagaaagacccatgaagaaagaaagaagaaagctatggttccgaaagcaggtaaccacagattttgaaaggaggcagagatggtgattaaactgtagtccttgttttttaaaatgttctttcatgttaggcaccaccacatagttaataactaccaacttctaaagagaagatccccttgatttatttatatcatgaaaatactaaaaatcaattctcaagtctaattaactattacattatcttgctaggtccttttccctaaatttttaattcagaaaattaaccagaattggccagatgcagtggttcacgcctataatcccagcactttgggagtccaaggcagatggatcacttgaggtcagtagttcaagaccagcctggccaacagaggaagaaagagtgaaaacaaaagaagaaagagggaaaccctgtctttactaaaaatacaaaaattagtcgggcgtggtggcgcacacctgtaattccagctacttgagaggctgaggcaggagaatcccttgaaactgcaggcagaggttgcagtgagccaagatttcactgctgcacctggggtgagactaccattaaggaaggaaatttcctttaaacagaaaaaaacaaaggtgctcatctatttcttctgaattctctctacatccttgacttaagaggaaaaccagcactcaagaaacagctttaaaagagaacagtccccattctagctaccagtcttgctttcccccatcttggcaagccccagtgaatttgccattgaaagattaccctcccctttgccctcatctgcctgagctagaggccaggctgttgttaatgttttttcagttccaaagcccctgatgggacattcttgtttctgtgctactgctttctctctcttaaattaaggtgcaaggggataaatattactataactgggatgtaaggctcagtcagtgtggctattccctcccttcgggggaaatattccatctgtctgaacggttttaggtgatcatgaggagagcggcttagtcacacagccagccacgctcatcacaaaagatttgttcagactcactgtaaagaatgacaaggcagatagctaatcctttcactgtgcctcaaagcccgccgtgcaagtcaccaaccctaccggtcctctccacgtgcgaggctaatagagtgatcagaaccaggaatgtgagctgggttccaccttaggaggggacaatgaggacagagcaagagggctccatgtttaattactccaggctctgacttctgcccacaattacagagcatgaaagcagaattggcctttagtaagtgaaaaggaagtggctcctgcagcatataattgttataatttcgtatttatggaaagagaaaaggacttcagtccactcatgttgttaagcacttgtccctcactccactggagcccccttcctatgttttgggcacagatggctgggaccgagaggaaagaggaagagcggctgccagagtgtgaatatacccctcagggatatacagcggagtttcatgataaactacccatactttcccaaaaaaggttgaggagcaatacataactttgcagattacaaacccttgttttactttttaaaccttttttccatactctgcttattggaaatcgatggctgtgatgtgaccaacacctgtgatgatagcaaagcccctcctttcacagtctcctgactgttcggggaacctccttggtcattggtagaaagctttagaaaagacttagctttttagggaagaactaaaaaatctccaaaacat

SEQ ID NO: 329 - DNA, 1313 bp, Homo sapiens
agagcctcagcggatcctggaaggagggcggctgcgtgccttccagcaccagcagcagcggctactggagctggagcgcccccagcgaccagtccaacccgtccacgccgtcgccgccgctctcggctgacagcttcaagcccttccgcagccccgcgcagccagacgacggcatcgacgaggcggaggccagcaacctgctcttcgacgagcccattcccaggaaaagaaagaattccatgaaggtgatgttcaaatgcctctggaaaaactgtgggaaggtgctgagcactgcagcaggtatccagaaacacatccgaaccatccatctggggcgcgttggagactctgactacagtgatggagaagaggacttttactacactgagatcaagctcaacacagactcagtggcagacgggctgagcagcctggccccggtctcaccttcccagtccctggcttcacctcctactttccccatcccagattcaagccgaacagaaactccttgtgccaaaacggagactaagttgatgacgccgttgagccgctcagctcccaccaccctctacctcgtgcacactgaccatgcttaccaggccacaccccctgtgaccattccaggatcggccaagttcacccccaatggcagcagcttcagcatttcctggcaatctcctccggtcactttcacaggcatcccagtgtcacccacacatcatccggtgggcacaggagagcagagacagcatgcgcacacggtcctgtcctccccacccagaggcacagtcagcttaaggaagcccaggggagagggcaaaaagtgtcggaaggtgtacgggatggagaaccgagacatgtggtgtaccgcctgccgctggaagaaggcctgccagaggttcctcgactgagagacccccaggcagaggggctcagggccctgagccgctcctgccctggcctgccactgcaggtgttggaaagagcttttcctactgaataaaacacagttgaagccaggaaaagccctttcaggaaccttggaggaataacagcaaaaacacagaaaaattgtttaagtcaccacctatgacaaaagaaagttgctcttactgagaacccagcttggagcagctataactagttttttttccttcaaaagaaaagtcaactttttttgctgtatgtctagacttaaaactgtggacttctgtagcaattgaaccaacaaagcccattttacctagaaaggaggcatattttgataagctttctgaattatgccattttcaagatttttttgacactta

SEQ ID NO: 330 - protein, 222 aa, Homo sapiens
MKVMFKCLWKNCGKVLSTAAGIQKHIRTIHLGRVGDSDYSDGEEDFYYTEIKLNTDSVADGLSSLAPVSPSQSLDPTFPIPDSSRTETPCAKTETKLMTPLSRSAPTTLYLVHTDHAYQATPPVTIPGSAKFTPNGSSFSISWQSPPVTFTGIPVSPTHHPVGTGEQRQHAHTVLSSPPRGTVSLRKPRGEGKKCRKVYGMENRDMWCTACRWKKACQRFLD

SEQ ID NO: 331 - DNA, 52787 bp, Mus musculus
  misc_feature (1)...(52787): n = A,T,C or G
ttgaatggcagtttttagaatccccaccattctctactgtgttacactcagtttgatgtaactaacactgctccagtctggcctcttctccaagtgcttgagttttctggggttttaaaagttgacttagtttcatgtagtgccaggaacggaccccagcctcaagcaggcaggacaagtcccaccccagccttgagctttcactctctgatcctaacctgaattcctcccactacctcctgctttctgtagaggctcctgctgtggttccctcccttaagttccagcctgaacatggaagaaacatgggtgttgcttttttttttgtcttataagagttgcaagtatgtggaaaagaaacaggagagaagtcttcctgtgtggagagacaagaatgaacagatggctgaaggcaaaattctaggaacagcgacaagtttgcacgggccaggagaggttttgctgtgtaatggacacctcttccttctccccaacgccgggttggtgaagatagatacggtcaggattgccccggcatttgccgttgtatctgagggcttggtgaagatatggtcaggattgccccggcatttgccgttgtatctgagggcttgatgttttgtttgagggcctgttcagtcttattgtttgcaaaatctgaaaagagtcaaaaggagaaagcaagccattctaagaaatcccgactagctttgtgacagcaactgtgactagaaaatcaagttgtcctgtgtttgcaaagaagctctttctcctgacattctcttttgtacatatgtacaaatacatctgtacatatggtatgtatgtgtgtgtgtgtgtatatatatatatatgtgtgtatatatatatatatataaatttttttcttggcaaagttatgaaaattaaatttgatcacactcataaaggggcctattttgaagcatgttatggtctaggccaagttctgtctgtttcctatattgaaaggagatcccacccccgacctctctggatttttttttttagacaaggtttctctgtatagccctggctgtcctggaactcactttgtagaccaggctggcctcgaactcagaaatccgcctgcctctgcctccggagtgctgggattaaaggcatgcgccaccacgcccggttgtggatttttttttgaaacagggtttccctatctatatagctcggcctaccccaaaactatgtagaccaggcttccctcaaattatgagatccacctgcctcagcctcttgacagctgggattgaaggcctgcaccacaacattcagctggaaattctcagtatttggttctgaatatattctgcaaaatgtagtgactcagagactttatacatcaaaaggttgcatttgttcaagtccttcaagagaaaatgtatgtctctgcatttaattgttctaaattttaaatgactttgctctgtaattaccatttcaccagacaattaaaaacaaaaacaaacctgaaagatttaaagtgaatctacagtgaacaaaaattcttcagatatttaagagataggatcggtgaccacccgactaaggtactgttcccaaaggcaaaggacctggtgtgcagactgacttcatgaccttctgccacatgccacagaagagccggtgctcttgctgtgtgtacttgagtgctcatagttatgaataaccaagtacaaaacccaaagtggtttttatcagtaagaagcattgaacatcccctcttctgagtctggcatggtggcacacgtacatctttaatcttagcactcaagaggcagaggcaggcagatctgagttcaaggccattctacctaatctacatagtgctctagggcaagccagggagggcgatagagtgggatgctatctgaaagtttactaaatgattaatccctacttaaggtaggcaattgcagggaggctgagtggtttgcagtcagactcatagactacctatcactcctcttccctgtgctactattatcctagaaaatccagacattcagacttggacatagacacacaacatacaacatgcctatagatagcatgctttcctcatgtgactattttttacaaagcttcccagattcatcacctcaagatttctcaggtcctagtggccatatctataccccaagttggtatttcctacccttttcatgccatgatacaactagaccatgccttccggatacagaagagttcctggatgaggtagctggcagctaaactaggaaccactcaggacttgagcatcttagtcttgctctactgttccaagggcttaaggcatcaatgctcagtcacacatttttgcccatttgaggcataccagtgcattcataaattgatatatagtattcataacctaacaataatacttcagtgacagaccacaggtctggttttgtctgtaataaaggggacactaagtggtggtggtgcaaacctttaatcccaggacttgggaggcagaggcaggcatatctctgagttcaagactagcctggtctaaagagtgagttccaggatagccagagctacacagagaaactgtctcaaaaccatcaacaagtatagagaatccagcaatatggctgctttggcaagagatcacatccaaagatcttctatatctatttgatcctgctggaatgcagatatgccctggattacagtatgatctggctggaataagacacatccttagtgcatgcttttaatccctaacagtttgttgagtacatacacttcaatacagttcagacaatccagtggagttcagctgaatgcagtagagttgagtttgtttgtggcacttgtgcagagatagttgaagtcagagaataagaaagagacagaagattgtaacaaattgccagagttagtttgaggccaagcagagtaattcagtcagaagccaagggaagccgggttaaaccagtaagcttggaaagaaatttgggtcagaacatctgagttaaacctccctgtccccagccagagttcagaaagagctagaaagagtattaagcttctaagacaacaattatatcaggtgaataaaagatacatttacaaatgtcttagggtttttactgctgtgaacagacaccatgaccaactcaactcttataaggacaacatttaattggggctggcttacaagttcagaggttcactccattatgaacaaggtgggaacatggcaggatccaggcaggcctggtgcagtaggagctgagagttctacatcttcatctgaaggctgctagcagaatactgacttccaggcatctagaatgggggtcttaaagctcacacccacagtgacacacctactccaacaaggccagacctactccagcaagggccacaccttctaataatgccacaccctgagttaagcatatacaaaccatcacaacataggaacaaaaataacaacaaaaaattataaaagggctaaaaaattcatactatctccaacattatagctgtgatgacatccttgtatcacatatgactcctgtttgaggtaatgccggtataaacgtattgtcctgtcagcaatataaaataagtatagcaatataatcatgggcagcatatagtaactgaaaacggtgataaaaattgttattactttgtatgctttaattttaattttttaatatatgcttacatataaaaaaaagtctgctatgaaacactgccaggatattctggtggtaacctccaatgtgtcctgtttcccacatatctggattgcatcaaggcatggagtgactgaacttcggcagttaggtttacaaaagtactcacacagtgatgagtgcaaacagttctcaaaaagcatctccagacatttaagagagtgatgactgagggctggagaggtggctcagtggttaagagaacgcagagccccaaggttctagccccagggctcaccatgtggctcacaactgtaaactccaaggtgagtatctgatgcccacttctggcctcaaaagcaccaagtctgtaggtgtactctgtagtgtacagacatacaaataggcaaaaatataaagtaagaagccaggtagtggtggtggtgcacacctttaatccagcattagggaagcagatgcaggcaggtctatggagctagtttctgggtgaccagagctacacagagaaaccttgccttcaaagagacggggtgggcagaggagaggtaggcatgactgtactctggtttaagacactaagatacaaaggaggagatatcatatatccatatacaaactctgagagaaaaagctgccaatagcgaggaagttgtttctagtgggtaccgccaacaatgttaatcatgtttgccaaagcacttgatcagacctctcttaacccttttggtttggaaggaagcatctgtggaggaggaaacagacgttaatgatttaaatgatttacttacgtttagtaatgtggaggcaacttagtttaatcacgtgtaatcttcatttaaatggacctaactgcatgctaacagttaatttgtaaataatggttatgtttagcaaacagctcccaacttctgtaactttgagaatgcagattagctgtgcacagcactgcctgacagcaagaccagtgtgctttagctgtgcacagcactgcctgacagcaagaccagtgtgctttagctgtgcacagcactgcctgagagtgtgctttagccctccttctttgctgtgtgtgtaactgttatgtagagtggtgatcaccacccagagacagtcctgcatcctcctagccattgctttctgtggccctgagtaattgctacctctctggagattggttttctcttctgtaagggaggagtaccatagtccttggcctgctcactcgcagagtttgacagaattacgctgacaggtctctgactatgctgataaaagacttcattgtgatggtcatttatttcatcactcctttccaaccaagctgtcattggtgaggatgaaaactgttgccacttcacttccaaggatgtggtttagtttaggatctcgcacaacgccaggaatagatgagaaacaccaaggtgaattgttttcaaggagtccccttaaaatttgctagtagtaactaattaaaaatagttctccagggctgggaaaatggctcaatctgtaaagtgcttggctatgcaagcgtgaggtgctgatttcagattctccatatacatctaaaaaagccaggtgtgccaggcttatactagccaggtgtaatcctagtataggggagatggagccaggaggcagcggatagaggcttccacacatgcatgtggctgcacacccacatatacgtacatacacatccactgccctcagttacccagctacctcccatccccctttactaagctttcttctcactctaacatttgttttcaagtcacctcctccaccatggcacctcattttatttatttactctttgtgaatgtccctcattataaggccagtttgtgggggcagggaccattcttattgatgtcactgaccacaggatccagcccagtgcctggcacacaatgactatctgtcaaacagaggcacttatctgataagagctagtgttaagccacccgctgggtcgaggggaaacctttcaccaggacttggctggtagcgctcacacttcacatgtttctcagggaccaggaggcacagaggcagcagaagatggctggctaccccgccccccacctcagtggtgatgtcacacagggcattgagtctaatcattcccactctttaacagtcctgtagacagctgtttttcattaccatgatatggtgaggggggagagggagggaggggatggggtggggtaccccatccctgaatgagatcagtttagggctatctcatatgttcaagttcaggagaaagtgggtaacagaaactgcattttggattaaactattcaaatcaagaaagagaaaaatgagggcaagaaaggaaaaggaaataaaaggagtacagaagaaagggagaagagagtcaagaagaaagcagacaagaggatacatgaagtggctatgggagaaacaaaagcccaaaccaggtagtgaagcagacagaggaaaggacagatggatctctggcctacttggctttgtgcttgggtagtgctcagcttgctgtggaaggatggttggctggctgggggagggggcttctcaggcatcctggaggatcatttacatgcggggtgggggtgggggagcactctgagaggcctgggttaggccacctcaggactgagcctctggatgcatccatcatagttattcaataagaatgtaaccccccaaattttttcttttaaaatcaggattgtagaggaaagggagagagtactgagtttaaattaaatacctcatctttaataacggagagagtattgagtatactaggctttaatttcatatattaatagttttaggggtttgtttgtttttattttttgagacagggtttctctgtatagcccaggctatcctgaagctcactctgtagaccaggctggcgtctcacagagatctgctggcctctgtctcctgagtgctgggattacaggtgtgtgccagcactggcctaccctaatagttcatgtttcgtattaagtgtattgggctttagcttccctgtgtctttgcctcaagtctctcaagtcctaggcaacgggaacacagtaagttcagaactttgacactttaccttttgacttcctttctctgtgtgtgtgtgtgtgtgtgtgtgtgtgtatacatatatatgcagaatatgatggttttagatatgtaaaatgatcaaactgatatttaaccaagacttcaacaggggttagaggattaattaaagtcttacagttaaaacctgaaaaacagttatccctcttatttccaaagtccctttcctcatggtggtcgcatctacaatcccagcactcagaaggctgaggaaagtgtgagtttcaggacagccagggctatgtgtttctgaggtaatatgtgcatattgtgtctaagtgttagaaattcagagacttaatcttggtgacttgagactggtcataaaggaagaactaacacctgggaagtagcaaacacaacagataaaggcttggctgtgccttcttgtctgaatgtaagaatgggattgagaaaggcttcctgtaggaactaagaacttcctgtaggaactgggcgtgccacatctttgacttttacttggctgtttatttttgagaccctgtttcaacaccaccaccaaaaatttgataatagaagggaatatcaaaatcaaataactttcattagacaatattaatgtctaattccgagttcctaaatgttaaatttatggcccacaagtttcctcattcacactacaaatggtgtccagagacacaactgactggctgtctgtgatatactgactggtcagactcctggaaaaagaaatctcatcattatattttatatattacatactatatcaaattgtattttttcttacctcttctgttactcaagttttcttacaaagataggacagagagactacaggaatgtaaacctaaaaacccagacaaaaacctcccaatttcctatcatgtgtactgccacagatgactcagctcttcaacgagaaaatgtattgtttaagagcactgtagacaggtgtggtggtagggatgtggaagcaggaggaccagttaaagtaatcctcagtttcacaagagtcagcctgggaaagccaagactctgtacacacacagacagacacacagacacacagagcactaaatggtggctgtcacaacatgacttttgtatgcccatcgtgcagtaacttgttttaagtattaatagtagtactaagaattgagtcaggtatggtggcacatgcttgtactatcagcaatccagaggcagtctgggaggatccttgtatgtttgaggccagcaagcactacatagagaccttgtctcaaaaacaaaacaagcacataacaaaaaccctaaccagggctgaggacagagcttaatggttgaggacttgacatggttttaatcctcagcatccccacttaacaaaacctaaacaacatattgtatataataataaaacagcatttcattaaaagatttcgcacctaatttcatttatttctgcacttgtatagaaaagaattaagaactgtatagtgaattttatttttactttatatacctggaggtgctacaaattcatcgtattcccaaaatactgagtgatttggagggtcagtgaagatagtgtctgctgggaattggcagtctcacatgtggtcctgccattgatgtcaggtgtaaaagtgaagaaaagggaatcatcttccataagtcgtggtgaaaatatcagaaatggttaccacaacatccaaaatagagaaatagtttgcgggatgacagccggcaaaagcaggttgtatttgatctaagagtcaagacaatggagtggtttataagagacacgaagtagcggggtggcaaactgcagtaagcaccagagaaaaggggaaggccttactgaaattaatcttgttactggtctgaactcaatttggctaatagttttagtatttttttttttaaagcattagcctatttcagcggaatatatgctttttctttgtattatatcagaatctctcttaaacttctattcctgcgaatttggttgtaagggttaagctggtgactgaaaagctgggaaggcacacccaaccaatgggaactcatactggtgatgtactgctttccagctctgattcattggctgcctagggtttgtcattctatcccggcgtcggcaagcagcgtgggtcgggttttctgtggtcgagctagctaaactggattttggccgcctgcacgtgcagttaccttttgctcatctctagctctccgtgaaagcagctgtcacgtttctgattatcctctagattttgaaaaaccctcggttccattagccccactggaggtctttggaggtgcccgttgagcccgaatcacgtgaccccgtaacgtgcacataaatacaattcggaatccctgcagggactcggggacaacccgcgagaagctctagctaggcacgtgtcccaaggcgtgaacggtttgcacacgcacgtctgcggtatggccgcggcactcgtgtgcgcctcgtggggtcgaaggggcaggctgagtcccctgtgccgggcgctaaccgagactgcacctggagaccggcgtccgtaggcaggtgtaagagtcgggtgcggacgacgacgacagccgggtttggagaggccctctgcgccctagcgcgaaggccgcgcgcctggctcgcacccaggacgtcccgctccctagggatcggccccggcagcgacctaggagcagcgcagggcannnnnnnnnnnnnnnnnnnnaagccgcagttccggccctcccacatccgggtctctccagcccatgggccgcgccgcagctgcagggccgggggtgggggaaacggcggcgcggggcggggcggggccgggcgaggggcagcggtgtcgagagcgcgcgtgcgcggggccgcgctagaggcggcggcggtggcggcgctaggggcgggagcgcgcgcaggagctagaacgccgtggtctccgcgccggccgggtccgcagctcgggatcgggtggctggggcggggggaggggggcccaggcaggtggggcggaaagcgatgagtcctcggcgcctcctccgcctcccgcgggccccgctctctgcctcccgctccgacgcccggatgatctgagccgcgagggctccgagagccgggggcccggacccagcccggctcctcccctcctccgcccgggcccggccgccgtcgcgggaccccgtgcccggccgccgtcgccaccgccgccccggccgaccgagggacccgcccgcccgcggctgttccgggtaagcgcggcgcgagggcgagtaagagggcgagggcgggcgggcggagggcctgtgcggcggcggccaggcctggggcctgtaaacaagccgggcgtctgcccgggcgatcccgggaggagacgcgacaactccaccccctgggcggcctcctccccgagcccgcgccgggtggcgaggggttaacacgcggcgggggcggaggcggggtgtgtgcggcggctgggagggggcgcgaccctcggccgggcggggcggacactggcggccgcggaactttcggggagcctgcagcggggtctccccttgaagcagatcagcccgtgagttcactggatttggagactcacccgctgggttgaaagtgaggcccccaactcagtagtgatgcctccatttcattcattattccggcttggagcaaacccattgaagtaaactacaggttttgcatcattttggcctgatatattggaggaaagttctttatgttagagtttagtttaggcttggctcccttctgcttgtaggttgtaaacacactcggatccccttcttgaaagacagctggctgtggagagccttctgccaactggagttttagatcttttgcaaatttcatcatccaaagtgtttttctcttttctcaaacactacacgatacttagaaatccacaaaggtcagagtctaagcaatctacgatgccgcccccaccccaagtttcctgatagttggaataatgctcctggtatatttttaaccgcgcggttagagtataaggagattggcattgtttgagaagaataaatgattttgacgttacgaaaatgagtagttttccacggttcagagaaaaaaacaaaaacaatctttttaaaccctggctttcagatttcaaacatgactactactggatggaggagaagcctgctgaagaatcatagaacttaaatgattgttttctgggccttaggattttagggtttctgagggctcactacatagtgcttggttctcacctccctttaaccttttctgtattctgggcctttgccaaagattatttctgtagttacagatgaggaaactaaggaccagaaagatagtgagcacacacccacatacttatcttcaataccgcctttattgccttaatgtctgcttgactgtttaataatttgaagcacaaagcagatcatcttcccagtgctacagttctgggctgcatttttgtgtgtgtgtgtgtttgtttgttttgcattgctggggatagatttagctcggggcctcttgaatggtgcaagaccaagttctcctcacttgtcttgtatatacctgattgaacagtcagctatgttgggatgactgcttttaacctagaagcttacagcagtaataccttgaaattataatgaactatatgtgcaagtttcttcaaacatttgtattaatactaaacacttttacatctggggagtaattatgttggtggtatcaaatattaagatggataatgttttatattagttgtaatacatgtttgaaaaatagtaaaattggccactggaagcatcaagttgcttcttgcagggtttgtgtccctatttttcacatggaatgaatgactacatttcagtatgaagggctgtagtgaccagccataattatagtataacctgttgtaaggaatggtgctctgccagaaatgtgctcgaaaatatctgtgcccagggacaaggcatttgaccctttgagctttggaatcagtaatgccaaggggtagattacatcatcacatgtatatttattattattcttttgccattctgtgactgttgaacatacctttaacaactacatacctgatagacctgctacttagatgttttaccattttgaagttgtttttctttctgggctctgttctattgagtttgtggcccggctttagggaaccttcctgtagtggccttcactgatctttctttctcttgccattgggaagcctagaagatgtcctgggacatctttggggacagcatgcacctgagacagcatgtttgaagaagctggggtcctcagtggttggatatgatgagcattataagaatacattgtgagcttctttgtgtctatgtgtccgtgtgtctgtgtattttggttcaagccaagtgttgttgatcttgtcttaacttaaacttttgtttggaaattcacctaatatctagttgtcatcttcccccacccccctaccaaaatgtatagcatcctcttttgttgccttgtaaatattgctaagtgcttactaaatgtctgcatctttctaattttttcaaacctcaccttggctgtttactttatggccagtagaatgtattgctgttcttagtctatactgatacaaaaataattctgatatatatttgatgttcctttcaaacaatcatctattgtctgagtagtacccgtgagtgcttttcatctttaatcaaattaaaagacagtttaaaaaaaaaaaaaccgggctcaaggggagttgacacagttaaactaagccttggccctgtgacatatgcaggatggccctcaggagagcagaagcacaaatgtgcggctgttagatttcctgtattgttgtcatgcttgccctgtcttcaggtaacacaaatacttatcaattcagtggcctcatgggttactttgttgtttttagcaagaatgtatgtattttttggcatgttataaaccattctcatttaagaagcttggattaatgtataaagaaaggctgactatattctttattttttctttcttcatgctttctaatgtttcatgttctgcatattatatgacatctaaaattattcatttatctatttatttattttgagttttttcgagacagggtttctctgtgtagcctggaactcactttgtagaccaggctggcctcaaactcagaaaaccacctgcctctgcctcctgagtgctgggattaaaggtgtgcgccaccatgcccagctctatttattttttgggacagggtcttactacatagccttggctggcttaggattcgctatgtagacaggctggccttaagctcacagagatccatcttgtcttgatgcttgtctcccagtactgggatcgaaggcacatgccaccacactcagctataagtaacacctttttgcttcattatgtgtttacagaatgaatgaatgaatgaatgaatgaatgaataaaaaaatatatataatgattgtaatctttatattgcctgtctgaatactaccaaggcaagaagagccagagaaagtattgagtgtgataagctctatctacctttacataaacattttttttatgtatacaagcatactgtagctgtcctcagacacaccagaagagggcatcagatcccattacagatggctgtggttgctgggaattgaactcttgacccacaagagcgagcagttaactgctgaactctctctccagctcatgacttgacaaatgttacaagaaactaagaagtgcaaatttatatatgttgaaaaacctggctacgaacatttgttgttttttttttttcttttttctttttctttttttttttcagtaaagaactgagatttgatttccagcatattatggctcataaccatcagttctagttccaggaaatctgatgccttctgatctccgcaagctgtggtaatataggcacacatgtaggcaaatacatacatacatataaaacacaagctgtggtatgtagacacacatgtaggcaaatacatagatacatacatacatacatacatacatacaaaataaaaaggtaaattggactgtagatactgtgttcttaatatcaatattttttttaaggtttcactttgttttttattttaagatttatttattatacactgtataatttattgtatactgtagctgtcttcagacactccagaggagagcgccagatcttgttacggatggttgtgagccgccatgtggttgctgggatttgaactcaggaccttcagaagagcagaagcgctcttaacccctaagccaactctccagcccaatatcaatattttaagcactgagtgagtgataaggaaggaactccagttttcataatcattaatttttttatttgcaacccattgatttaagtgtatttgttattaatatttaggatctgaattaaaattcattagtttttgtggcaggtaataatttgaaaatcatgacacattattttatttatcttcaggataaaaaagggaagtaataaattattacgtacaccgcaatggtggtgcattcctttacaggcagatctctgttagttcaaggccatcctcatctacagagttccaggacagacaaggctacacagagaaaccttgtctcgaaaaagacaaaaggcccctatcctttattgactctgtatttgtgtaaagctttcattttttcacaacagccttctgaaataggtgatgatcctttctctgacaattagttttccacctctcgcttcaatcaacctagagttaaactttttaaaaattgcctatgtttctaaacatttatagactttcttgtatttattctctaaaccatatagtttaatttacacagtatttctattatatttgatattaaagtgatctaaaggtgatttgaagtgtgcagtgggtgagataggttacgtacagcagctacactattttaaatgagagacatgtggaatcatacacaaatcccttgttagcagccattggatagctatatatgggcttagtgaacctaaatgacattgcagaatcatgtcaatagatttaaaaatagtctttaaaaggtcctgagtggattgtttcaattaaaagagccttgttcctggaaccagaattttaaaagctcactgttagggtttctgaaatgtagcgttctgccgtcgaaatgcatgcctgtaagtgtacacagttgtcttcatctgcaagaatctgtagaggttctgcctcccagccccatgctcctaaaaataagacccagactcaaaatatatttacaggtatcttggccatatagctaggttctactcaggctagatcataactaaaatacccatttatttaatctaccttctgttatgtggctgcttacctgtgctcaggtaccatgccttccatctcttcacagcttctcaggtcaatctcaagcacctggatctatcccagaattctttctgtctcccagatgtcccacctgcctgcctaagctataaggtcataggtttttttaactgacaggtgatgcatccatacagtatacaaggttttccttgtgtattgaagggatatacaagaatcccttcagaaaggattatgatgatgcttttccccccatttctagggctttagaagttaaatcaaaaaaatttgccttggctcaccacctttgagattgaggtgtagagcttatattcataaatggttgagggccttagtgtagaacctgaggacctgagtagatgagaccaatgcagcctcagaggaggatccataaagaagtataacacaactatccctcaaaagctagagctcagcccccgctttcctacatacaggaggtagtcttggctaatttacttgatttctcagttttccttacctgtcacatggaaatgtctcttatgtgagtgtcttaaagatttggtagaaaaattatatcaagacatgtattgggcatggtggcccacacagcatgtgatgtgatctcttgagtttcatgccaacctggtctatatagggagctcaaggcctgccaaggctacatacttagcaagaccttgtctcaaaaagaggggtgggccacttgacattttccatcaaaaggaaagtaccaaataaatggtagctattgttactaagtttatgggatcttaagatacttgggggtttggggtatgctggagagatggctcagagattaaaagcactgacagctcttccaaaggtcctgagttcaattcccagcaatcacatagtgggtcacaaccatctgtaatgggaaccaatgcccttttctggtgtgtctgaagacagctacagtgtattcatatacataagataaaattaaaaaaaaactacttgggggaaatactgaccaatagtgagtaaaaaattgagaacaggtaaagacttggtatataaagtttgcatatgcacagaatgaaagtcaatcaagacaaagattaagtatgagcatttacttggctttctggagttggaagggtcacgcctcggtttggagttggtgattaagcaatagtaggtggtaaacttggtgataaagaagagcagtaatagagcaaaggtgagacgggccagtaagtagggaagagttgacctggtatttcgtagagctaaatttcatggttagaaaagaagaataaagaaaccacattattctactgtttttacaaacttgcctttgtaatggatattacgtttcgtgcttgttctgggttgttgaaggcttactacctctatctacagagagcagttccagtgctctacatggaactctcccatcctgcaccctggaattggccatagttccctccctttaaatcaaagctcattttcagtggcatacctgcatttttatgatttgaaatcatgtattttacttctaggcatgtatgctaattatgcttaattctgaaagaggaagtacaacaactacttcctgaggcctaccacagtgcttatggatagtggacacgaaggtatttggtaaggataagcacactgtacctggcagtgggcattaactgctgtgggatagcggacatttgtgtaagtgtgaggttatacacatctgaaatggagcaagagtgttcccttggtgtggagcttaggttggctggttgtgggctccactctaacttcttatcttttggctttgagggttaataggatatttataatcacatttcttttcagagtagctgacattgcaaatattattatttcatagttattcttgtaatcataggggaattatgtagtcacaggaatttgacagtgcattaattaaagaagagctaccaacaaatttaatctgaaccagattgctaatatctacctagtctgttcatatacacctctaaggtagactttatagctgatcccaaaatacttaagctatttctagtatttagaaaataagttaatattctgttactagattttaagtggataatttcttgtaactagttacttaaattcttggactataatgctagtgaggtcagagccatgaattggatcttcatgtgcctctttctttcctgaccttgacgaggactgtaacaacaagcattttatataacaggtactagtacctgaagatatttaaattgtcttcaaaactttgcaacattcctatcagttagatagcattattagttatatcctaacaaatgagaaaattgagacagatttacagctggtaaatccaaatgcatgttctgggacttttgaaagtaattctaaatgcaaatcaatgcctttctttttctttttctttttctttttttttttttttcaaactctctattgattcatcatatcatacacgccagggagttcatctccctgtctcctcatgtctgcctttcatctttgcaaccttcacccaaaattaaaacacacacacaaagcatagagaatatgtcattgtggagcttgtagtatgtcacagtgtgtcccccaatgtgcaacatgttcgtcacagtgagtgtttggtctgacttagatctctggcttctgtaacaccatccatggtgtatcctcacctagactcctccagatcattctttgctgccctatgtcatgaggtcctgcagctttaggaagcagaactggcccttacacgcatcccaaccattcacagatgataagatgttgggatgggtcgactcagagccctggatctgggcctaggtggcagctgagctgattggcacacctgctgtcccttatccacaccaaacagggtgagctctccagtactactctagctaggccacctaatactatagtcagcaggaggcagagctagctccactgtgctgcctagtcaaggcatgaggtgcactcttccaaggcccactcttccaagtgttgcagcctgtgaggtgggacagctctcccatgctcataccctgggctcatctacatcttcataagtgtccgctctactgtgttgcccaagcgaggtgcagggtcagctctctcaaatcattgtgaggagcatttggggggagggcatcaccgccacacccatgcagataagtggtgaagtcagctctcctgtgcccttggggtttctccaccagggctagctctactgattgtacttctgttgctgttgctgacagtctagtggtggtagtgacattttagtctttgtatacaaagggcatgacttcagttctattgtatccagagtgtgactcttgtagtgagttggaatctaatggcagtgtataaagcatgtgaaaaacatatctacttacgtttcctttagaacttttcaccaggcagagttatatatatatatatatatatatatatatatatatatatatatatatatatatatannnnnnnnnnnnnnnnnnnnacacaaaatcatagtccagggaataatcactttccaatctcctgtccatagcatctaccctaagtagccattttccaaaagaggcagacttgccaataaaaagatagaaaggacattcattgggccatgtcttacaagggtggattcttatctcttaactgtcacaatttctttctgttccctcacacacacacacacacacacacacaattctggggctatggtacaaaagaaagtccttggaaactggggccttgcttcacttactggaaatagtttctcagtgtgtgcctatttaattgtttcattctcttttggtttctgatcacatgacaataaattaaatgtgagccagaaatatgtcagactatgagaaagtataggtcatgtgcacttcagtttaaatttagactggtactttgcatttatctgtcatctccagcagagatgggggaaatcatttttacccttgctatgtatattttaattattttagtgaatgtatgaagtatatgttctgtttcaaagactaacataattgattaccagctttgaattcttggtgctgctttctgtagtatgactggtagaaactttcatcagagttgttattacatctataggatatggtttgccttccattgttaacagaattcagaagcgaaaaataaggaaaccataactatgtattttgtcttgttcttgttttctgtgcaaaaatgtcagaacttgccaggctttagaaaagcatctttgcagcccccagaattggggagtggagaggggggagggtagaggagtgccctgccctggcttggaatatattagagccttcccactgaggtacagaaggcatggatgtcttccaagtgctagcagcctttccatggtcagtccacagcttagcctatgtgagacagctctgtgatgtgtctgcaaacatgattcctgtgctgtgggtcattcagcatgtatccagttaaaggactgctggccctgcactggctgtgggcaataggaaagtagctcttgtactacagcttccatactgtgtcagaaggggctcccgctcccatagttagtccttgtcatgtctgaattgccttattcttggcttttcataaaaaaattttttttcagagttgtattatgtaggcagtgttctgcctgcatatatgcctgcataccagaagagggcaccaaatctcattgcagatggttgtgagccgccatgtggttgctgggaatggaactctggacctctggaagagcagtcagtgctcaacctgtgagccatctctgcagcccatgagaagaatttttaatgaccacatctatagctctctagtttgatgttttcctggggtggggatctattaggctgcccaggctgctctaaacaactcctcagaaggtgccgccgccctactcatcttccccacttcatatgcatactgccatgcccagctcaatgttttcctatttatttgtgttgcattgaaactgagtgaactatgcattctacaggataaacaggatggaaacggtaagacatggtttgctggcaggtcagcttccaggagagtgtcttcctttgtagagcagattcactgctgacaatgggaaagtcaagatggcagctgccactcatttcctccacatgtaccctattcagtgttatcctgtgctaaatactggccccagagtcgtcttcatgaatcttaaatatagagactgctctgacagtaagtgcctctctgagcgtggtggctgatgtcagacccgtctcctgagacagggaaagtggtgtggggacttggtgttcctttgggccatgtcattgaagtgaagctattcaaatatatgaggcagttggatgtaatttttttcatcttaagtttttattcctttccctgcatccctgtgctacattggaattctctgtgtcagtgtatagatttcgtttgtgctgtttgttttggaagacacatctctcaagtcttgttagagcagctgcttttggctgtctttcctagaggacacaattatatgtaaaatatttagaatccccatgtattcgttgtgttgatgaagaatgtctcaccttaagtgttaaataagttacatttctcccttcttttgacttaagtacacaaggtttttagcaaatgtttaaggtgttcagttgaggggcttgtttttcagcaaaagaagaaagaaagcccgcaaagtcagctattggattccattctgaagcaaggattaaaaattagaaaaccgggctggtgaggtggctcactggttaagagtgccaactgctcttccaaaggtcccgagttcaaatcccagcaaccacatggtggctcacaatcatccataacgaaatctgatgctctcttctggagtgtctgaagacagctacagcgtacttacatataataaataaataaacaaacaaacaaacaatttaaaaacctcgggattagctattttttaaaaatttgtagttattattcaaaagtgattaatttgaatctgcatatgaggatacttgagattaatcaacattcttagagaagttaacagaggaagtagctctatgccatttaagtcgggactataatccttagagaaaatgtgttagtctctaatttttagagtcactagatagagcccttcaactaaatttagctcagatattttttcaagcagttatttggttcttgtaaaatttcctttaaaaaattgtgtgagacacttgtaacagttgtgtcagttaccttatacactcgcaatgcaaatcccagcaggcctagaggatgaagatagcttttaacgcattaggaaacacaggcatcaactctattatgcacgctgacactgaggccaacatctggacaaactgattggctggaatacctgtaaatttttaccggcctggcaagaactaattctctcaataatttaggggttagaaaaataacctttagcatagtagacctttgtcgtattttgattggtttaatgagttgattctagttgcattttaaaactttttagagcttctatctggggacatatttgatgcaggggttcatttgcattagaattctttgaagctttgttgttgaaggaaggtgtaaataaagatttaattgaaaagtaaacatttagtgaggctatacagtgaacgattgggcaactgaggaattttccagtaatttgcttctcctttagaaaaacaactacagatcttttccatattagtatgtctagtcttatggccattttttttaaagccagtttatgtaaaataaaatgcagaaaaactgatagtctttgttttttgtttttttgagacaggttgctggctttgagcgtctgtacaacaaatcattctagagacctctgctgtcgcctcaagcccgggaacacagaagcatagggagttaatatacctgcacccaacattcctttgagcctgtcggtagctgcagattgtttgttagtcattaatttagcttgtatatccttaagaatgattcatcccagtctatctgtatgaaatacttaaaaacaaaaaaacccgaaactcatttgcctgtagttagatggctcaggtaagatgcttgggcttgggtcaccccaagaactcaggcaagggattgacaccctcttatgctgacctccaagagcactgaacacacaagtggtgcnnnnnnnnnnnnnnnnnnnnaaaaaaaaaaaccaaaaaccaaaaccaaaaaaaaaaaaagaaatccaccttcctctgcctcctgagtgcccagcgatttttttttttttaaaccattgaaaacatcattaatgctcaaaagagaacaagttttaggtaagattatccaactaacaactgcttctttcctgtctgactagggggaaaacatacgctaattcaaagtgtccaaattaaattgagaatggaacttgtctctagcataactgaatgtgtgcattagcctctagggcttcttgatggtcactcactgcgggattcctcgccttttaaaaatgctaccattttggtcttggtggggcttttgtcttgttttccccctcctacttctgctacccaggctttgctaagtttcaccgaagtgtttgtctctgtggctgtcaggcttggattcaggggctcctttctgcccaagctgagaaaggcggacttgaaagcaagacgtggaggaggagcattgcttgaggtgtggctgagtagagtggtgagcacaggattgcagtggctttcagattgcagtgacactgggttttggacaatagaacgcaagcgaggttgttgaagagaaaagcaaagctaggccatctggggcacacctataatcccagcactcaggaggcagagaggcaaaggccagcctggtctataccacaggttccagactagtcagggctacatagtgagaccctgagagaaatggggggggggggggggggtcagaggaacacttgagacaaagatgtagtgtgaaaaggggtaaaaaaagaagggtgaatttaaaaaataactctgctgtatgaaactcaatcatacttcagtgataaaccaaataagtttctgatacttagttcccttaaaatttctttttctaaaatcttgtgtagaaattttgaaaatgaacagtagtcttatccaagatactcaggttggaaccatggaagagtagtaaagacatatagtaaacttgaaataggttcttggaaaagtctcccagagggctcaatagcagcatccttctgggtttccatattagaggaagcctagtctggatgctgctgtccatactgtgttgggaatctgctcattgtgagaaataaggtctgtatattttatgtgtatgagtgtttagtctgcttgtatgtctgtatgtgggggtgtcagatcttggagttcaacagacagttgtgaactgccatgtgggtgctctgcaagagcactcagttctcttgactactaagccatctcctaacaaggggtcttaaatgccaagacttctcttattttcttagagcaaatggggtttgtttttgaggttcattattttaacatttcaagttgcctgattaattgagcttgtaatagaaacagatttataatgtgtatactatttgttgatacttggtaaccctctccaggctgtcctggaactcactttgtagaccagctggcctcgaactcagaaatccacctgcctctgcctctggagtgctgggattaaaggtgtgcaccaccacgcccggcttggaagtggctttttatacttagaaaaagttcataaacctgtaaggggagtgtttagtggtgtgtacttctgagacaggagggtcacacattgaggacagcaagaccctatctcaaaaacaaaataacagaacagcaacaccaacaaaaaaaatcctgaaagataggcaattttaagtacctgcaatatatgagacaaaaacacttcaaaggccctttgaagacaaaaactactgagttatcattttcagactgagtctaccatatccagggctctggagctggctggggcctaagcagcttaacggcctaatcctccaacatgcaccccaaggaagaacacaaatttcaaagaaaaggaaatggataaaggatgacaggctggtgagatggctcagcaggtaagagaactgagtgttcttcagaagttcagatcccagcaacaacatggtggctcacaaccacactgtactcatacataaataaatcttaaaaaaaaagaatacgaacaggcaattaaatgaataaataagacaaatagataataaacacatggagcaatgaccaacctcactagttattacacaaacatatttttcacatattgccttctttgtttgtacaggtgttttgtctgaatgtatgcatgtgcaccacttgtgtgttcagtgctcttggaggtcagcataagagggtgtcaatcccttgcctgagttcttggggtgacccaagcccaagcatcttacctgagccatctaactacaggcaaatgagtttcgggtttttttgtttttaagtatttcatacagatagactgggatgaatcattcttaaggatatacaagctaaattaatgactaacaaacaatctgcagctaccgacaggctcaaaggaatgttgggtgcaggtatattaactccctatgcttctgtgttcccgggcttgaggcgacagcagaggtctctagaatgatttgttgtacagacgctcaaagccagcaaagcgtgctgcctcatccacagtgagccaaatctcattcagcaaatgttctaatagctctcaatactttatatcaaagagaaatctgtgccaccatatcccctggaactggagttacagaagactgtgagtcgccacgtggatgctgggcacacctgtgttagtaacagactttcctgcatggtctattagttggcagtttacaaagccaatgttttaggatgtgacactaatttccttctcagatttatattctcagatttctcttgacttaattattattttaaaacaaaaaaagaaagccgggcggtggcgcgcacctttaatcccagcactcgggaggcagaggcagatggatttctgagtttgaggacagcctggtctacaaagatctgaaagagccaaggaagatgcgtgggaccccgaagagtctctgaaactcagttaagcctggactcttgctctcacaagagggtttatcataggcaagaaacagcctatttgaaaagaaatacgtgaggcagaatgagttctggaaggagtttaataccgtttgccgatcaccactcccatgtcatctccattgtaactcttagttttatatttttttcatttctagaaaactgtctcagtatgcctttttaaaaatgtcagcattgttcagtgtcttcctgtcttgatgggtaggttctgatttatagttattacaatctacttttttaaacttttaaaaaaagatttatttacttattacatgtaagtacactgtagctgtcttcagacacaccagaagagggcatcagatctcattacgggtggttgtgatgtggttgctgggatttgaacttcggaccttcggaagagcagttgggtgctcttacccactgagccatctcaccagcccttgacttttttttttttttttttaaacttggttttttgagacagggtttctctgtcctggaactcactctgtctgcctctgcctcccaagtgctgggattaaaggcgtgagccaccacagcctggcttttttgactcttgatgaaagacacaaccttttatgtataaggtgctacacatttgtgtggtgtatatacatgtgtcctttaataataattttagttttttcccctcttggcagtagaggtatttaagaaatgatgcagacttgtaggcagtgaacaatgttaactctgaaggaagctggtttttgttgttgtatgtgttctctcagaaccttgagcacttcctgttgtctttaacaggcctgcaacccttcatttccacgtgtatgtggtagccacgtgcatgtgatggcgtgtagaattggagtgtccatctagaaatctggatccccatctcagccttacctctattttcctgtgccgccttgtttttgaaatagtctttgacagcttacttctgtatttatatcagaattatatttgtaaatatagatgtatttcagttttatattctccttgtaaggtctttactcccaatttgctttagtttttttttaatttgtttacgtactcccccccccccttcatttctatggatgaccttgagggagctgccttaattaatcatggcttgggaaattaaaaagttctttgtgtggtttaaattatgctttttagagatgtgactgtaagcagtgtgtgttgcttcactgaactgcagctgttcatgtgttaatactattcagcatatactccagaaaccagctgacccttcgaggacaaaattcatctagacataagcacggatgagctatgtaaaatttaaaaatctgatggcactagtacatttttattttgcatccccctgcatacagctcagatttgcggtgttgtgcattgcttcctatgcctttagtaggtgttcccccatcacccccactctttccctgagaaacttcttgcctcttaactatgtgcacttcttctctctgtgaagtttctttctacctttaggttgctctcataggcagatctgtttcagatatccccgtttttctaaccatatctatttgaatgctcatcagaggcctctgctttttcctgaagtgctaggaaccaagcccaggacctggcttcctgtggcagtgccagttaagcagtgaatctcatgcttaaatgtccttgaatctcaccaaaccccaccataaactaaactaaatagtgctgcacagagcaagcagggcttgacataaaagcattatgtggtgtcatttgctaagagcatcgttttcctcacagtgtttgtgtaagtctatttggcatagagacttggggagttgtattagactgtgtctacaggcaaacaaatgtagtttgattcaattttttttaaagactgcccaaaatggataatactttgttatttagggactaatatgaggtcttatacgttcagtatagtgtagtatagtataaatagtatccacttctttattctaccttttgatgagtagtcaagttatttccgtgtttgctattacacttcttataaggccaacagtaaaggataagaagcttgttacaattcctagtcagtttggttcttagtggattaagcctcatgactagtagataattacagtagcttcacctagtgacagggacaaactgaggaattaggaatatagttttgctatagactgtgtgatatacatacactaggtcctggacttggtttttagcactgcaagaaaaagcagacagtggaaagttctcaatttagaggttggtttcattttaaaggactcaaaatgttcactgtagccctttgttttaaaatttagatcagctgctaatacttgtgataagtctcagcatgtacccaagtagatgttagacccagaagcttacctccccaccccacccccacacccctgttcatttaatgattggactaagtaaaatagtgtttagccatcaatgtatgcagtagtcttatgaagactttctgacatgacagttccatggtcagctgcccgagttttatataccatagagttgcctactcccctaggtttctgtaaatcatgcagactctaagtaagatttctgaattgcctactttcattttgaggaattcatttaattggcagcttctaggtatatctggtaaataagtggggcacttgttttgaaaggatagagcaaggcaacatcaacatctatacgtgatctcttagtaggaatgtagtagcaattaaagagtgacattttgcccagtgcctccattttgccagggtctctgactgacttgcaatatcctccagaaggtcagtattgatatatccattgtacaggtggagaaactgagggatgctagtctgaagagtcatccaactcatcgtaatcatgattcacacatccagctagctaggcagactagctacgggaattaacatccaggtgaggcaagttgctcttggccttgagtaggtattaacttagtggctcagattgttagtaaggtaggggtataatatgccaacattggcataaagatgtgaagatgttaatacattcattaaactggtaaatagtgcttagttggtaccactcccccacatgcacccaataaacatgagatgtttcttggggtgggggggaggggggtcttgctttttaaggacagggttatctgcgtaacactcaccgtcctggaaccaactgtagactaggctggcctcgaactcctagagattctcctgtctctgcctcctgagtgctgggatcaaaggcatataccaccacttggcaccattttacttctaagcttgtaataactcactaatatcttatttagttgctgagaggtgagggtgtaggctgtaggttactttttaagagaatcccacttgcttttaaaaacatgtcttgggttggttttctttggacttgttggtaactgtaagagttgaatatacttcagaggaagcagttgttcctcaaatccccattgtcccttcagtagagccagacttgctccctaaacccatactgtctcctcttcccagagagaaactaatacccactgtaatgtgctattgcgtttctgctgttaggctctgagtgctggagtgcacaatgactaagccccgcactcctgggtttgcagccctgtccttgctgataaccataacgctgtacatagaactgctttgctgcactactcaagatactgccttgtgatagactcatgcctgttgttgagtgctagcccttgactatgtgttctgccttttcagaagcaggttacttccgaggtctgctattatagcttagaagcggtcactgtacacaccatctttgtcagatgtcatcttttctttaagatgatgtattctcagttcttcagctgactatagtaagaatcctggtgtatgcaatcgagcttgttaatgtatgtatgcatctggaacatttgcttggagtaatggtattcgcttacctttgttgctttactccagcttgtaagatgcaggacagacaaccacaaaggtgactctataacctgggcattgcctgccgttattagcacattgctctggactaggtcactaggatcactgagctggcatatatacattttctagcttttgctgttagtaaaatcacaatagtttctcttttcctcacattcttttcaacatttgatattgtcagctaggtagaaatgacttctctttaattgccccccctttactattaatgtattaaagtatggtttaaagtgtattacacagggataagtgtgtagtttatgagtacttaacctagcacgaggctctgagttcattcagtttctaccacccccaatatatatatatatatatatatatgtgtgtatatatatatatatatatataaaataatgttcaggctttttgctaagtggcagacaaatctgttctccaggagaaacatcattctagctgattccttctactggtggaaaaacaatactataagcactgtatagtagtgtatgcagtgtaatacaacggctatactatattaagtgtttatagtgtgttagaaatgatgctaactgccctggacatttagtacttgtaagaatcccataagatcagtacctaaagctaagcatgatggtgcacacctctaatcccagcactccaggagctgaggcaggtggatctcaggaatttcagactagccagagctacacagtgagaccctgtcttttaaggaggtggggggagaaaaaagaaaagaaagattaacaccttattgcacagatgaagaaaacaattcagaaaagttaatggtctcacacttactgtggtcacacttttactaagaagtaagccagagttttacatagcagtctaatgtcagagcttgtgttttttaaggcttgatgttgttgggaaaaatcttagggcaggagtaagtggttgctagtttttcttgttggtttgtctattaaatgaacttcaatttgagctctccccacccccagtgatagacttctttcttattattcctagttgtaggtttgagccgatttttctttttggctcttatccactagcttcttttcctgtaatattttttgcaggggatgaggggctcacctgcctctactgggattataggcatgaggtgcagacctggcttttaactaatccattatacctcatgtactccatctaattcctcctcccacccctgatttgcaactttgatatgccttataaatcacatggacattttttaaatttaatcttttggattttacatatgtgtatgtgtgcacacaagacattagttcagttttctctccctgtgtgggtgagttggtcagcaaaaagaaatggtgggggtggtgattgctgcaaaatgaaattccttacttcttctttaaggggttttccataccatttctctgagtttatcacttactggttcttgaatccacaagtttgcgaacttcatgcttattgacctggatactgtctttcacccttattatacacagctcctcaacctcctctctctctcttcggtattatattctacttgaagattttctttagtgtgtgactcatttgattacttgcatcaagtctgttgcttgagcaaggagcagcctaaatcttgatctcctgtgtctgcctatgtgagtccattccagaccatggcaaaggattagatgagctgacctagatagacccttagaatctcttttatgatttattcctagggtcttcagagcataataatgacgcatgttattactactagtttaattatcagattaactttgttacattctgtatagtaaaatttgtcctctaatgtaagttgaaaattgtaatgcaagttgaaaattgaagctgactcctttaataattgactgatcttgtcaaagactgacaagcatgatgcaggaagtagaatctgaagtaggcgttaaaggatagacacaggtgtagctttcctggtagtgaagagctttgccaggggattctagctaagggggatgaatgtgcaagggttgaaacagaaacactgaaaaaaagaccagtgtgagtaattgcttttttgcttttactgaggtttctaattttggaaacaaaactaaatagcttggaatcaaactctgataattcggccaaggttcccgcagtagtagatacttgtatgttctatgaagtgatttgtctttttcttttctttttttaaagacatatttatttatttttatttgatgtatgagcgcatatgcatccacaggccagaagagggcatcagattctcttacagatggtcatgagccaccatgtggttgctgggaattgaactcaggacctctggaagagcagtcagagcagttttttttttttttttttaaagatttatttatttattatatgtaagtacacagtagctgtcttcagacactccagaagagggcatcagatttcgttatggatggttgtgagccaccatgtggttgctgggatttgaactcaggacctttggaagagcagtcggtgcttttgacccaaccgagccatctctcgccagctcccgtcagagcagtcttaactgctgagacatctctccatccccaatttgtctttttcttgattgacaaaaagtaattgcaagactgtgcatcttgagtgcatgctgaaatcttgctggttcatgtaagttgatggtcactgctgggtctccttgggaatcacagagaggcatacaggctctcccctccctgctgattcagttccctctgcttgtctagttgagccatcttggtcagcctttccctttcttgttaatctccacattctagttagcaacacaatgcttgtaggtatagcctgtgagtttttccagcttccttgtatcttatagattctgggtaaagagtgttggacatgttttgtttcaaaggcaatcacttattttcttatttctcttcctttacagacctagaggatcaagtcataatgggagcatttttagacaagccaaagatggagaagcataatgcccaggggcaggggaatgggttacgatacggcctaagcagcatgcaaggttggcgagttgaaatggaggacgcacacacggctgtgatcggtttgccaagtggacttgagacatggtcattctttgctgtatatgatgggcatgctggttctcaggttgccaaatactgctgtgagcacttgttagatcacatcaccaataaccaggatttcagaggatctgcaggagcaccttctgtggagaacgtaaagaatggaatcagaacagggtttctggagattgatgaacacatgagagttatgtcagagaagaaacatggtgcagatagaagcgggtcaacagctgtgggcgtcttaatctctccccaacatacttatttcattaactgtggagactcgagaggtttactttgtaggaatagaaaagttcacttcttcacacaagaccataaaccaagtaacccgctggaaaaagaacgaattcagaatgcagggggctcggtgatgattcagcgtgtcaatggctctctggctgtatcgagggcccttggggatttcgattacaaatgtgtccatggaaaaggtcccacagagcagcttgtctccccagagcccgaagtccatgatattgaaaggtctgaagaagatgaccagttcatcatccttgcatgcgatggcatctgggacgtcatggggaacgaagagctctgtgactttgtgagatccagacttgaagtcactgatgaccttgagaaagtttgcaatgaagtagtcgacacctgcttgtataaggtagccagatgtttttcttcagtcaactttgtaccattagttactattccactttaatcatcttggagcctggagatctcaaaaacaattttttgacacaaatataggatattctttaccaactaaaaataaagggatagtttagaaattagccagttactaccgtgtgtgtgcaagagttgcatctactgtgtgtgtgtgtgtgtgtgtgtgtgtgttcattcattctcttctcatgcacaccagaaagagaatcacattacagggactacagcagatgattgtgagccatgtggttgctgggaattgaactcaggacttctggaagagcagccagcgctctttaccgctgagccatgtctccagcccccaagtacttaggctttatagcactacagaagaatattagagattctatccacgtgcatgagagagagggtgggaaagtttgtgactcagtattgtacgtcctagaagtgctttggaactctagttcagcaagtggagcatccatacaaaagaactgaatgaatattgggtatggtgcagtacaaaatagtcttggatgaggagtcaaaaggacttggtatgagaacccatgacttgaggtaagcttttgtttgttatataaaaagaacagagatgaccctgtctggggctgttgactattaggagggtacagtggaaacgcgtacatagataagctggttgagcccctttatataaaagataaggaggctgaagcctgagaaggttctgtggacttaagagtcaagagtcaaggcctacctctgttacttttgtactcttcagtcttaaattgctcaacctcttctagaaggctgtataatatagatatctatattatatagatatttgtgtgtatatgtgtgtactctggactgatagatgataaatccatagtcaaaacatgcttgtaacttgcctggaggactcggcactctcttctaagtgggtccttgactttggcccattgtctctgccatgctgttctactttgccagtgctgttccatgactcactactggaaaacagactttatgtatccgtaaaaccttaattccgccaaaaggaaagttgatgtagcatccagcctgtgaggtttcaaagggcagcagagtgacagcctgctagtgtgccttggggacctgagcaacagcaaggtgcaatagcagagagcaaagtgcatgaagaacaaggtgcatgcagactttgtcgcactcagtgtatggcccagcagcctttcactaggttccctggagagtgctgtagagttaagtgacagacactagctaaataaaaacctggtgaattgttaaatttggatagtaataagttactgaaattatactttttttctatgccatttcagaatagtgcagtatcttagcatttgccatatttacaactttcctcataagagtctgtctttgaaattaaaatttgtttaatatatataagatcagtttttccatatagctaaattaaatattaaaagcaaagacagtgtaaggctatcagttctggcacagcgacttgaataatttagagtcactttctaaatttattttttattatacaagatatataatatagattataaatgtataaagtttgggtcgggcatggtggcacacagcttttaatctcagcacaaggcagaagtaggcggatctctgagtttgaggccagactggtatacagagtgagttccaggacaagcaaatctctgttaaaacttgatctagtttccttttgagtgggtatttgtacttcagaacatgctttaagccaataccagtgtacatttgtgaaacttgtaaagaccagcactttcggtctctgtcctgtttcatggcgtgtgtggctgtatgatacgcatgtgggtaggtagcacaagtggccaccaaagaatacctccacattggatgtaacctggaacggattcctctggggtgctggtgatagttaaatggaggcacctgacctcccacatacctgcctattctccttacaaataaacaaagtagttatgattggcaagttataaaaataatcaaggttttaaaaaaatagaaggaaaatcaaatactttcttgaccttttctttccagggaagtcgagacaacatgagtgtgattttgatctgttttccaagtgcacccaaagtctcggcagaggcggtgaagaaggaggcggagctggacaagtacctggagagcagagtagaaggtggatcattaacaaaaataaataagtagctttctttcaaaacaaaaccttccacacaaagtctaaccttttagaaaggttttagtccattacatgcctttagcatgtagtactagtgtggaaaggacgttctgtagtaaccatttgtttagctgtgttccctgggccctgtgcactatggttaggaaacttccaagtgactgaagcatggctctaagattcttgctaaacccactggcatgtgtaatgtcatgccaggcaagcctgagtatcctcctctgaaaagacgtactgcaagtctctggaatatttttaattacctgtgtttggttggttggattttgggtggttttgttttgttggttttggttttgagaacgtgaaggtcaaatgtttagcaacaactgtcgggtcccacagctttgaaactctgctttcagctggttcacggctttcctcctgagccatgagcagtttgagcttacaacacagacctggcaggaattcccagatgaatcaagaaagtagcttgcaaccccaggagtgtgaatctgatgtctctgcagatcactttagagtagaacaaatggaaagtgtttgtacctcaaaaaaaaaaaaaaaaaaaaagcaatgcatttaagtatttggagaaattaatcttttgttggtggggtttggttacttggttgtggaacttgggaccaaatctaaggttttttgcacagaagggaagtatttccctctgtggcacacctcggcccttacgtgatctttgataatgctgttcaccacgcataaaataagcattgtctcccctgtgcgtacacacaatgcatatggatcatgtaggccctataagcagaaacacttccatgtaaaaagtgtgtttgactcttctgataccataattggcatgcaagcttcaatctgccatgtccttgcatctcattgtgtcttcattattaaaattagtgtgcatcttaattttattttctccatttcagttgcttgatttcatttgtaatctgcctattagcatcatgtttggttttggttgtcagtgtttctagagaccggagacggtcttgttcttcttaccccctccctccttgtatggtaatgtctgtgtttgtactgtttagtatttcattcattgagtgtactagtcagtgcattttttctcactattttaaggttcttgtaactttttatatcttaagtaatttcaatatgttatttgtagataaaacagtaaagttaaaaatacttagaatgttacagggtgagtggtctaaattgctgatcggtagaaaaatatgcagccaaaaaatatgtatagggttaagttcctattgatgtcttggcactttaacctgggcatatgttttattggtataaagaattaataaataccttagtatttttactgtgaagtgatatccagtttttggaatgaattgctatttttctctttaagcgtgctttattttaaagtaaatttttggtggaattatcaaacattcactacatacatataactttataagttttatatttcatactatcaagtgagagttgccatctgggcagagtttacattagtagtcaatatttttgctatattcaagtgttttaacatgcagttggaggtaatgtcataaattaagatgcaactagagagaaaatgatgttcggtaaagctgctgctatttaaaggcatagaatgtgactttgcactgtaaatgatgtatgtcttaaatgaagatacacagcttctaaagcaggcaccaaatacctttttaaatacatgccttgactaagttgttgtggccctactaagcctcattgatttgctgtcgaccgttttggcctgtgtgactccaccattgggaaggataatgcttccctcctgctgctgtgtccgccttcactgaaggctgcttgtccttatgaaggcggagtgctgctgtgctgcggtccttgggccctttaaggtcatgcttacctgcgtgaccttcccaccactgctactcacctggctccctgaaaagttgctaatgtgagggagcactttattaaggaaggtgtggggggggattatgtttgtgtctgtgttcatgaaacataagagaatttcgtggcatacatattctttatgaaggtatcaagtcttttacagtctgttaaattgtatagtccaagaacaattaaaagaatttccttctcattcaatattttctagaagccaaaggaagagggagggatagtgtaattgttcagtttaaatgattgtcccacatcaaataagagattctaattgtttctaaagcttttattattcataaaatatttttcctgtattcttcacaattaaaatatcctaacattttcgtgaagatgtaagctacatcagatacagtggggtttttacttaggactgaaaccatcattggttaaatttatcatcagtgttcatttctcttgtatctagagctctaatcaaatgattgtattagcttagtagacactgtgttgtgtgttacagtgttagattgtgaacttgtgtagcttaggtaagcatcaaacccctttatttttgtatagtagattttcagcactagaaccatgtagaaaatcaatatgccaaaatgttaaagattacacaataaaggaacttggcaaaccaaatctgagatccttgctttttgttcagatttaagactgctttattttgttttgtttttgttttaaggaaaagaaggcatacaataatttaacacatggtaaaatttggcttttattttagaaagacaattttgaaccatttaaagagattttatgggtagcagtgtctgtttaacttgtgcttcaattgtgaagtaattagaggcttggtcagaatgaaaagttttcatgtgcattgttaatttcaaaggtgcttacacttggagaactaaaatgataatttcttgcctgggcagcaaagaaaatttcttaatgtaaatattgagaaacaaaaaagttgcaaatgcctttagctgaaatttgcactgaaaataaatatgctaagtttccaatgatgccttgtacttagtttagagctgggctaaggctctttgtttacaacttgggatgttttgtgataagagtaacactgcatcagtagtgcatacctagtgactggatgctttgaaactaattttaaatgcatctgtacagctttatttttgtcatgaaatttagacctttttcatttaaagccttgcttaaataacaagggaagggaatggtgtttgtgtctatgtgtcatttaaagatatagtagaggaaaatgggtctgcagagtgatgctcaggtatataatttgcatgctatttaagtcatgttgcaactataaagatataggttaaaataatagcgacaaatatgtaaattgctcttatttaattttatatgtgcaatgtattatattgggtaaagtacagaaaacttgtattcagtgtaaggcaggagttgacctcctcagcagcacctggtcagcatcttggaaaagggatccttatttgtacacacaagtcagaacaagttaataactaaagagtactttctcttttcacatttttgtcctatttttattcattgaagtaaatagtttgtctttttctgcatccttttgttcttttatttttgaggatcagtgattaattttatcctagttcagaaaatctcaagctcgtgtagtcaaagtaaataatgtctgtgataacctaagatactttaatttcagtgttttaaaaattgagttttgataacacttacaaaaaaagtacttctgattcccagaaatcataaagaagcaggtggaaggcgtccctgacttagtccacgtgatgcgcacgttagccagtgagaacatccccagcctcccaccagggggtgaattggcaagcaagtgagtatgccgtgcatgcccttggctgttgtgtgtagataactgcgaatgctcctaatctcggaagcctcttcactgttgggaactaggcttgttggggatcagtacttgaatgtcagttactgtttgtgactgagcatccttagtggaagcttggggaacaaagaataactgagataatattgtgaaaggatattttaaatgaaattaaatgacactacaaaaagtgtaattgggtatagtaacagtggtggtaagatttcctttaatggttataacactttaaggattgtcttcaatctgggcaatgttttctacatgtccttattttccagtattttattgttgactagtggatactgtcagaaagggtagacagacacttcccttcctattgcttcatagaaccatactaacttgaggtagctattatattaagtgtatatatctgtagttaacaatatacattgtggaatttaaggtggttttttctttcttattttagtgcttggcacagagggatattgtgatcatttctttaatcttccgtagtttgcacattagctatagtttttgtgatcttttcaccagggattgcaaagcctcctactcagacttgtattttttgaaaacttttcattccatgaccatctccaactaagactgtctgtaaagttgcttccagtcaattttagaaggaggatataacatgtgtgtgtgtgtgcgtgcgtgggcgggcacgtacatgtgtgtgggtggatgtgggtgtgtgtttgtgcgggcttgctaggcaagtactttgtcatttaagtatcaaagggttatccttgttttttttttgttttgttttgttttgttttgttttttgttccttgtttttgttttgttttttgagatatggtatagtccttgtatatatagtccaggctgtctcctacctcaggtaatcttgcctcagctgcacatgctgagattctaggcctgtgctactacacaaagccagattattaaaataaaataaaaataaaaactaattcctatacttgttatagaagtattcaacattttagggttttttttttggtaggagttttttttaagggatgttaagaaaagcaaagacaatatatacgatagattattatagcatgttaaagttgcttctactctgaaagtacggtcttacctttaaccagaatgtcttaagattggtattggtgttgcgcacttgtagctcaaattgaagtaggggcacacacacacacagacttttgagtgtgtgcgcatgtgtacatgcatgtgtttgagtacatggatgcagaggccagacgttacatgcggtagacaacctcttcctctgctgtcctacttatgtttgacattgggactctcactgaccccagaacccaatcgctagctgaccagtaagggccagggttctccaggcctctgcctctccgctagtgccaaagttacagacacaggccaccgtgtggatgctggcatcccggtgcaggcctgctcttgtgagatacacttttttttttttttttttttgccagctgatctgttaactccctaaggttattctgtccctctccctctcctctctccctctctgccccccaccactccccctcattgtgtaaaggcacctaagccaagcctaatggcctgccttttaaaccctctggaacccatatcgtaaaaatcgaggaattcctgcaaactgtcctctgacctctcgtttgcatgtgcacacagtaagtaaatgaatgttagagaaagaccagctggtggtttgttaaaataaatatttgtatgttaaactgctttctgctctagtattctctagagcagttgggaacatatattctgctttacagtaatggtgcctctgcaccaggacacaggtgtcttagacaggcttggtgttgtcagcagaggctcaaagtgcaagattattttttggagttctaatgagcaccaagctaggggttactttctgaaggattgactttgtgtgttttttaacatttaggcggaatgtaattgaagccgtttacaatagactgaacccttacaaaaatgacgacactgtgagtagcgttctcgcccgccctgcttttctctccctgtgctcagtgcacacacccttccctgtgaggctgttctagccacagactgaatgagtactgtgaattctgcttgctccagttcttgcatatagcagtggctgaggatataagcatggtgagtggcacctctcacgccaaaaaagaaaatctctatcatcgatcaactccagaagacctaccttcaccatttttatttaagttaggaatctcttcactcagaatcttggattattctgagtttcatgcggagtagcagtggaattgtgagtgttcatctccatgaagtgtttttatgcttacaaagatctttgccacaggtcctgaggctgtgctagagaagccctgccaataagtcttagcatggcagagtgttgtggtctcttagctgttaacttggagtcactgagagcagctctcacacattctgcagcatagcaaagctcaccaatgccgttttcctcccacaatgcaataaatttaatgaaaaaaatgaacttttaaaataacataggtgacactttataataattctcttggtttaatgatatatttatccatcctcacagtgtttttctaaatcaacgggtttatttgtttgcttatggaaaatgttggtgggtggggccaggccaaaacaagttttaatttttttttagtcaaacagattaaatattagtatttcatatatgtataaacataaactttaaaaaccaagtaagttctggagatgagtgttatagagcttgtctttctgcattagtgtctttctgaagtgtacattttagcatctggaagatttcctttaatgccttgttttgtttgttttcctatgtgaaggattctgcgtcaaccgatgatatgtggtaaagccgctcacccagccgtggactcaccttcgcctgcaaaggggaagccagctcatccttgccgagcctttaccatccatcaccgacttcacaggagggtctgacacgggtgaggactgcagcttcagcgatggaacagctagcccagaatggattttctttttttattgtaaatttgagacttatgtaagcgtgatttcaaaccgtaattcatgttgtaaatcagactccagcaatttttgttgtatgattttggtttttgtaaagtgtaattgtccttgtacaaagtgctcatatttaattatgaactgctttaaaatcactatcagtgaatgataaaggaaatttggcttgttgtgtgacacaacagacatagtcatgctgtgtctggactcggttgggatagggaaagcggcagccacatagctgcatgctacgtgcacacgattaggaagaattccaaaagcttacacagctgtcacccaggctcatggaaactgtctctgttccggcgaggactggctcactgatacagccatcgctctcacctgtctctaggatgtcctctcctcgtagccaagatattgcagctgatcctgtatattcatgagagtatctatcaattttgggctaacatgccttgattctcttgcacctctttatgagttcttacatttaattactaattggtaagcagcagcttcctacacagtaggagactgccacatttttttcctatcatgactggctgggcctgctgctgttcctagtaagatattccgaattccattttatcaataaagcttggtttaacaaacaagacatgtaatcatgtatgcgtgattcctcggtcaccccggcttcagaccccactcggggagagaaagatgtcatgtttccttaaactggatgatggtgttagcatccaggtgcaggtggatcggaagattgacgtctgctgtctcctaatctgttttaattgcgtttcttccaggctgcttacttctcattaagatgtgtgtcagcttgactttacctactgttaattaaagtaattgtcaaagtttgacaaccctaaccctgtgatagatgtgtgtgtgttgaatgtgtgtttgcctgtaacttttaattgacccacgtctttagaatctaagaggttaagatacatttgtgatttgaaataaaagcatgttgataatatttagctgttggcctttaaaaatacatttcacagcttgaggaattgtagatataaaacatgatttaattttaggcttaactccctctgactaagcatgtaagttttcccgtctgtcacattatagagactactgttctgtaccttctgtgtctccgtctccttaggtgctgtattatcaccatgcgatccattcggttataggcagatcccaataggaaacgatcaaagtacatcagatacaaagtcacaactttatgtataaaagttagcataagacattttgttctatttgtttcttttccccaaaacttggaaataaacatgtttataatatacagccttaaagacagtgtaaggttgaggacgtataggaaaacactgtgaagtgtcgcagactccagtagctacagcaccagctggctcctcagtatccctcttacttgtgaggtgaataaatgtaacttaattgtatttaattgatactatagtccagcatgaagaaaatctgaagtactctttatatttggaaattcatagcagccagaatacagaaccaatcccaaacttacaataaatgcttgatgtctaaacctgtgatagagttgggagtatggtaatattctaagctgtggctttgcagagctgtaaacgtgcattgtatgaaaccctgtgcttctggtacagactggccgcttggctgacagccgaagctgagatcctaacaggccttcgttctactgggaaaccttcagtttttgagattgaagctttcatgatggaaagctgtgtatcacactatagcagcttggttagagccttgatatcagagagtctcaacaacaacaacaaaaaggaagttagaatattcctctggtgtcattgacaccaaaggttggagtaaggaccatgtgacctgatgtgactagatctttccacaagagttggcgtcatagaactacaggaaggaggtgtgcatcataaaagcaggtatgctggaaagatgccatcctctttcctgataattaccatctcaggacacaaatgcctcaaatgttttggaagtttggcttttttgggggctttgctttttttttttttttttgggagggaaaaagaagttcttgtgtggtggtaatgtaatattcagagtatactttaatgttagtgagaaattcagttctgcatagcaggcttttgctaacttacctcttgaaagttttgtgtctctgggcagtggtggcgaacgcctttaatcccagcatccgcaggcagaggcaggcggatctgttgagttggatgccagccagggctccagagacactgtttgatctcttcacttcagagcacttctcagacatcattacttactgtgcattcacttgaccctaggccgttatgtggctgtccctgctgaacttcttaggccatgtagtagtagaagtaggggtggggcagccaggtgtgggggtgtgcctgtggtcctagcacccgagaggctgcagcaggaggatcatgggcttaagaataaactgggccacaaagtgacaccctgtttggaaggatttttttttaaaagaaattgacaatgagttatgttgatacaaattgtttgaattagctacttacaatgtaagtttgagcaggtaaaccagccaagctcagctttccacaatgtaaagtgttcccaaagcactgttctaggttaagtgcgcccccgccccggcactgtagagagagactgtaggtccttgttctcagggagtccacctttgagcagaatttagaatctactgtatgtattgtaagtggagcattcgaataaatgaagaaaactatggtgcccacctccacctcgcccagcactttcttcagcgaagtaggtcacccagaagacttagtttatctcttcatttcccagaatgatttagttgcttctccccaaaagttgaataccattcaatagaaaatcacacccagcagaagagtaaagtggactgctgaggtgtcttagtgtctattcagaggactcagttatctgtaataaatgactcttccaacagcagcaagtcacaagtaatggctgtcccaggttccttggcatccaggagggacctagcgcagggcctcctgtaggctcacagtacttgggtaagtggtctccacagcacagcatcggtgttcacaggaagctgttggactcttcagtgtgctagtattcacagtgggccatgctgccctcctttctgaacaaattactggagaatttaacaagtagattccaaagatgctcatgttttgctttgacttttaatttcagacctctaattcagactttactgattttacaatatagaatttggtatttgaagagttgtaaatattttagcatataaatgtttctcatggagatttttctttggagggaccttcaaggatattatatattctcactgatataataatgaaatgaccattttacatttactagtcttctaactagttttaggcatttgaatgtctttaattttagaagcctggttttacattatatcctacaataatgtgctgtgtgttttggtttgcagttcttttaaattatatagtatttcagaatatgcttaaaatatttaagaacctgttttctaaatgtatagtactttattgttgtgttgatcagtcgctcagctaaatggtattattagaatgctctgcagtcgatgaaccttggctctgccatattgtcaaatgagcatctaccatttagggtcaactcaacacatctcctccctcttgtctctgtattctgttactgacatgtgctttcttcctatccagttaaccagcagggtggagtatcagaaaaacccagattttcagtactgcacagcagacttttgctaacttaccattaaaaaatcttatgtcccttaacaggtgattgttaaaaaaaaaaaaagaaaaaaaaaaaaaaccaataaactgggcattggtggtgaacacctttaaacctagctcttgggaggcagaagcaatctgatctctgagctcaatcaagggcagccagggcaacacagaaaaatcctgtctcaatttcccacaccaccaaaagagaaaaactcagatagtattcaaattacatttgcttttatgagatgaggagatgtagtttaagttgaaataataaatgaccattttccttatccttcataaaatatatcaccctgacctccacttcctcttctctcttcccattcttaaatagagagagcccaatttcattctgttgaacaagaaaggccatgtattaactgatcaagaccaagtcatactgtgttgcattgagcttaaagcaagaaaacttgggatttggagtaagggggccggcaaagatcactgatggctttaaaatctgtagaatggtctttttgaacctggctgtcagaacatcgctggtttgttttctactttggcgatagtcagcacaagactgaggcaaattcagtcttatttgccatttgccacttctttggtccaaacccaatttccactggcagctttctcattaaactaaatgtttaggaagattgttcattttatatagtcctgacggatgaaagactcagtagtgttggtgtctgtgtggtcctatttgtatacaagatcgtgtggctgtaaagcaaagttggatcttgattttatacttcaaacagcacgggtttgttcttcaggggctgcttaagcttgcggggttcacacctttgagatgtgaatttgagggactgcacataggaaaatgcatacggatgtataaaactcaccaagaatgtctttctggcctgctcaagaccctctgttacaatgtagggctacacagacaaaacttccttctccaacaaagctccagatactccaagagcattaaaaatctatcagaaggaattgtttgtttcactttggaaacagtagggaggcaggtgggcacctggcttgaatctggtattaaagttggtttggtttgtttttttctgaggtcctgggttgtgaatacctatttgtaaaggtggggaagctagtaacggaggttgacactaaggtttgccattcctgaaattcaacaacggaaagtgaagtagaaatgagctgtttgtggagtgctgctgaccctctgtagtgtttgtacagtgtattatacattagctttcagggctcactcaggttctaagactccttaactactaacttaattcagatagtttaaaacaggtgttgtctatcagtgtagaagattaactattgctacagaagtttccataattccattgaaaaataattgttaaatttgttgccaaaatttcatgctaggttctggcttgatttatgtttgtgggagtaaaaacagaattcattgttttacctgaccagcccattgctaactccatagcacatgcacgggaagataccgtggcgcgccgatgctcagctgtgatcacttcatttctaagtgttttaagtggggagcaaagtacatgttaaaagcatgttgcattagatataaattcagttttttaaactcttaccaatgtaagaactgcagaaatatttttcttaaacctaatatgtaacagagtcctccactctgcagtttatgtgacccacagttttaaagcaattccataaatgtatattttgtattatgtactgtttcctggtccaaagaaaaatctgtgaactcagttctaattttaaggatgtactttttgttttctagttctttgaaaaattgcattcagcctgtgaatggttacagattgtatgtgagatgaaaagtcgagctctctggtttgcaaaatcggtgccgaaataaagcaggcaagtgcatcatgtgtgtgcttatgattgtttgactctgcaaggagcgtgcttgctgtaccgaggaatcttagaactctgggaattagttattgagtaatcttaagggaatttttcccctagtagaactcggtaaattggatgatcagataaatcaagtcataatttgacctagagttgtttctaattttagggaggtaactggtagccacaaagtgtgggttaatagttatttttatgaaaagactccataaatacagagaagccagtagttactcttcttgggcaagaagaatggtaactgaggattggaactggtctgaggaaggactgtcagccaatagtagcctggatgtgggtgtgtggaggggtgtttgtgtgtgtgctcggttggatgttgtggtgtatgtggtgtgggtgggtgggtagggaaggaaggcttcagaagggaggtgcttgcatggttctcctgacaactggccatagctgatctgtcactctgtcatgtgtttacccgtgtctcaagatgacctatagattttcaagtctgctcttcacttgctacaagtagagatttgaaaactggtcagatgattaagtggaaaccaaagtcagctcccagctgctttcctcagtgctcaccaaaagtctagtattacaaaatgttctattgctcagtagctcagacagagcttgctgtcaaatgtgctgcattacagaacataaagtttgccacaacccaccatgtggccagatataagattttgctttgctggttccctggagtcagcatgagattcatgtgtgtttctgttctaagattcatggtaatagttgtggtgttgcctatacacaatagttatgcccagaatgccgtggttgtagtttttaggcacaggcttgaatcttccagaccaaagcactctatccacagttatccctgcagtcacatacaaagtatctttcagaagttagtttccaccaggatttccaatatttgaccattattgatctacagtgatcattttaaattcttcaatttgataccctttgaaatcgtcttaaaacaaccagagtatcagtagttggtatttctccatacatatccatatacaggtacatatatttgcaaggatggcgttcataataggctaagtttacatggtgtggtagtatccagtcaacataaactgcttagctgtcaatctgtgaggagattttttttttcaacagtgttgatggaaaggagatggtgccatgctgaaatggtcaaagcaatgttctacatggacagtaaactggaaataggaagatattttgggatcaaatcacttatgaggtaaaggcactatgcaagcctggtaacctgggttcaatcctggggacctataggaagagagctgacatcagagttgtcctataggaagagagctgacatcagagttgtcctataggaagagagctgacatcagagttgtcctataggaagagaactgacatcagagttgtcctataggaagagagctgacatcagagttgtcctataggaagagagctgacatcagagttgtcctataggaagagagctgacatcagagttgtcctataggaagagagctgacatcagagttgtcctataggaagagagctgacatcagagttgtcctctgacctccacacaccttgccacatgtgcagcccctaacacacatcatgcacagaaacaaagtagtaactttcatacctgaggcaaatgcctgaggtgcctagttaacatctaagtggacctgtcttctaagttttcccagcatccttcagtccccacctgttacatgtggcataccttgctctacccagtccagaggctgggctgtccttccccaggagctccttcctaaataatccagacattctggttacccaacccttgaatacagttggcatcttagctgctgcactgttcctgtctccccccccccccaccccccatggcccagctcagcctggtcatgtccttgccactacccatgctctctcttatttacagtaaactttctcctccacaatccctagaagtcatgtcttttccttttttattttattttttcatttacacaacagtatatatctttaaaggatttgttttgaaatgcatgacaagagctggagagatggcttagtggttaagagcactgcctgctcttccagaggttctgagttcaattcctagcaaccacatggtggctcacaaccatctgtaataggatctgatgccctcttctgatgtgtctgaagacagctacagtaaactcatatatatatatatatatatatatattttaaaaatatttaaatacaagaagtaaaaaaagaaaagaaaatattgaaatgcacgactgaaatgaagtgaccattctttttagtattggatcagtgttgggaatccagtacagtcttagaaaaattctgtgaaaataattgttctctaaataaattcagtttttattctggaagggaaactaatttagactgtggctatcctattgccttctaaaaatcttttaaacttgcagtttactattatgtttgaaatgactggcaacattgtgtagaaattttttttttaaaacaatcaaaggatttgccagtttgtggcttttgtggttcagagggagttttcatgtgccttctctgtgtatataccattccggggtatctgctcgtgtatcaagcagtcttgaatgtacatttgactttgtgtaacaaaagagtttttgaaatgttcattgtttattatgctaaggacatagttctttttaattatttaactcttaactaccaagaactgtagaaactattttgtttttttgcaacatagtttctttgtgtagccctggaacttgcactgtagaccaggctggccttgaactcatggagatctacctgcctctgcctccgcctcctgagtgccaccactcaggctgtggaaacccttttaaactaacagtttcaagaacatttctaaaataagtacacacttttgcatttggggtgattgtagatatagtatagtccggacttataggaagtgattttttttaaactcctcataaggcaaagtaagagaatatccgtgtaattgatgcaaatcccacccatcgctgcctttcttcaggcacctggctgcagagatcctcagaataaaagcagccctagcatttcctgaatacgctggaactgcttttgtgtgcttcgcagaaaggaggttgacttggcagtctttttaaatgtttatttgcaatctagaggcaaagtccttgccttccctccaccatctcttgtttttagtttatatacacacattttcagactccactccgctttaggacttccatgagaagcccagagaattctaaaatcaaatctgcatccttacacacccctgggctctttttttgccttgtgttacgatttttgcaacaccgtagacactgcagctgaacagtttgaagtgtgttacgtgtgctgatattcttgttcaaagtcaggttcccagtcaccctgaccttcagagaggctcggagagcagatggacctagcacctaactggaccatggtattggtaaaaagcttcagcctgggacaatcagggtttcacagagggacttgtgcagagcaagtctccagagtgagctaagaatggagtgttgggttttaaagattacagggttggttcttttggaactgcttatattcggatttcctggactgaatgtcaagtttgtttaaagaacatttgttcaggcataaaaattgtttgtttgtgtgtttgtttgtgggggaaatgattgtaccctggacatgaagttattgaatgaagttgacattttcctgttggatctcaaagagagaaaaggcagtagagtaagggaggctggtagatggttgtacactgtagctgcctgcagatgcaccagaaaaggggtcagatctcgtgagtcaccttgtggttgctgggatttgaactcaggaccttgaaagagcagttagtg

SEQ ID NO: 332 - DNA, 1387 bp, Mus musculus
cccgggcccggccgccgtcgcgggaccccgtgcccggccgccgtcgccaccgccgccccggccgaccgagggacccgcccgcccgcggctgttccggacctagaggatcaagtcataatgggagcatttttagacaagccaaagatggagaagcataatgcccaggggcaggggaatgggttacgatacggcctaagcagcatgcaaggttggcgagttgaaatggaggacgcacacacggctgtgatcggtttgccaagtggacttgagacatggtcattctttgctgtatatgatgggcatgctggttctcaggttgccaaatactgctgtgagcacttgttagatcacatcaccaataaccaggatttcagaggatctgcaggagcaccttctgtggagaacgtaaagaatggaatcagaacagggtttctggagattgatgaacacatgagagttatgtcagagaagaaacatggtgcagatagaagcgggtcaacagctgtgggcgtcttaatctctccccaacatacttatttcattaactgtggagactcgagaggtttactttgtaggaatagaaaagttcacttcttcacacaagaccataaaccaagtaacccgctggaaaaagaacgaattcagaatgcagggggctcggtgatgattcagcgtgtcaatggctctctggctgtatcgagggcccttggggatttcgattacaaatgtgtccatggaaaaggtcccacagagcagcttgtctccccagagcccgaagtccatgatattgaaaggtctgaagaagatgaccagttcatcatccttgcatgcgatggcatctgggacgtcatggggaacgaagagctctgtgactttgtgagatccagacttgaagtcactgatgaccttgagaaagtttgcaatgaagtagtcgacacctgcttgtataagggaagtcgagacaacatgagtgtgattttgatctgttttccaagtgcacccaaagtctcggcagaggcggtgaagaaggaggcggagctggacaagtacctggagagcagagtagaagaaatcataaagaagcaggtggaaggcgtccctgacttagtccacgtgatgcgcacgttagccagtgagaacatccccagcctcccaccagggggtgaattggcaagcaagcggaatgtaattgaagccgtttacaatagactgaacccttacaaaaatgacgacactgattctgcgtcaaccgatgatatgtggtaaagccgctcacccagccgtggactcaccttcgcctgcaaaggggaagccagctcatccttgccgagcctttaccatccatcaccgacttcacaggagggtctgacacgggtgaggactgcag

SEQ ID NO: 333 - protein, 419 aa, Mus musculus
PGPGRRRGTPCPAAVATAAPADRGWPAAVPDLEDQVIMGAFLDKPKMEKHNAQGQGNGLRYGLSSMQGWRVEMEDAHTAVIGLPSGLETWSFFAVYDGHAGSQVAKYCCEHLLDHITNNQDFRGSAGAPSVENVKNGIRTGFLEIDEHMRVMSEKKHGADRSGSTAVGVLISPQHTYFINCGDSRGLLCRNRKVHFFTQDHKPSNPLEKERIQNAGGSVMIQRVNGSLAVSRALGDFDYKCVHGKGPTEQLVSPEPEVHDIERSEEDDQFIILACDGIWDVMGNEELCDFVRSRLEVTDDLEKVCNEVVDTCLYKGSRDNMSVILICFPSAPKVSAEAVKKEAELDKYLESRVEEIIKKQVEGVPDLVHVMRTLASENIPSLPPGGELASKRNVIEAVYNRLNPYKNDDTDSASTDDMW

SEQ ID NO: 334 - DNA, 64316 bp, Homo sapiens
agaaatagggcttgcagtctttcttttgaagcactataagaagaacaatctagagtttggattcagaaccaaatggtcacctttggtacagatggcatgaaggagaaaactcacacaaaaggggtccagcaatggtaagggaggcagatctttccagcagaggatccttgtcttcccttgatcccttgtaggtcatacgtacatgttccattcacaaagctgaaggactagaagttaaaacaagtcttgaaaagaatgatttttgccctataaccagcaattctagagtgaatctataactaagcccatataaaatatgggatggataatgtcaaatcatttacaatgtattattaaaaatacatgggccaggtgcagtggctcacgtctgtaatcccaacattttgggaggccaaggcgggtggaggtcaggagattgagaccatcctggccaacatagtgaaaccccgtctctactacaaaaaatacaaaaagtagccggggcgtggtggtgggcgcctgtaatcccagctactggggaggctgaggcaggagaatcgcttgaacccgagaggtggaggttgcagtgagccgaaatcgtgccactgcactccagcctggtgacagagggagactccatctaaatatatatatatatatacacacatatatatatacatatatatacatatatatacacatatacatatatacatatatacttatatatacatatatacatatatatatacacacacacacactatgtgcttaaaagtaagttatgttttctttttgtcaacttttatttttaagttccggggtacatgtgcaggatgtcaaggtttgttacataggtaaatgtgtgccatggtggtttgccgcacagatcaacccatcacccaggtattaagcccagcacccattagctgttcttcttgatgctctccctgcacctcacaggccccagagtgtgttgttccccttcatatgtccatgtgttctgctcgttcagctctcacttataagtgggaacatgcagtgcttggttttctgttcctgcgttagtgtgctgaggatgacagcttccagctccattccagagtctacgaagaacttaaacaaatatacaagaaaaaaaaattttaaagtgagcaaagggcatgaacattttcttatgtatgtacacattattgggtcaggcaacgtggtaggtgcattgtgtacaggatgtcatttatttctgcaaggtagttgatataccctgttccagaagaggaaaccaagtctgagagaggttaaataactagtctacagcctaggcaaaagagagatgatctttgaactccaattcatgcagtggtcaaggggtattctctttgattgcaacatgtttagaatgttttaaggttattatttttctgaatgccttcaaatgtgacaagtatgctctactgatccccattgtgtcagacccagcctgatctaaaatttatattaccagcctggccccagtcaaaggagctggagttttcagattctggtgctaacctgaattctacctaccacttctttacaaagaggcctctgccgtgtttgtaccagcggcaggatgacttgaagctctccatggacatgcggtgggggtggaggtgttgatggatattgtcttggcttttgccttatgtgggatttttaagaaatgtgcaggaaaaaaaaaacaggaaagtgtattaggagaaggcaggatagaagttttcctcacgtggagagagcaggagaatggaggaagtgactgctggaagcaaaactctaagaaaaaaccaattttacttggagcttaaaaaagattttgctgtgtaatgtgcattgtaactcttctcccatctccccaaggcatctttggtaaagatgtcattgttgggctttttgttttccatggcacaatgcactgaaagggcctcaaggggaaagcaagtcatctctggaaagcttagccagaatttgcaacagaaagagtgggaattttggaatcaggtcctaggcttgcaaaagagctctttttcacagccttagcttcctcctttgtaaaatggaaaaaaaaatagtttcttttttgcaaagttgttgtgagaattaaataacactcatgaggggcattgtatggagcttggcacattctaggccctctttttatattgaactaatatgatcttctctgtaattcccatgaattaattccagttctattttgcaaaacattgattctttaacctttttcatgtaatggtgctccagtttgtctagatccttcaagaagagaaaatgcatatcaacatctttgtatctagttgctctcaagcttaaaatgatgtcatttttcaattattgcttttattatacagtaaaaacatatttagaagagactcaagataaatattaaaagttaagctagttactgaacaaatttcttaaatatttacgaaaaataagatcaacacacatttgaccatggcagcttttctaaaggcaaaggatctaatttggtgattaactaaccatattgagcactcattaggtgtcagggatgtaccagttcttctactgtatttgggtgtttttaattatgaataaccaaatacaaaaatcaaagtagtttaaacaatgaggagcatttattatcactcttaaaaataaattcccaaggtgggcaattgcacggatggctcaatggctttacaatgtgaaagatccagccacttgctatcaattcttttctctacattgccttggttctttgcaagataaccttgaaattccaggctcacatatagaaataacaacatatggctgaggaaggcattttctctcctgtgattcttcttattagggaagaaaacctctctaccccctcaagacttctcaatttcctttatccagaattgggctacctcactatgtccccaggcagtgcttctcaattttttcacaccatgacacaaatacaaagataacgtttttgtgacacagaggggtacctgggtaatgttgcttgtggccagtcataccatcccagggcttcagcagctcagcctcacttgaatgtcccaagggcttaagggatccataccttatcacatctatgacccatctgagacataccagggtatgctggcacatagattggtatgctctgctctaagctacaagggagggtgagagagcatgcatccatatacatgctctagtgagagaaggatctgccaacgaggaggctctgccaagtagtaggaagtggtggggcaaccaaccgcatcagtcatcttttcaagggtgccttcatctattctaattttcacaacacattttaggaggaagtattctgtggaggataaaaccaaggcttataatttaaatgacttgcctgaggtcacagaaccagtgagtggttcaattgacacagcagatgcagatccaggtgtgtgctgggaaatgtttaacaaccacctttccaaatgtagttccaacatggctattggttaatattttcatttaagataaaaataaaacaacaaaaatgtatgttagagcttattagtcaatgatgtgacttcattgctaaattgaatgtttttatgctattcaccatgtaacagttatagacacgacatgtcttttacatttaatctgcataaaacattttctctgtcacttaagcctagaccaagcttgtccaaccctgggcctgtgggccgcatacagcccaggatggctttgaatgcagcccaacacaaattcgtaaactttcttaaaatgtgagattttgtgtgtgtgtgtgattttgtttcgttttgttttgtattagctcatcagctatcattagtgttagcgtattttatgtgtggcccaagactatttttcttctgccaatgtggccgagggaagcaaaagattggacaaccctggtctagcccacaaccagcaaagcaataagtgaagccctcatctgtggtgtccgctgatcaagctaccaaagaaaactcactaaatgtggtattgggaagagatgtacaattacatatagggaatttccaccatgcagacacaatgcatgtaaattgcctaaagaacaaagacaatattaaaatgtattaacataatttggaagtgatgtttttatcacatactacctttgtttaaaatttatttcattggaagtttatctaacttaatttttatttctatttttatatttatttattgattgatttttgagatggagtctcaccttgtcacccaggctggagtgcaatggcgcaatctcagctcactgcaacctctgcctcctgggttcaagcaattctcctgcctcagcctcccaagtagctaggattacaggctcccgacaccacacctggctaatttttgtatttttagtagagacggggtttcaccatgttggccaggctgatctcaaactcctgatctcaggtgatccacccacctcagcctcccaaagtgctgggaatataggcatgagacactgcacccagcctatatcatttaatttttaataatgagtatttaacaaacagcaggcaaaatttctgaaaatttaataatctgctgtcatgagccagtataggccagctctccacaccacggactggaactaagttcagcactctttccactcctgctgcctttactaccagcatgtaaaagcaatgatgctcagtatcgtacgggggacaaacctgggtacccgtcattaatttctgtgaccctgggtagttactaccagatgcttagttttctcttctataaaggaggagattaagagtccttgccctgtctacctgcaagggtttttgagaggattaaactggttagtctgtatgatagtgctttgtaaactgcagagtcaggttcagataaaaggctttatgatgatgacaatttcattactgttttcaaccaggccaccattgttaaggatgcagtgtgtcgctgctttcaaaagtatggtttagtttgagatcttctgtaatgcccaggatagacagtaaacacccagaagaattgttctgaagaagcccactcaaatctgtgctagtctttacttagcacaaataggtacctatattgggatgaaaactatttatttgaagcttataattcactcttttctagctgctgctggattgtctgacgggtctttcctggagttatggaatacttctcaatttcaatagttgaataaaggtgtttttttttctgtcatgcaggctagggtgcaggggcatgatctcggcccactgcaacctccacctcctgagttccagtgattctcctgcctgcgattctcctgcctcagcttcccaagtagctgggattacaggcgtgtgccaccaggtgtggctaattttgtattttcagtagcgacggggtttccccatgttggccaggctggtcttgaactcctggcctcaagtgatccactcgctttggccttccaaagtgctgggattacaggtgtgagccactgcacccagactatttttaatttcaatttttaaaaaagttgctttgctttttgcaccagaccaactcaccaagttattttctatggattatacccgtgcacataatgtagtttcctgattataaattaaatatccctaatgtccacgttgaaacactctcgaaacttaaatgaccataaactatttgccttgagtttgctgaacttgtctttgggctgtaagaaactcttttctgccaagctcttttccacatcaggccctttgcccatgctgacccctctacctggaaagttctcccctgattatgaagctgactccttctcatcctttagatcaaatgctgccttcttagagaggtctgcactgaacacctgtttcaagtcgtctcccggatctgtttccttatttattttcttcacagcatggataacagtatgcaatttcctttctatctgctgacttatttgtctatgcctcttattattatgttggctctttgtgggcagggcttgcccattgatgtcattatctacctccagtgtcccacacagtgcttggtgcacaatagctatctcatgaacagatgaacttatctgacaagatccactctagtattgtaaggctgtggccatatatggctatcttgaggtgaaagcctaccctaaagactgtccaggacttggcctctggtgctcacagttgcccaggtttctctcaggtcgcaggatgagccacagtggtagcataagactgctggctgctcccctctgcccctccctaatggggctgcccagtgatgtcacacaggacaggattctctaatccttttgattctgtaacagtcctctaagcagctaagtttctcataatgtattatgatgtaggggagggaggaaggagggccagggtaggcggcacaccctctccctgaatgaaattcatttaggggcactgtctgctcgcatgttctgttctgggagaaaatgggtagcagaagctacaatttgtactaagctaatgaaaagagagaaaagaagaatggggaagagaagggcaaagaaggcaaaaagagaagagaagaaaaagggaggagagagaaggagaaatgagaaaagaggaaaccaaatgaagaggatgtgtgagagaaaaaaatatgaaacaggtagtgagggaggaaggaattgttgaacctatgttctggttggctttctaactcttgagtagtgactggcttcagtggaaaaggatggtgaggggtattctcaaatactagcctcctgagggggtcatttacattactgcatatattttgagaggcccaggcaagtctgcctcaagggtgactctcctggagagtaatttgggagcaggaatgtaaacctttttttaagtcacaattgtggtggaaagggaaagagagtattgctgatcagattaagctttagactccacactacagcccctgtcctcaccccaagcctcccaattactaggctatcaacacacactaaattcaggactttaaagccaatcttgtagataatctttttctttgttaattgaaatataaacagatttccaaagcagagcaggatagttttataatatacctataaaaattactaaaatgtcatcatcatggcaatatattcccactaaaatcttactgtgaacatcccaaatatgtgtagaggcccggcaaagtcttacagttcagaagagaactttcaatcctcttttttcaatgttattttccccttctatctgtccccccttcttagcataaggtttaataaaaggggatatgatgatattaaacatatttaatcagacaatattgatatctttttaaaatattaatcttataacccatgagtttcctagttcataccaaaatgtccctgcaagctgtattcagaaataaatagtaggaaggtgctgctttatcggcagtctgtacaatgcgtagactccttaaaaatttctttctgttcatattttctatttctctccctcttcttctacaattgacccagattctccaagtgcagaacagagagaagaaaggtgtggaagcctaaaggaaggaagcagaaagataggcaggcatttcaagttttctatggtccactaccgtcactagtgacccagcttctgcttataaataagaaaatttgtcttttaagagcactctaaatggttgccatatgagcttttgtagttcagaatgttaatgagtccaccagcatgctactcatgctgttacttgcctggagtattaaggattccaagaaggtagcgtttcaaagatctctgatctaatttctttttttggggggtcggggagatatgtggagaattaggaaatgtatcctcagatgatactgagaccaaatgcatagtgaattttatttttattttgtatatgtggaaatgatccacgatcatcttctaaggaattctggccgggaacagtggctcacgactgtaatcccagcactttgggaggccgaggagggtggatcacgaggtcaggaaaccgagaccatcctggccaacacggtgaaaccctgtctgaactaaaaatacaaaaaaattagccaggcgtggtggcaggcgcctgtagtcccagctactcgggaggctgaggcaggagaatggcatgaacccgggaggcggagcttgcagtgagccgagattgtgccactgtactagcctggatgaaagagcgagactctgtctcaaaaaaaaaaaaaaaaaaaaaaaaaaaagtgaaggaaacagaaccttccccaaagtcatgttgagaaaattagagatggctttttacaactttaaaagcagcagctaaatatttgctgaatgccagaaagaataaataggttgcttttgatctaagagttggggcaacaaaatggtttaggagatagaaagtagtagggtgcaaattgctatagtgagctcctcaagtaaaatagagaggccttcaacataaatttaccttttttactggccagaactcaatttggccagtaaaagaacctgccttctacaatgaagtctttggtttgtgtgtgcatcagaacatcttttaaaaatacggacttttcttctaacttcttttcctgcgaatgtggtgtaggtcaaattcgtgaactggttaagccgctgacaagagagggaagggcaccccagccaatgggaacccgtgctggtgatgtactgctcctaggctgcgattcattggctgcctagggtttgtcattctatccccggcgtctgcaagcagcgtgggtcgggttttccagctagctaaactggattttggccgctggcacgtgcagtttctattaactttagctcatctctacctcttaatagaagcagctgttatgtttctgattattctcctgattttgaaaaatcctgttcccttaacctacctcattggaggtcgttggaggtcccctgggacagaaccacgtgattatctaacatgtgcaaataaatacaatgtggaatcccctgaactatagagggaaaacctgccagaaactcagagcatgtgccccgtgcgtgaatcagttgcactcgcacattggtgggcggtggtagcgtgcttgtgtctctgccctttgggtcgcgaggtgtgtggccgtggcacctgcttgggcttcctggggtcactgggagaggaaggctctggaggagtgggactctggggtaggggggtctggcagctgcctgggacccaccatgggttcgaagggcagcggccagaccgcgacggcgcccaagaagggtggacagcttcgggtctgtgctcggggctgcgtgtacaccatcttcgcagggagtggggtttgtatctgcaggcaggtagaagagccagggctccgggcgcggacgccgtaggggtagcttccgagtccctacttggccaagggccggcacggaggggctgtcgatctactgggcacctaatagccgcacattctgtccagtccctggcgccggaacgtgaaggcccgggtcctggctgctatccgggatccggacgctcccttcggcttcggcctggtgctccaggccgtaaggcaaaggcggcggcagcagcagcggcagagaaagaagctgggtaaggcagtgacgtcatctgtggcggcccctcccccgcccgccagccctcaccgcagttcctgcccaacgacatccgggtctctgtagctgcgcgccgcgccgcagctgtagcggcggcggagccagcggggcggggcgagcggaggggtgggggaggggcgacgcggtcgtgagcgcgcctgcgcggggccgcgctagaggcggcggcggcggcggtggcggcgctagggacgggagcgcgcgcgggagctagagagcagtggtctcggcgctcgtccggcccgcagcttcgggtcctcaggcggctgttgctccggaacgggtggttggggaggggggggtggggggactctagacagctgaggcgcgaaagcgatgagtcctcggctcttcctcctccttctccgggacccgctctctgcctccctctccaacgcccggatgatctgagccgcgagggcgccgacagccgggggcccggacgcagcccggctcctcccctcctccgccccttccccagcctgacctggcccgccgctgcagcggtgacccctcccccggctgccgccgtcgccgccgcggtgaccccctccccggctgccgccgccgccgcctcggccgaccagggacctgcccgcctgcggctgctccgggtaagtgcggcgctcgggccgacggcgggctggcgggcggtgcgggcctgcgcggcggcggcggcgggcaggcctggggcctgtaaacaagccgggcgtctgcccgggcgctcccgggaggagacgcgacaactccaccccctggccggcctcctcccccgagccgggcggcggacggcgaggggttaacgctcggcgagggcggtggcggggaggcgggggcggggtgttagttgcggtggcgcggggagggggcgcgaccctctggccgtccgcggccgagatgggtgtttgtggcggcgaagcaggcgacggccgcaggccggcctggccggagagcggcctgcagaacttttcccgagcggggagggggcgtccccgcgcccccacccgctcgggcgcgccgccccggctgtcctgggcttcagcccctgggagggaggcggggagacttcctttgaaccgggcttagcctcgaaaaacctaattctgtagaaattgcttaaggttttacagggggcagggctgagagactccttcagaactcaagtcagtgagtgatgcctctagttcattcattattaaggcatcgaacaaatccattgaagtaaattccgatttcttatccttttaactacgtaaatcgggtaaaacttcttgatgttagagcttggttgaggtatggttctgttctgcttgtagattttaaataaacttggagccttttcttgaaagacagctggctgtggagagccttctaccaactgcagttttagatacgttttgaaaatttcatcacctgaggtatttttcttctctcctgaaacaccacatggtacaaatccacaaaagtcatgcttcagttgtccaagccatgggatctgtgtgctagccccacctccccgcaagtttcctgctcattggaataatgagctgaatgtgttttaagaagtggttggaagagtatgagagataggtatcattttctcaaaggaaatgattttgacattattgagagaaattagacattttaacaattgttttgtaaaacagtcttttcaaacttgcacgttggggttttaaacacaaccactttacatgtgttgcgctccgaaaagtggagggatttgttgaaacactactctgctgagacttagggttccagagcacttgggaatttagcatagcttggtccccaactctctttgaaacactttacttttatacttttatcttgctacatattgggccttttccaaagattgtatttctgtaactccttattttacaaatgagaaaattgaaaataaggagattctctattcttagatgctgcttttactgacttaatgctttctttaccaataaataatttgaagcacaaagtaacatttcctagtgttatagttttgttcttgttatgtgtaacttatatgtatctgattaaactttcagtcatgtaaggatgattacttttaacctggaagtttacagcagtaccacattattgaaactataatgaacttcctgcacatggcagttgcctaagacattttaatttgatatcataaaacatttttagatcggtgaagtaattatattatgggaaaggtgtattaagactgataatgtttgaagttaactacctcaattatatttgagaaataatagtcatcaaattgctttttatttggcttgtatctttttatgtattttgtgtacatattgtatctttttacatgaggggctgaggtatatgacctgttgaagggaacagtgcagtaggagacaaggattgtttagtcatggctgtgctccaaaatatctgtgtccatggacaagtcctttaaccttttgagtttcagcttccaaatcagtaaagccagttgggcagattatattatcacatgtactgtccagttactacatttaaaaatttttttttatcaatattgtgtgtctagtcaacataccgttgccaaataaatgcctgttatgtgtcaggcacttagatgtttcagtgttctaaggctggatttctttctcggttctgttttatttaacaaattctaagttggtgatggttctttagaaaagctgttcttgtgttcttgtaagctattgatttttcttttgggattgggatgtgtagggaaactcttgagaggaaggaggatggagatttcatgggagacaaagggtggttgagactacaggtttgaacaagcacaggacccttggtagtctgatgtgaaggacattataaaaacacattatgaaggttttttctgtcacttcaagctgggtcttgttaaacctttgaaaattctctaatacctcatttgtttttgaaagaaatctatagcaacatcattttgtcatgtggtaaatattgctgagcagtcactaaatacctatagtcttttagtttgttcagattacatctaggccatttgtttactctaatagctaatagaatgtacagctgattttggtttaactgtgcgtgcatatttgtaatttttaaccaagaagtggcatatgtccacaaggaacttgttatctctgaaatactcacccatgagagctggattaattttttaagatgtaaatctatgctcatgtagaaataatataacaaggtgatattttgatgatcctctcaaatgattatctaactcttgcctgggcacctgactctgagtcagtatactcttgaatactttccatccttaatcaaatcaggagaaagagatggccatgtaagaaaattggccacggcagggttttataagagttaagcaagaagataaaacaacacatggccctgtgaaatatataaaccttggagaagaggagaaggtatagtgaggcaactgggtaaaagttgtgtcttcctctaagtaattttatgtcacaatatgtcctgtcttccatctcaaataacaaattttaaaattaagttgtgtttgttattttgctattagccaagatatataaattaactgacctgggattattagccatttgtatatgaaataaacttgggttaacctatatcaaaatcaaaagattgattatattctttacccttcactctttcaaatgtcttatgttctccatattacgtaacaattttatacttcattctgagtctccagaatatattctttgatgattttgacctttgaatgtcctggctatccatgtactacctagataatctcgttaccaggcttttcttttgctgaggcaggtcagagctagagaaagtaagcaattgagagaggcaagtttctgtatacctgtatctaaaatgtaatagactttataatttttgtaaggaactgaggaaaggtacaggcttttaatgtgtatcagtaaactagactcttatacagtttttataatattagagatgttttaagcttccttgagtaaatatgtgataaaggggggatcttgagtttttataattcttaatatgtttatttggaatccattgaccaagtgtatgtagtatccatatttaagatctggattaaaagcgattagtttctgtggctgatacgatttagaattaagatcttttgagactaaactacttctagatacagaagaacgtcatgaaagccgtactttcttggccatttatttgtgttaggctttaattttttgccataaccctctaaaatatgtgatgttatcttcattttataaataaggaaatacagggtcagagaacctaaataacgtgccaggatcagatctgggtagatataaaagtatttttcaagatattactgagtggatttttcccaattagatgaacctccttattaccaggaaccaaaatttcaaaagctaaacattaacacttacgattcatagattcctagagttaagcaagtccatgttagtttatgtaaagtcttccaatgcaagactaatgttttcttctaaaacattcagaaaagatttaagaaattaagttcattttctcattcccaaagtttcagaagttaacaaagctaaacattttatgtcttcaagtaccattgtttaggttaaggaatggaatccatgttaattctcaagtggttgatatccttaatgaaggatctagggaaatgtttctgaacagatgtaatcagtagagccacattgaagggccccgtggtggacatggtgataaaactaacctttgaaagaaaggacagtttgagtccctgttctcctatttcgtagccaggtgttcctgggtaagctacttgatttcttaaacctgtttttttttatgtcaagtggaaatacttttgtcgtaaggttatcttgaagatttaatgaaataattatataaagcatttgagatcttttctaccatgaagaaagtgccaaataaatggtagctgttattattgagtatatgaaatcttgagatacttaggggtatagagacttgcttagtatgagagggttgtctttcagtatagcttttgcagtgtgcctggaagccaaactagagattgagtagagaatttagaagacattgtaaactctgtgagtttagagagcttgcatttgaatagactaaaagttaagacgtaatagaagaaagagaaagttgagtatgagtagctttatttggctctgcaaagctggcaagatgtcaagggtttggagttaatgattaggtgggagtagatggttaaattgcggataaagagtaacagtaataaagcaaaggtgaatgttcaggctagaatgatcagtcagtaaggaaggacaagggttggtattttgaagaggagttacagtttatggttagaaatgagcaggaagatatcattgctacaggaaaggatgcaaaagagtaaggaaactaaatcattctgattaactcagttattaccattttttaaaaatggagtctttataaaaggcgttaaggctttatatgtgagttctaggttaagtctgaaaaattgtcttggaatagtgtgggtcttactactgcagacccaaaccaagatattagcattccaactggtctctttcctgctagcatcttgtactgcatctcctccctgattctataaaccatcaaaattctttctaaactatggtttttcattatatcatttctctcagtatacttcagtgactcccatttacctctggaataaagttcagaattcttggtttggcttttgacactttccatgattggacctcaagacattagtctgttataaccaaactagtacacttgctatctctggaacacgctcttttctctccatggatctttgctcatgctagtgtgcagtctggaatttgtgtctttccttctccagctttggttttctcttttagcaaagctcatttctaatatttcttcttccacaaagtcatctctgacccccagagtgtttaatctctcctttctctgtacttaaagcaatgtctgtgtattatttctatcatatgttttttttttttttgttttgttttgtttttgagacagagtctcgctctgtcgcccaggctggagtgcagtggcgcgatctcggctcactgcaagctccgcctcccgggttcacgccattctcctgcctcagcctcccgagtagctgggactacaggcgcccgctaccacgcccggctaattttttgtatttttagtagagacggggtttcaccgtgttagccaggatggtctcgatctcctgacctcgtgatccgcccgcctcggcctcccaaagtgctgggattacaggcgtgagccaccgcgcccggcctatcatatgttttacctttagatatttgtgtctaaattataattgcattcagttaattctaaagggaaaaataaatttttactttacacaaaggctagcggctagcacagtgctttatggatagtagacattcagatatttggtaagtattaagcaaaatctacctggagtgaaagtgattgttgtaggaggaggtagtagaagtagttacaagctttatcgtagcagacgtttctgactctcttcctgaatgttattttttctgaacctggatatttaagtgtgaagattatacaaatctgaagtgtggcagtgttcttatattgatgtagaagactaggttgactgatcctggacctacaagcttcattttaacttcctacattttggctttgagggttaacaggacatttataatcacatatctcttttcagagtattttacatttgcaaatattatcatgaactttgtgtccttttaaccagagaggaattgtggaatcacaggaattagatgatgtgttaaagaagagagataactatcagctgatttaatttgaacccaacaagtatctaataatatgcatactctgtgttcaaataaacctctaagctagactttcaagcttatcaaaatgctagactattttcagtgtttagaaaataccagccaggtgtggtggcttatgcctgtaatcccagcactttgggaggctgaggcaggtgaatcacaaggtcaggagatggagaccatcctggccaacatggtgaaactttgtctctactaaaatacaaaaaattagccaggcgtggtggcacgggcatggtggccacccgcctgtagtcccagctacccaggaggctgagcaggggaattgcttgaacccgggaggcacaggttgcagtgagccaagattgcatcactgcattctagcctggcaacagagcaagacatcgtctaaaaaaaaagaagaagaaaaaagaaaatacatagtaaaatttattggctttttaaatggataatttcatatagtcagtcagtgccggcttagatccatttgttagagaacaatgctaacgagacctcttgatactttgtgttcctcttatgttttcctagccttgacgttagcaactaacaatgataactaacattattgagctcttatgtgccagggactattacaatagattttcaattattatctcattaaatcttcatagcagccctatgagctagatactgttactacctatatcttaacagatgaggaaatttgaaacagagcagttatttgccaagagtttcagagctattaacagaagcctaatacatgttcttggactttgcagaaataatttgttgatccatgcggtttcattgctactgcggaaagtaagtctcttggccattgtgatgggtcaaaatctttgtacatgaagggtatgactgttgttccattgtatccagagagtgaatcttgtgattgagttgggatttgaggtggcagtgtatactaagtttgaaaagtatattatcatatgttagctccctttagaaattttccccaagaagagctattacattttttaatattaaaaaagcataagatatggccataatacaattagttccacaagccatacacacttttttcttatggcttaaaattttattcatgtttactactttgcaacccactgatataaattatttcacagatcctttattcaaatgaaattctcagtgagtctgagaagatagtcttaaacacaagctagctgagtttacaatagagattatactataaatggtaacttcaatgtttattgaaaataaattccttaaaaacaggtcttgtttcattcatttaaagagattatcaatatatgactgttaaatttttatagtctccctgttcattttctgatgaacacatgacagaaaattgaatgtgagctggaaatacagcagactatgagaaagcatgggtcatgtataatcactttaaatttaggctggtgttttgtattcatctataatatgaccacctcagggagggatgtaagtaaacattctttttttagttatactttaggtggcttaattattttaaagaatatgttattcaagaattgtctattgtactgttttaaagaataagaatataattcattaccaactttgaatgtcttggattcttagtactacctttttctttatcatgactagtaggatcacatcataatttggtactgtgtgtataaagatgaagtgtgcttacctttattaccaaaattcagaaatgaaaatgtgaatgataaaagataagggatggctatatatttttttgtttttgtttttccaaacagaatctcataacttaccaggctttagaaaaacatctttgcagtatgccatcatacctcagaatgttaagtagataggaaataaaattttcactttttgtaaagcagtagggtattatcctttctgacagcctgtaagactgttttggttgccaaggggccaatcttagaagtggcagtttttgttttgtgaccaacccacagcttaccctttgttagtccatatctgtcatcttcattttctctttctgcgtaaatgcttcttgatacagtaagcaggtgtttcaactagtcagccatctagtgtgatcttttctggtttgctacagtcagtaaaataagtagctctataagtgtaaatagtattacttgttttatgtagtaaaactccaagattaagttagagatatttttggctagactacattgaatgcattgacaatggatttcccagctcccagaaattcgtttgtgtctgaattactttatacttggcttcttgtgtagagaaaactttagaaaaagttcatccatccatgaatgttgaatgaatgagcagattaataaataaatagctcagggaaagaaaatgtgtgggcttttagtcataactatgttttttctcttttgttcccttccttatgtgccatttttcaataatgggagtgtgtatctaatgatgttgataaactgtttaaagtcattgatgaacagtaatctgaaaatcaagttttgattaagccgtagatttcttttagggtccaatattttctttttagaaatccactatgatatttttgtagggataaaagacaaccatgtattctatagatggaaaatggtaggatacagtttgttggccggccaacttctctgaaaatactttttcctgcatagaagataatcagtgttgacaagggagaagccaaggtataatggctgttattcatctgtctcatgtattcgtcaagtgtcatgtgttaaatatgaacaaaaaagacataatctctttcctcctggatcttaaaatctaaagtgagagataattcaccagataaatgctgcgataagggaaatagaggattctatgagcttatgactaaggatagatctgtttcctcagatgtggaactaagaagtggcagtagttgagaagttcattttgggccatgcgatttgaggtgtggctattcaagtataggaggtaggtggttacacattttttaagctattaaatagaactttcacttgaaaaggtttttttctctctttcctcagcatctatctccctacatacacaaaaaaattgcatgtcacaattcatgaactcagtgagtgactctattttgaaaaatgttagattatatcaactgaagtctgttagaggcaaatgcttttggtcatttttttcagcagggacatttcatatgtgtaaaatatttagaatccccatgtatttatatataaatgaatcttttaccatcttaaatgtttaataagttatatttttcctttctttcaacttaagtatacaaggttatcagcaaacatttgtagatgctctatgtgaggtgttttgtttattagttttaaggaagagaaaaaaggatggattggatcaggaagtcagttattgttttctgggttagtttgagtccaaatcctcaaatatgcggcgatttataagtagcaaactaggaatttaatccacttcagttttggataacttggataagacactttctgtctatagatctgtctatagataacttggataagacaagttatccaaaactgataaatctgaattagttaacagatgaggcaaattgagattgtaaatgctaaaagattattagaaaactttataaactaaatagttctatgccatgtctttttagtattttgcttgtactataattgtagtgaaaataggtcagtatctaatttttatagtcactagagctctccaactaaatttagcttagatgtttttctagcaattatatacttacaaagtttacttttaaaaattgtgtaatacatgcctttatagaaatttaagaaaacgacttatggattatgtacttcagatcacagcacaactagaagatgttgatacattacataaaaaatcaggaaacctatgaagaacatcaaaagtggcaaggtgtgttcacttgcactttgtgagattgaaactgctgccattatctgtgcaaactatggtttgagtacttttaatttagcaaagactaattattttttaaaaattttggggtaaaaaaaatggtctttagcgtagaagagctttacccgacttactttagttggttcaattggttgattttggtttgctttttgaaactttgtattgtcttaatttggggcacattgaactcaataacagttcagttgcattataattcatttgggtaaagtttattgttggaggagggtaagtaaatatttaactgaaaaagtgaagtaaatatttatttaaggctataagttgaaatatttgtcagctgagaaattttcaggtaacttttttaacctttgaaaaaaatttactatagcatgagtattttttatactgctatgtataatccatagtcacgttttttaacctttttatataaaatactgatacagaaaaccatacaatcatagtaatcttttaaaattgctttataattcacatagcgtaacattcacccatttaaagtttacagttcagtagtctttagtatattcagacttatgcaacgattaacacaatttaattttagaacattttcatcacctccaaaagataccctgtactcattagcagtcactccccattcaccagtctcccagcccttatcaaccattaatccattttctgtctatagatttgtctagtttaggtattttatataaatggaatacaggtaactttttattagtgatttttcacttacatgtgtcttgcatgtctcatgagatagctatgaataagttagccttcttttacaacttaaataacaattcttgtctgaccgggaaaaagtattaagttattgagagactgcatcccaatttaaaccaagaaccagactccttactagtattataactcaaaagaatgtgtaccattagcccttacctctggtggtgcttttcactgtgaattgttcagcagcctctcaacttcccgaaaataccacttaagtcttaaactcagacttgcatgagtttactgagatatgtttacctttgcagctggcttgcctagagtctaccttcttactaccctactaagtccagaatgaggaagaattaaaagcaagaaaggagatacagaagaagagattgctcaggctgaggaggggcaaagtgataagagcaggattagaaagagacattaaaaattcaaggatactgagtttgttggcatcagaataaatcttggaggctgttttaagagagaataaaacctagagggaaggaataaaaggcaaagatgttataaaacataggtaaaatatttaaaatattttgtcctgaattttgaattttaggcatatgtcagtgaagcacaaaggatagcccccttttttgatgagctttagtatccttaagatattttctttctagaaccttgtgtaggaattttacagctgaccataatcatgtgttctctttggtttgttccaacatctttggattggaaccagtacagagtaggaaacccatatcaccttgggattatttttcagataaatcttccagaggattaaatggcaccatccccgtcaggtccaagtaggaggggaagaatcctattttgggtgctgtcagattcagtgggctgtttagttcactttttatccagaaaatggagctaaatgagaaattgcagcttccaaagaaaatcataccttgattttatagatcaaagcctttctgattagatcagaattgttcctgagattttaggggcattcagttaaagtgccccaagaagagtgataaatcacatataggtgtaaagtcaataaagtcctatagtaagcagactggaatttagggggaggggaatacacactgttagactgttggtacctatatttgactactaggatgattatatattttaaattctgtattcagtttcttatcagaaatactgcctacaatatcttatacttaattttttaaggaacaggtgataaagataggttatattttcttcagaataattgatattcattatttaatagataaaatgtgttatctgaatgtttatagtagtagaaaccaagtttacaaaatgtctatatataatttgtttttaataaccaaggattctttctttacaaaagatttcctctatataaatcttcctgttttatagatgatctgtattataggagaaatgagtatttgttgatttaactggctaatctacaggactgagcattattagaggagtatttaaacatagaagtctgtgaaaatatttttagtgctgagggaaattggagggactttctagaaccgcaaactaatagaaaaccaggcatagtggctcaagcctgtaatcccagcattttgggaagccgaggcgggaggattgctgaagccctggagtttgagaccagccagggcaacacagtgataccttgtctctacaaaaaaatttttaaaattagctggacgtggtggcacatctatactcccagctacttgggaggctgagacgagaggatcacctgagcccaggagctccacgctatagtttgagttgtgatcgtgccattgcactatagcctgggtgacagagcaacaccctacctcaaacaaacaaacaacaaaaaaacccttctacctctgaacatgtggggatttaaagattgctatgatttaaatataaatcatgaatatagaaaatatgagaacagaagagtatttgttaaacaagactaagctgtgctgcataaagtaaggcactatcattgtgctggtattttctgattctcttaatgcaataaatgttaaactttactactaccttagccatgttgcagggaattgacatgaatagttcctgggttttggctgggtgcggtggctcacgcctgtaatcctagcactttgggaggcttaggtgggcagatcaggagttcaagaccagcccggccaacatggcgaaaccctatctctaataaaaaacttaaaaattagccgaacgtggtggtgcacgcctgtagtcccatctactcaggaggccgaggcaggagaattgcttgaacctgggaggtggaggttgcagtaagccaagatggcaccactgctcctagcctgggtgacagagggagactccgtctcaaaaaaaaaagttcctgggcttcaagggcactctaatgtgcacatcttaaattcttagagcctacttctatggacgatttatgttactgttgatggagaatttgattttcttttttatcttcccctttcccttggcctttgtaggttttttgaagtgaacatacttttatgtatttacttatttattgagcagttcccaaatggcaactttattattttatttcttcaactcagttgtctagtttacttcatttgtatctaatctatttaactcatcctttgagtttttaatatcaacattttaaattttatttttttagcttcaaaggtgtgcatatgcttgttacatggatatagcatgtataatggtggaggttgggcttctagtgtacccatcacccaaatactgaaggttggacccaataggtagtttttcaaccctcaccctctcccacccaattgtttttatttctgaaagtaatatttctttcttggtctgcctgataatttttttatagtttcttatttttcgttagttttcaaaaaataccttgttgggcattttgtccatagatgtactatcttatgtttgctaattccaatatcggaagtccttaggaagttgtacttaaggtagtttgtttctttctgtatttggtgattttttttatgagctaatatttgattaaaccgaatatttctccatcctctgtatagttgcctacaatgtaatttctacttttttttttttagcataaaagagtttcattttcctttttatactcaataacttgtttaattagccagtatttttaccagtttctttacttattgttccttgcatcttctctgagtccacttttcttcttgctgaagtacatcctttagtaatccttttagtaagaggctggcttgtaaatgtccttagtttttgtgtgaaagtatattttatgcattactttgtttttcagctagatagggaattcttggttgataggtttcctcccatcagcaacctcagtatattatttcattgtcttgtgaaacttggcaaacttggatctctgagaagttcgatctctgcctaattgttatgcttctgtatataattttttttttctggtagttttttaaaagatttcttttctttattctgtcaccactacttactgtgtgaccttgggcaagttcaaaatggatataaaattgtatctgtgtcatagggttgtaatgaggattaagttttaaagcacttagaacagagccttgcatattataactgtgacatgttaatatttgttttattttgccatacttgatattctaaacacatttctatgatatgcttaagtatgttgttttatccatagctcctctttgaaatacattgttgatgggaagattcatatctttctttgtttctagaaaattccttagccttcatatctttgaatattcattttccaatattccttcttagtctctgtattatgttctaggtggttcctcagtatcattttctaatttactaattcacactttgactttgtccagctagagtttatgtggcctcagttccagtgaattttttttaaatattcaggctgtctctctaatagccacctattctggtttgatttctgcctatttttaatttttcttcctttaatgactattgtggcttccttttaacatttgaaattattttcagattgtcattttttcttctagaatgaattacagttgttgattttattggctgtccatcttagtttagttttctttgtgtgttttgagtttgcttttgcagtctcctattgactggaagtttttgttgtgttttctttttcactcttcttatccagtgtttttacatgcacctacatctctgtctaaaaccacatctttatattggaggcttgattcccttgattcttggtaacatcaggatcaggcttctctttccaagaataagacacaaactaagatctatatttcttctcactggacacataatttcatctaaaccgtagccccatgcaatggttagtagtagctttttctggctcctttcattggttggaagagcctctccaccctaggtattggtttcaagcagtgagcctgagttctatcccagccatgcatgggtacctttttagtccctgttactatccctacaggatgtggacttttggccatctctgttacttgagcccagaaggctcacagttttagcttcaaaaactgctttgtatttaaagagttcagtggcttggtcttttttaatattttgtttgtatagttaataaatatttaacatacattaaaatgtttggaacagatacatttcaaaagtgaatatacaaatccatttggttggaagttagtccattttgtgttgctatcacagaatatcacagactgggtaatttattaataatagaagtttatatagctcttggttctgagggtggtaagtctaagattgaggggctgcgtctggtgagggccttcttgccagatggaaggcaggaatgcaagagagcacaagtgcaaacaagggcaagacggggccagactcgattttaccaggaactcactcctaagataagggcattactcaattcatgagggcagagccttcatcacccagttactttttatggactcattggttattactgtcacaatgacaattcaatttcaacatgagttttggaggtgacattcaaatcatagcagaagtcaatgtttaaaatcaatgtatatcctacatacccttcagaaagatactagttgactctcctacttatgagaggtatatttttttattcctttgccaatattgggtgtaataattttttaatctttgagaaggtaatgtataaaaaacaaatttgtgtttaatagctagcaggattggtcattgctccatatatttattacccatttatattcttttatttatttaattgcctgttcacattcattgcccatttcttttcctttaaggtgttcatttttattgtcttttaaaatagctgtttgtatattgtagtaatgttaacttttgtgtatatattgcagatgcttaaaagacgtttgcttttcaggttaatgagctttattttatagtgtaggagtttcttttctctggagtcactttttcttattcctttggaatcagtcttttcttgtcatccttagaaagtcctttcctaccataagattacagaaatatttgcatacatctactggtattgttttattattaatacttcagacttcaatctttaatctcttggtatttattttaaggtgtgatgttgaagggattcagctacccaccactggagggcaggagtggaaaagatcagctttcaggcacccattattgaatctctctgttcccagagagctctttctggattctcagttctattccactgataaatttattcctgcattagtattgcctcttaaatactataatttggaatcaagtttaaatatcaggtattgcagattctcatgattttaagaatgttttggctattcacatttattcatatatattttgaaatgatttaatcaaggtctgggaacaaaaaggtccagttgtgattatattgaatttatagattaaataaagggaggataaccatcttcacaattttgaatcttcctatccaagaaaaagaagtgtgtgttattctgaagccctcttcttaaaaaggttctatttcttgttatttatttagatatacttttatttctgttttaactttctaagtgattactgttaatcattttcatatatggttttctatagtcaaataatcttattgagtatttttttccctatcatttcaggttttgagtttgccatcatgtcattaactgcaaatagttgatctccttataattttatgcctctttttgttagccttggcttatctcaataaccattatttctacacattgctgagttacagggataagagttggtgtccttgttcttttttctttcctgggaattgttctagtactgagatttcctctttggcttgaagtaagtattatattaaggaataaattttatcaaatccctttcagaatatgatgagatgatcatatggattgtttttaacttttaaaaagatgacttacattagtcagctgcctaatgttggctcattgttacgttcctaaaatgatccctatttggtgatttgtaatatatattttactgactttttggcatctgtattaataagtatgtttggactatagttttatttttttagtgctgtctttgtcaaattttatagaaggattatgataggtttgtaaaaagaattggaaatttttttcctgtaatctatagataacttaggtaatttgagagttacatgtttccttagggcttgaaggatcttgttttgaaatagtcttgcctgatgcacttttatttttaatagcttattttgagaacaatccaaatttaaaatttgcaaaaataatacagtgaacttccatatttatttaaatggccaattgttaacatttttccacattagttttacagacttttttccctgtgtatgtgcatatatgtattcatattctcttggcatgcacacacacattttgttattttttagttttgctgaaccatttaagactcagtatggacatcatgaacctttactcttaaatatttaaatgtgtgtcccctaagaacaaggactatcactttctcttacataaccatagttcaattatcaaatttaggaaatttaacattcatacaatactattatctaatatacaatccatagtcagattttatcagttgtcccagtaatgtcctttataacaatcttcccctccccattccttcaccctttgccttcatccaagccagtccataatcacatattacagtttgttgtgacctccttggtctcctttaacctggagtggttctttagtctttttgcattttgtttttcatgagctctgaagttttttgagggatagttctttaataactttctcatattgttccaggtttctggtcttcactctagcactaattgaaaaaaaaaaaatttgttttccgagaactgttactttcctccatattttcaaatttattaacagagaattgtacagagtgatttattttacaacaataaaattctatttgtgaggtgagtatagcctgtttggcttctaattttaaataatttttttagttagactatttagtggcttacctattttatttttttcacatataacatgtactataattttacgtaatatattccttcagcttttattttattttgtatgtgtgtgtggttcatttttctttttaggttgaatatttagtatactgattttctttagtatactggtttttttaactaagtgtgaatttttttttttctattttcaacacactattgctggcttaaaggtgaggtttcttaataaggtttggtcacatctcagaatttgataggagatttttctcattattgtttctaaatattctataattgtagaaatatgtaaactcaatgcaaaaaactggtgtaggagcttactttttaagcaatttccacgtttgaggttttcttctttctttacacattatcaatatctactattaatgtataattcagatgtgtcatttcattatttcattttcttttttttttttttggtctgtggggtaggatgggggagtgtgttagaaatctataagcttttctttccaacatataatccaataattatttgatttttcaattaatgttttaagtgtgtttgaacagaatatatagtcttgaaattttggaccacatcttttaccaatttaaaacatggctcttattctgtttattgctttattccttgtgatttactttgtctgaaattgaaattgcaattcttggtatcttttttgcctagtgtatttcgaccacaacaaagtacttttatactgacatctttatttttgagtttcttggttttgattagtctcttgattgcatgaatctatctttaaatagtttattttttcagaaatgaaacatggataacactactttagtgctggcatatttgatcatgtcttcttcatgtcttcttattgcgtttacatataaatgacaaccttgctggtcgtagtattcttggaataaaacctctttatcctcaacgtttataggcattacttcgttgcctatcatctgatgttgcaaagaagtctgggaccagcctgatttcttttttctttttcttttttggcatgtttattttattttttttatttgagacagtcttgctctgtcacccaggctggagtgcaatggtgcgatctaggctcactgcagcctccgcctcctgggttcaagtgattctcctacctcaacctcccgagtagctgggattacaggcgtgcgttattatgcccggctaatttttatatttttagtagagatggggttttgtcatgttggccaggctgatctcaaactcctgacctcaggtgatcctcctgccttggcctcccaaagtgctgggattataggcgtgagccatcgtgcccagccgatggcatgtttattttgtctgaattgtattcttaaaatttgtaatcttcaaattatgcttcggtattggtcagtttctactaaatgtatctagtacttgataaacgccattcaatcaccaagttcagtctttagtttatgatttatttcttctgcctttgaaatttaatttttcttccattatttggttttcttatttacaatgtgctaattgagctgttggatctgcattgtttgtatcttttctcaagtctacttgtttttgtttctttatgcttacttgcatactggatgatttttgtcctgttcgtttttaccccttgcagattgtttgctgtagtgtcttcattcctcattattgcttttcatgacatttaaaatattgcaatgatattttttctctgaaatatctttttttaaaagctctgttgatactttttatattctggtttcttttcatccctgtttcacaaattaggttttttaaaattttcttatatgtaagttgtcacctagttttctaaggtaaatcttttagactgtgacatcatgttcttgagtacttttttagttacttttttatttcagaatttttgtatgggttctataaatttttttctgcttttttacttaaagggtggcagttttctctgttgtttgcccaaaaataactagctactccttgcctgttctgtcattatactaggataccattacctctttcccccttggaatttaacaggctgaattatattaaattattttagttatcatatttcattatttttgagagaaatgatagggattttgtcctattaacctgttacaggtaagaaactttgtctttcttgatttttctcttgatgcttgttgaaattactgattattttagttatcatatttcattatttttgagagaaatgatagggattttgtcctattaacctgttacaggtaagaaactttgtctttcttgatttgtctcttgatgcttgttgaaattactgcacattttcatctttacaagtttggcagattttctttcccaacagaagaacttgactattgggcattctgctaatttccatggctgctataacaaattatcacgaacttggtggcttaaaacaatacagatttattctcacagttctggaggccacaagttcaatatcattttcacggggacaaaatcacggtgtcaccaagaatgtgctcactcccgaggctttaaggaggaatctgtttcttgctttttttcaccttccagtggctgtcagcctcatcacttgcctggtagccacatcactccaatctttaagaccagcgtcttcaaatctgtgtctgctctgtcttcacatcaccttctctgtgtgtgtcagatcttcccctgactctctattctaaggacatgtgggttcacttagaggtctctggataatccaggatcctctctccatctcaagattcttaatcacatctgcaaagacctttttttccaaataaggtaacatttataggattaggactggtatctttgggagtcattattcagcctactaggtatcattttgttttgctactttagagtgaggcagacatattagtcaaaaattggattagagtaaagcctcatagattgtgctgtttgttagaatcacagatactgtcctctttaccgaatgatgcaaactctgatgccatggtggaaaagtatatgaattgaattggatgtggtcaataaggattgctagggactcgagaatgcatgttgttctagggagaggaaatacgtgaaggtcaaattcaggttatcaggttatcagtttgtaacctagtttgtagctgcttttttcttttcatttcttacaagctggtcttgctgtagtaaaataattttgtgtgtctcttataatcttgatattgagaataagaggttttttttttaatgggaattccatccacatgattttaaagtattactttactaatgatatttacctaggtattcctagaactttagtcttctcatgtaacattttatacatttctcagaacaaggtaattgacaaataatcaaggttgcttatttattgatgaggaaagttagacattaagccaaaggacttgtccagtatcgcatattggatagacctataatttttaactttaatcttgtggtgacaggtatttccatttttttttttttttgatgtttcatatgtgctttgatgttgatgtgtcatgtgacatgaagtgtctccctattgttggataattgggcaagtctaagttctttttactttatattcctgattttgtttttctagatgtgttatttttacagattcaggttacttctttttttaaatcatgttattagagttaaactaatgaaaaatcatatagagatgaacttggttttgaaatataatgagtagatacttgcttggctggaattttttctcacaagttttttataaagatggtatgagtgtatactttgtatccaggaatgtgtgtacactagggggagtgttggggggatgagggtggaagacattttaagacacacaggaggctggtgtggtggctcatgcctgtaatttcagcactttgagaggccaaggcaggggaatcacttgaggtcaggagtttgagaccagcgtagccaacatgatgaatccccatctctactaaaaataacaaaaaattaactgggcgtggtggcacatgcctgtaatcccaggtacttgggaggctgaggcacagaatcacttgaagccgggagccaagatcatgccgccacatcccagcctgggcgacagagtgagactctgtctcaaaaaaaaaaaaaaaaaaaaaaaaagacacagaagaccctaagtgtacactcagatgctctttatatccatatccattatcagtttggtgatacgttattctagtttcatgaacctttactcttagaacttggtttattctctaatatcttttggattcagttttgcagttgagatggctaatatcaatttgatactctttccttttatgattgctcatgtttttgtctagaaccttgcattatagtatttttttttcttttccttgcatttctatagttgtgaacaactaggagtgggtttttagcaattaattcagtgagcttgttaattttgaaaaggcttcaactgaggaacactttcttctcatttctttgatgatagcttctctgtttctccttcagaaagtcttgttttttatatgcatatttactttttgggtgcactctccttgttaatgagttatttgcatctgattttgagtttattcagcaaatatttattaatgatttactgtatactctgtgcttggggagttgacctagggaactcaaaggaggctcctttgaagaattgatgcttgagctgagatctcaggaatgagtaggaattatctaagacatgagagaacagctgttaaggtagggaaagtagcatttgtttatatatttggaggaaggaagtatgatgagtactaggtactgtaagaaaacccttgtggttggagtagagaatgtaggagaagggacagtatgaagtgagatgcggctagagaaggtacgtaggggcttgacttcccagggccttcatgtgagccatattaagcagttatttatccacctcctacccccagcagtggaaagccattgagaaacttttagtacagaagtgatatggtgaaatttgtattttgaaagagttacttaggctgcagtttggagaatgaattagagggatgccaggatccacgtgaagagactaaagacgctagtattctgcagtgagaatgatggtaacttgagaccagggcattggtagaaaaaagtggacagatttgagaatgcttaggaagcatataacccatgggatttgatgatggactgatgggagatgaggtagagagaggtatcaaagatatccttagtttctgtttctttttctgagttggggtcttgctatattgcctaggctggtcttgaactcctggattcaagcaatcttaccgccccagcctccaagcagttgggactacaagtatgcaacaccgcacccagtgaatgttcttggtttgtattcaccttggtgggtgatggtgccattcactggtaaaagctgcagatatgtgagggtgctcagggaggcagcatagaatgggaaaagggcctacatgtaacccttgaggaatgccaatgtttaatggcttgggagatgaaaatgagcctgcagaggagacgacggaaaagcttaggggtaggaagaaagctgggagtgtgtgtgtagcatcttgaaaggccaatgggaagagtgtttctggagggagtgttatagttgaatgcttctgtgagcagtcaattagaggagggctaaaaatgtcccttagattaagtgacttggaggaacttgatttagtaaaatggccagacagccttttggagcatcaacattttttttaagaagtttaactgtaaagagaagagaggcacatgggtagctcgaggggaataagtcacatgaaaagttatttttaatgggtaacatgggtgacacttgtggctttaaaagtcacactccaactgagaaatgttgataaaaaggagaaaaaggaaaatagtgtaacattcctgaaaaaactgtcatttaagactcctttgaaacatgggcaccaaagctagtctagtagaggatttattatcagtgagaggacagagtcctattacagcagaaaagtaggaggagagggttatgaaagaattcattgaaatggttcactcatggccgggcgcggtggctcacgcttgtaatcccagcactttgggaggccgaggcgggcggatcacgaggtcaggagatcgagaccatctggctaacacggtgaaaccccgtctctactaaaaatacaaaaaaattagccgggcgtgatggcgggcgcctgtagtcccagctactcgggaggctgaggcaggagaatggcgtgaacccgggaggcggagcttgcagtgagccgagattgcgccactgcactccagcctgggccacagagcgagactccgtctcaaaaaaaaaaaaaaaaaaaggaaaaaaaggaaatggttcactcatttattgatcttttttttctgtagtatccaatctgccattcattgtctctattgcaattttcagttcagtaaattgcttctcatttccatgaaactattttcagagtacctcttttttaattgacagtctgcaattgttttattcattcaatgtcatttcatatcttggttagtttctaattttgagctaatgaatactgagtctccctctttttaacttctgaattaaaaaaaaagtcatcttatttttctctgttcatttttacactttatttagcctaagtatctgaaattggctttgctagaaattacaattagttcactgttgttttctttcagtcccagacaaaaaagaaaaattttagatttctttcttttctcttcttcctttttttttttttttaaggtcatttatctttggcagttttggagatttagaaaagaaaatatatagacttgtaggcagaagaagatatggcactgagggaagttttagttttgttctgtgacagtcttccttatcttgtatgttgtctttaaaaagcctacacatttagattttcattacctcatttgcaaggatacaggatagcacatgtaggagaattggagtgtaagtccagaaacctaagtcttattcttagccttactgatgaaccagctttgtaaccttgggcaagttattctgtttctctgcaccttctcatttgtaaaataggtttacacaaatcatttctgcattttggctctgattcattatgcaagttatcaaaatcaaatttgtaactataaatgagtaatattttattatttttatttttttagagacagagtcttactctattgcccaggctggagtgcagtggcaccattataggtcactgcagcttcaaattcgtgggcccaagcagtcctccttcctcagcctcctgagtagctaggactacaggcatgcaccactatgccccgctaatcatttttacagagtcacgctattttgcccaggctggtcttgaactgccctcaagtggtcctcccacctcagtctcccaaagcactgggattacaggcatgtgccaccatgtgtggctctaatcatttttaaagcaacaatcagtgggaaatttcagctccaaatgggagaaaaatttccaaagattagccttttttttttttttttttttacagatttgctacagttttgttaatgtgcttatttctcattaccatagataactttgagatggctgccttggattacaaactagaatttattactatttcacatagcttgggaaattaagtgtagtttgtgtagcctaaattatcctttatagagatgtagctgcaagggttagcatttcttctttgaaccccaggtatgcagtatattgcttaatactctattgttccataaatatgcattccagaagtcagctgaccatttgtccttatctttgaggacaaagcccatacatatgtaagcattagtgagcaatgtagaatataaagatttggtagcagtagagagtttacgctctacatcccactgcaagtaatttgaatattgccatattatccactgtgacctgtgctgtttgttaacgttccttttccccaccttccccgaggagcttgtagtctctcactatatatttttttctctttggatttcccttcagcctttagatttcttatctctaatgcaagtctactctagatttttctcccaaatgtttaaaaccaaacctattatctcagtggtcatcaaaggtcctctagttaccagtatccacccttcttggaatgcctgtttagcagtgttcttttgttatatgagtaagaataactctggtatttgctaagagaatataattttctccacattgtatgtatctatgtcctttgtttataaagcctggggggcgttccctattaggttaagtgtccctaggtaaatagaaaaatatgtagggttttattactcaactttttaaggtttctgctcaaattgtcagttgaataactcttgttactttggggctaacatgttgcatagggattttaacaataaaatatatagagcattttaaaaattattcactataattctgagtggattaaaccaaatgaccgggttcaagactctactatgagttcacctttgcttaataaaaggcaagactgaacattaattaatgacttcttggcccagccttagaatttttcagtttagggattagtttggtttttaaaaggtacaaaatgttcatgaaattttctgattatatcaaatattaattcagtcttgttttttgtcatagtactttgttttgaaaagttcagatcaactgataatactagtgctgtgatgagactcagcttgtactcaagaacagatttatgactaggtgagaactaaaatttctctcagaaactaactaaaaactttcatggacaaattgaatccccttgggatttactatttatggatatacgccaatttaattattggactaaataaaatactctttattagtccacttatggaagatgactgtgtaaacatagtatttgcaagtaagtactttttggtattatatttatataatcagctcttgtatccatgtagcttatagttggctgcttcaccaggactctacaaattgctcagaacccaaggaggtaagatttttatattgcctgttttcagtatgtaaaagtccagccacaaaactattacccttgactatatttttacagttgctgtggagctgaacctaaaattttgttagatggttacttggtttgttacatttttatatactaatttatatactataataatatactgtatatattttttaaagtctggggtttgtttttagaaagtatattctatcttcaaagaattatttggtagtttcatgtgtgtatctggaaaataactactgtacttctttataaaagtgagagtgaggtccctgctagttgaggctggaatctagacgtggctgtttatgtaggagttagtaattaaacagtgcctgtttgctgactgcctcatttttgccaggctctgtatgggtgccttgcaaggcattgcctcatttaaaccttgcagcagcattcagaggaaagtattaatatgcccactgtacagatgaggaagttgaggaatgctttattagtaggtgtgaagtgtcttaagcataatacctccctcctcagccttgctccctcatcctagttaagggaattgagacacagagataaggcaatttgctattgaccttcagcagatgacttaacctcaccgtggcttagtttcttcatgagtaaaacagggtacctatcttttaggattggtgtgaagattaaagaagttaatacatatacaaaactttagaacagtgcttggctagtagtaatctctccataaatgttagatgttattattaagcctgtgactacctgttatctcatgtagttgttcagagataaaaatgtaggctataggaaagaataaggaggaaagccaggctcctaatctgtctaagatagaagtgaatcttagttaagttttaagataatcctatgtgcttttaaaagatttcatggtttgcggtttgcttttctttggctcccagtttctttttttttttttttgacttcttagtacaggtaacttttgaaggaattcagcttaccttagatgaaccaaaggaaagctaaaagccgagataatttagaaaaactaaagcagagattatgttcctaaattccctctttctgcttcaaagtccaggaaacaccacctgcagatacagttgtatcccattgttagaccctttcctgaagccatcctcttttctttgtcttcccagagagaaactagtcattcgacaaagattgaacttcttctgtgtgttaggctgtgctccaagtgctgggaagacaccagtgaataaaacaaaaagtccctgctctcatggagtttacagccactattctaaagtttgtctgtattctgcctgtccttgtttttatacttttagcaaatatgtgtatagaattgttttgcagccttgttcagcatattgtcttcttttgttttttaggaatatctgtttatgtaattagatctgtttttgataaattgtattctgttatttatccttcctaccttctaatgagcagttaggttatttccaacattgactattatggttctccaaaaagatcattgaatatgtcaccttggatggatggatgggagagtttcttcaagacagcatgtttcagactttttgttgtgaccacagtaagaattatgtgcacctcagcttagtaaatacaaatatacacttgggacaaaaacttcaagaaacagtatttacttacttttatcacctgggatgcactctattttgttctgttttgttttcttgagacgttgtttcgctcttgctgcccgggctagagtgcaatggcatgatcttggctcactgcaacctccacctcccaggttcaaacaattctcctgcctcagcctcctgagtagttgggattacaggcgccagccaccacacccggctaattttttgtattaatagagacagggtttcaccatgttggccagtctggtctcgaactcctgacctcaattaatccacccacctcagcctcccaaagtgctgagattacaggcgtgagccactgcgctcggcctattttatctttttcaaatgcagtttacacacaacccagctgattgggttgtgtgtaacccatactgattaaactgatttatcacccgtgttcattatttttaaaacgttgttttgagatctataattagaagtggaattgctgagtagttgcttaagtgtatcttcaacttcttcaactagctgttgccagttgcaattcagagtggttgaaccaatttaaactcctatcggcactctaggggagttcctgtttctccacattctgaccaactcttgatattgccagatggatgagaaatggcatttgttttaaatgtgccttcccctatttactaatgaagtgtttaaagtgtcttttaaaatatatcacatagaagtttaatttaatggtaatcagagctggcggcaaggaggaaatattattgtgattgactgcctcctctggcagaaaaaatggtgtaaaaattatataataatatctatattatattgagtatttataatttgctagacactatactttgtgcactgtatacattattttatttaatcgtcataagaatcttgtaaggttagtgccttcttatatacttttttttttgagacggagtctcgctctgtcgcccaggctggagtgcagtgatgtgatctcagcttggctcagtgcaacctctgcctccaggttcaagccattcttctgcctcagcctcccaagtagccgggattacgggcatgcgccaccatgcctggctaatttttgtatttttagtagagacggggtttcaccatattggccaggctggtctagaactcctgacctcatgatccacccacctcggcctcctaaagtgctgggattacaggcgtgagccaccacacctggctgccttcttatatgcttatacaggaacagatggagaaagagattcggaaaggttcagtagtcacactattactaagtagtagagccagaatttaaacccacattggtctaatttcataacttattttctttagtacttcatgctattggtgaattcgtagaggaaggaagtttgtcattactattcttttctgttggtttgtctcttaaatgtgtttaattttttgagtttcactcacgtctctttttttctttccttttctcaaggtagtggagtctttcctctgtaaaacttcaccttgttgtttctagtctaggatagtggtcttgtaacctaggatagtggtcttggttactgcaattttggttgattatttcttgttggcccttaatgtgcccccatcttctgccttaggcattccatctaatcttttccagcagtttgcaaccttactgtgcctcagaatcacatatgaaaatttaaaaatcatagatacctaggttccaaccctaccctggaaattctgatttggaaatatttatttttcaaaaagtccacagataattctgttgcacagccatggtagagacccattttcttaggggttaatgatgctttagagtcacgcagacttgaatcagagccctgattcctttaaacttattagttgagtgatcttggccaagttctttaatcttggctaaggttcttcatctataaattggagataatattattatctaccttagagagttgttgaagagattaaatgaagtaatgcttgtaaaacacttaccagagggacttagaatacttcttaaacattgcctgctaataaggtgtcattattacgttatcctttatccaatcaaaatactcacctttgcagtgtgtatcaacttgatgtcagaaaaataatctgataaatatcaccataagggatggatgatagctagttttcattacttacctttcgttagttgaactgtactaggaggcagaggagtaggcagatggttttatcacgccaatcagccagtcttttctgcctatgtatcagtttggacctataaggaaaatgaaggggaaaacaaatgtttttctttccttcctaggaggattttcttcttgccctttttctcccagtttcctctctgagctgagtatcattagcatcatcaataccctagtttcagagctgcgtagtgatttacctagatacttttctccaccattattccctactacctaactcctcttcacctccattaaatctctgttcatcatgctatccttcttttggattgcctttagttcagttgtgacttacttgattacttgaacccaggtgtctacatttctaagctattgttcaagtaagggccaaggtaaattctaaccagctgtctctttgccttgtgtgggcccattctagaccagcgggtgttaacttttgagtattggaaaaggattagattagctgagccttcaggcttgtcagcagggctgtcactagaccctttgatcttctttatatacctaatggtcatagagtataataataatggtacatgttattactatatgattaatagattactagtagtaattttgttatatatgtatacagtacacttcgttatgtatatatataattgcttgcaacttgaaatttgaggctacaacatttacagtaatttaataacttaactgactttatcaaaaactgaaaaacctcatggaaaaggtagaatgtaaggtagacttaaaaggataggtatacttttttctataaataggatgaggcaagagtttccagttaaggaaactgacatgagcaaaggcttgaaggagcatgcaaatttggagcattgtgagtagattattttttagtttttcagagttcatgcagtgggaataaaactagggagtttggaatcaagcttgaaaattcctgaatgttcaaccaagatatatttgagttagtagattttttgggtatgtcatgaattcgtttggcttttcttaattgatatacatacaacttagtcctgagcttacacatgttcattgtatcattaaacatttagcctggttggtttaagttgatggccactgccaggtctcctttctgccttctcccctttatcccaatgctttagtttttttctgcctttttgtctgttgtgatctgtgcttcatcaggctttcccccagttcctccttgttaatctccagattccaagtcagcaacacaatgaatgtctgcttatcgcgagttgtgaattcccgcatatctctttcacttattaaaaagattgtttggtacatattttgtttataagacagttattgactttcctgtttctcttcctttgcagacctagaggatcaagacataatgggagcatttttagacaagccaaagatggaaaagcataatgcccaggggcagggtaatgggttgcgatatgggctaagcagcatgcaaggctggcgtgttgaaatggaggatgcacatacggctgtgatcggtttgccaagtggacttgaatcgtggtcattctttgctgtgtatgatgggcatgctggttctcaggttgccaaatactgctgtgagcatttgttagatcacatcaccaataaccaggattttaaagggtctgcaggagcaccttctgtggaaaatgtaaagaatggaatcagaacaggttttctggagattgatgaacacatgagagttatgtcagagaagaaacatggtgcagatagaagtgggtcaacagctgtaggtgtcttaatttctccccaacatacttatttcattaactgtggagactcaagaggtttactttgtaggaacaggaaagttcatttcttcacacaagatcacaaaccaagtaatccgctggagaaagaacgaattcagaatgcaggtggctctgtaatgattcagcgtgtgaatggctctctggctgtatcgagggcccttggggattttgattacaaatgtgtccatggaaaaggtcctactgagcagcttgtctcaccagagcctgaagtccatgatattgaaagatctgaagaagatgatcagttcattatccttgcatgtgatggtatctgggatgttatgggaaatgaagagctctgtgattttgtaagatccagacttgaagtcactgatgaccttgagaaagtttgcaatgaagtagtcgacacctgtttgtataaggtagctagactttttttaaaaacataaaatgattttatgccatattaatcactactctagtatttaatcatcttagaatctgtaattctgaaaccagtttttggcacaactgtaggatactgttcaccaattatgaaaatatatcataggaccactatgtagaaataaattacccaattaccatctctgcaagagttataagctgaatgtttagtcttactacttgagctttgtaataatgtggaagattatcaaaggtaaaaagattttatcagagtgcatgttttgaaagaaagagggtggggagggttaggcctcagtgtctataaatgaaaagcattttagagttttaatatttgaccatgtgatatctcagtacatttatgatatcctaatcctttgaaactaaggtttaatggtctgtagcacttgaaagaggaatgtagtgatcattagacgtgatgtaatagaaatagccttgtacatggagtcagaagaacttgctctgagactgtgtatggttttaggtaagctatttaaactctaatcagtttttttcatcataaaaaggataagacattattatcttgtctcatggcgttgtcaggaggatcaaatgggataatatacacaggtgagctagctcagcccctttattttacagatgaggaagctgaagccagagaaggttctacaaacttaagagtcagacagacctgagaccaaggcttacctctattagttttgtactctacattcctgaacgaattgttcaacctctctcagctttaaaatggagataatagtatcttataagactgttgccgggcgcggtggctcacgcctgtaatcccagcactttgggaggccgaggtgggcggatcacgaggtcaggagatcgagaccatcctggctaacacagtgaaaccccgtctctactaaaaaacacaaaaaattagccgggtgtggtggcgggcgcctgtagtcccagctacgcgggaggctgaggcaggagaatggcgtgaacccgggaggcggagcttgcagtgagccgagatcgcgccactgcactccagcctgggcgacagagcgagactccgtctcaaaaaaaaaaaaaaagactgttgaggaattaatgagcgtatgtatatatatatatatgtgtgtgtgtatatatatatatacatatatatatatataatgcctagtttagcatataatacatgctacaccctttcctacagatattataaatgacgtgtacagggttttatacattgctaacagcattaagactagaaaatcaaggcccttgacttgggttcagtgttctttctgccacactctgttctgttttgtcaataatgcttattaacttattctttgatttttttttaaacaaatgttgactttttaaaattcttctgagggtatatatttgatactcaaatatttaattatagcatttgaatacttagatgtctttaaaaatgaatgtagttcctaaaagttgtcagtttttaaaattaatacaagttaaaagctggtttataaaccttaggtagttttacctcttatttcatatttctacttatgaagcgaatgtattagccccacaatttataatttattttaaatgtaattttatcaggtacatataactacaggtcaaatcctattgtaaacaatgccactaaaattttctgtcatgttgtatggaaggagtgtgtgtacacatgtatatttgtattaggtatcacttcaaattaagtcaccagtaaatgtttagaaatagtattgttttatagaattataaaaaattattattacagtgagattaacctgtaatgtttctctcctgtcttttggagtattggttatactgtattctctctatactgttcgggggagggggagtcattgcacacacacacgcacgcatgcgtgcgtgcacatatgtatttttttctccctgaaagtaacattttcactagaacaagtataactgtaattggcacagctgtaaaggttctcaaggctttgaagagcaaaaagaaaactaaaatattctcaaatttttttcttcccagggaagtcgagacaacatgagtgtgattttgatctgttttccaaatgcacccaaagtatcgccagaagcagtgaagaaggaggcagagttggacaagtacctggaatgcagagtagaaggtggatcatttaacaaaaaataagtagctttattaaagaaaaatcttcaacacaatcaaactttaacattttagcttttagatttttatgtgtctttgacagctagtgtctagtgtatgaaagtggaaaaggacatttctgtagtagctgttaagatgtatgcagttgtcctatcacagttatattagaaataacaactagtgtggaaagtaacccacattctgttcaggatacttttgttttaaaaggctaaaatgtttgtgtgctttaaaattcttaatgaattcactggcatgagtaattttatgccgggaaaatctgatttgtggtctatttaattacaaagagattgtgatggtgataatttgaataccatctttctatgaaaagctgtgtatattaattttaatctctagggccttttttcaataacttgaaaatcacagcctcatcattagcaactttatatacacagctttaaaaaatttgctttaaactgtttcagagcttcttccctaagccataaactgtctcacctaaacaagatagacctcaataaaagacataatatttctccacctggcagaaaagtaactgccaagtaagattaagaaataagttgagcatttctggagtatatttctcataattctgcagagacttccagtttattgcatatatgcagtaaagtgtatatattatgcagtttctctaagtggaaaaacttgacatgactttaatagtgttaaaacatgaaaatgctggtgagctgaggtagaaaaaaaacaagaaaaaaattttaaaaatagcgttaaaatgcattttaggctcctaatgtcgttaatttgcacgttaaagacctctaatcgcatgcaagcattgacctaccacacctacatcccactgtgcctgcattattgaaattactactcactttaattttttttcccctttttactgtttgataccaatcataatcagtctgatactagaatcatgattggttttgttctttagtactgtctagagctactattttgtttttattgctgtccgccacttgatagtcatacatctagtatgtgtttgtactatttagtattgcattcattggacgtactattcaacgaatttgtctccttactgttaccaagggtcttggaatttttatattttaaattaatcattcaatataagttatttataggtatagtacaattttaaaatatttagaatgctacaatcattggttcaaactattgattcatgggaaaatttaaattcataagaataatatgtatagggataagttgatatttaatgtattggcactttaacttgggcagacatgttttcttattggtttaaagaagtaataagtattttaatatttttactatgaaatgggatccaattttagaaatgaattgctacttttctctttagtgtgtacactttaagttttagatggaattatgaaatattcactttacgttattttgttacaataataagttttatatttcttattatcaagcaagagttgccacctggacagagtttacattgatactcaatatttttgatatgttaaagtgttattatacttgtaccattcaattggagattgtcataaattaaatatggtattttttactcagatttgatgagactgcaactagagaataaatattacattaaaattgctgctattttaaaacatagaatgtaactgtttgtattgtaaaagttgtgtgtcctcagtgaaaaatactgccttcagcttccaaagcaggcacctgaatgcctttttcttttctctctctcttctttctttaaatacatgccttcactagattgctgtgacctactaaacctcattttatttgcttggaacatttttggcttctctgtccacaccatagaaaaggacaaaggccttccagctctccttttctcttatttgttcccttctaaatacttgactctctgggggtgtgaaaagattcagctcataatttatactactattaattttgtggtccttctaagccaatttaaaattatacttttgtgtatatattttcaaaatctttgctactgactaccttagctttaaagttgctaatttggagatgactgatagaatccctgaaacttggtggaggggagtggaaaggagcagaatgtgtttgtgtatatgtatgtgaaacatggatcttctatatataaatattctttagaaaaagcgttcagtctttttacaattctaagtaaaacgtataggtcaacagaaattaaaggaatatttcttaaaattcatttatttttcttttttgaaagcagacagaagcaaggctagtatagtatgaatggtcaggtagtttaaatgcgttgtcccacgtggaacaggagatattaactgtttttaaagctttacattatttttttacaagaatttgttttcctgtaattttcttcacagttaaaatatcctaatttatattttaacaaaagagatgtaagatacatcaaatatagatgattcaaggtaatgttttttagacctgaaactattgattcaatttatcatcagtgtttatttctattgtatctagttatctatccaaataattgtattggcttagcggagactgtatgttaagtgtattagttttagattgtgaaattgtgcagtttaggtaaacatcaaatccctttatttttgtacagcagatttccagcattagaaccatgtagaacaaatatactagatgttaaagattacacaataaaggaacttggcaaaccaaatctgagatccttgctttttgttcagatttaagactgtttttttttttaaggcaaaaaataatagatggtaaaaatttggcctttattctaaaaggacagtttgaaccatttaaagaaatattatgggtagccatgtctttaaaaattttgaggcctgatcaaaggacgaatctttatacacattgttattttcaaaggtatttacaaattgagaagcagaatgatgatttcttgccccactaatgacaaataaaataccatttcttaccataaacattgaaaaacaaactgaacaaaacttgaccatataacttacaaatacttttgacttgaatttgcatgtggagtatgtgtgctaaaactgcaagtgaagactttttatacttagaggaatagttgtagagttctttgtaaggttctttgttcataattttttatattttgtgatgtgaataatagtatgcatctgcatgacaacactgcagatcatattgctgtgcccttttaataactggatattttaaaattattttaaatgcagttgtatggtttatcaaatggttctctttttaaacattttataaggaaatttagaccttttctattcaaggctttgttgaagtaatcagtgaaggaaatggtattatatatctatacagtatattgtttaaaggtactttagagaagaattaaactgagacagtgatgttcaagtacataatctgtgcatgctatttaagtatcattttgcaaatataaatatatacataaaaataattgagttagtatataatctataaattcccctataattaagggttgttattttcaaatcttgaaattgtttattttttaaaattccacgcagtgtattatatagggcaaagttcaggaaacatgtttccagtctaaagagaggagtgatgtaagaagaaactagttgacatcttaagaaagggtattctcacttgtgcacacatatccttgattatataatatgctgatttaacatgaaatattttttcacattttaattttgatttgaagttaatcttatatgtcattttgtgcattttttgtcataaatcttcaaaggtcaacctgattttttttttttttaaatgataccagattagaaaaatctcagatgtggtaaatgccatctttaaaaagctaggttatctttgtttcggttttcttttcaattaaatttggataacacttacaaaaaaagtacttctgattcccagaaatcataaagaagcagggggaaggcgtccccgacttagtccatgtgatgcgcacattagcgagtgagaacatccccagcctcccaccagggggtgaattggcaagcaagtaagttacattctgtacactcttatgctttatgtcagtgtatgaaaatgttaggtattcattgataaaatgtttgtttgcctaatttctgaactgatgcagttatctgtgttttaacctgtgatttcaatttttttttagtattagaatatctagagtttgtttagacataggtatcagtatcattgtaactaattgcagtgagggttgtctttattggaagcttggttggcattgatttcctcatagagcataaacgagataatatactgaaagaactttttaaactaaattacatagcactacataaaaatttacaaaattctaagtgtcgttgttagtagtagtataatttgatttggtcaatccctgagtaacttaacaccctgaaaattccccttcctcatatggaccatgtttctatgcctgattttcccagtatttttggttgttgattgctggttagttggttttaggtgtcagggaagaagatagaatatatttcttgtcttttccctttccactttagttcatagaattggactactttgtgttaaatattaagcttacacctttacataataaagtggaaaattcaagcaattccaagggttaaaacatttttacctcaaatatccatataattgacttacaaacataaaacttgcaaatacctttagcttgaatttggatatagagtaaatgtgctaaaactacaagtgaagacttcttgtacttacagtgaagatatattattgactaattttctcgattctctactgtgttttgcaagtgtgaccatgttctttgtaatcactaaatagtgattgtaaaagctcctgtttgaagcttttattttttggaaactttttttttccatatgactttctatgaaacgatctataaaattgcttcaagtcaattttggaagtagggagactataacttataaatatactacagatttttaataaagtgttactcaaaactaattcctagacttgtcatggaaatgtcttatttgacatttcagttttaatagaacttttgaaaagggcattaagaaaagtagaagcttaaatataaagtataatctgagacttcaaaactacgatgcaactcaactagcttatgttagtattatatcttaagaatggcattgccattgatgactcataaccatttaaaccaattcaaatggaagtagactatatagactttttttttaatctgtaatttttagccttctattaactgggttggtagagtgttataacacattttagagtagactcacctctgctttaacataggagcccaaatatcttaaaagtgaggctcactattgacagcaagaaatagaactaaaataatatctgagtataagattatcttagaaattttaataaacacctggctatgagttactaagcaatgttttgctttctgaagaattaattttctgcatttttttacacttaggaggaatgttattgaagccgtttacaatagactgaatccttacaaaaatgacgacactgtaagtagcattttagctccctctgctttcccttcccctccactctaaatgcatatccttcctacctgtttttgcagagctgttcactgtacccattctcttacacacacccctgattgattgctctgaactctgcttgctctgatctctgcctgcaccacagttctagtgattgaggacataatcatggtgagtggccacctctctcaaaaaagaagaaagtccttttgaattattctagattttttaagtctttacaaacaatcaacttcagaaggtttgcctccactacatggttttttttttttttttttcccgaagttgggactatctctactcagaatattgtcttattctgagttttgtaagcagctgcagcagaacttcggaatgtctgtctcaactaaatagttcttatggttggaaatacctttgtcaggaatcctgaagtatatacttcacttaaatattagagaattgtttgcataaatagacattagaatgccatactctccagttaagtgttctgttgcaattctgttgtatgatgtttatagaaaagtgataacttaaagatcatgtgggcacagctctgaaatattttatgtattgcattatgaagcttcctcacatattgagttcttaatcttttctgatgcattaaaggtttataaaagtggtattctaaaactgtattggatttcattaaaaaattctttttagtagatttattgattgagtaatacatttggacagcctcatcataaaaccgcatttcaaatattttccaaaacaaaacaaaggattaacaattctttgaacagattaaacattgctatttcatatgtacacatatatacttatatactttaaaaaacatttatattctaaaagtcatctttacagaacattatctttctccattatccagaaagtatggtgtattttggcaccgctaaattttaacgttgttccttattttgcttccttttacaaaggactctacatcaacagatgatatgtggtaaaactgctcatctagccatggagtttaccttcacctccaaaggagagtacagctcaactttgttgaaacttttaacatccatcctcaactttaaggaaggggatatgacatgggtgagaatgattacatcagagaacttcagcagtacaacagctagcccagaactgatttttttttttttttttgtaaatttgagacttatgtaagcgtgatttcaaaccataattcgtgttgtaaatcagactccagcaatttttgttgtatgattttgtttttttgtaaagtgtaattgtccttgtacaaaatgctcatatttaattatgaactgctttaaatcactatcaaagttacaagaaatgtttggcttattgtgtgatgcaacagatatatagccctttcaagtcatgttgtgtttggacttggggttggaacagggagagcagcagccatgtcagctacacgctcaaatgtgcagatgattatggaaaataacctcaaaatcttacaaagctgaacatccaaggagttattgaaaactatcttaaatgttcttggtaggggagttggcattgttgataaagccagtcccttcatttaactgtctttcaggatgttccttcgttgtttccatgagtattgcaggtaataatacagtgtattcataagaatctcaatcttggggctaaatgccttgtttctttgcacctcttttcaagtccttacatttaattactaattgataagcagcagcttcctacatatagtaggaaactgccacatttttgctatcatgattggctgggcctgctgctgttcctagtaagatattctgaattccattttatcaataaagcttgatttaacaaacaagaaacttaatcatgtatgtgtaattcctcttttaccctggccttttaaaacactgtgccgttgtaatgagacgtttctcatagggaaagatgttagtctcttttaattggacaacactgtcactcaaggcatagatgaaactttccttccattagaaagactaaaagatttaattcttggttgtaccttaatctattttttaaataggtttctttcaggctgcttatttttcattaagatgtgtatcagcttggatttgcctactgtttaattaaaatatttattgtcaaagtttgacaatctaacactctatggtaggggtgtgtgtgtgtgtgtttgtgagtgtgtgtttgcctgtgatttttaattggcccatgtctttagaatccaagtggttaagatgtatttgtgatttgaaatatagcatgttgataatatttagctgttggcctttacaaataactttcaaagcttaaggaattgtagatataaaaataacctaatttaatttaggcttaaattcctctgattaagcatgtgaaagtaagttttaaaatctgtcgcattgaaaagattactgttccgtgcccttctgtatttttgtctctttaggttgaatattgtatttatcaccatgtaatcattcagtaggcagattcccactagaaaactgttgaaatgtaagactaaaatacaacattgaatacaaaatcaaaattttgtgtataaaaaccagtatagtccattttgttatatttgttttttccctaacttggaaatatacatatttgtatatatagccttaaaattaatgtaaagttaggggagtagtggggaaagtaatgtgaaatgtctcagatttaagtagttaaataccagcaaaatcttttcattatccctcttattttgtgaggtgattaaatgtaacttaattgtatttaatttatatcttattccagcatgaatgaggaaaaactgaagtactatttatatttagaaattcatatcagttgaaattacagaaccaattccatacttacaataaatacttaatgtctaaatctgtggtagagtgcgaagtatgataatgttctaagttatggctttgcaagcatctaaatgtgcatttaatgaataccagtgcttctagtatagactaattaccagacatactggtactgaaagctaaatccctattataacaaaccagttccttaatattttaagtagactgacaactttagttccagaaattgcaaaactttgaactggactgtgtaatcttttgagatgcaaaacttaagtcacaagtagagtatgtgatggaaagctgtatttcaaaccataacagcatatttagagccttttttttttgagtctttaaacaagagaaaattaaaatattcctgtcaaaattattagtattgaaattaggcttggacacgagagagaaccgtatttgagtgatgtgagaagactaaatcttttccacatgagtcagcactgccatactaataatttttttactataaaaatacaggaaggaagtatacattataacagcagactgtgtgtgttcctgattcctggaggtaatagtggggggaaaccaaccatactttttaaaggcacttttgcacctctattgtgcacttcattcttgtaccacttaaattcttcacccccatcccctttttttgtgctaattagcatctcagggcaatgcctcaaaaatgtttgatgtgttctgttctttggagggaaaaagttcttatgtgatgataatatagtactcaaaatatacttttatcatttaaatgtcttatttgctgctatgaataggaaataacattttgtatagcaggctctgttttaccctaacattaaaaaatttcactgatctttctttcattaacagggtagaatctcctaatttccactttcttgggaatatacttttatagacaatagaagcagttctcaatattagcatatactttaaaaaatcaaagtgataacttaattcagctttggaagtatctcaaacatatttttactttatagtgcattaacttgcttctagagtacttaatgcaactgctctagccacttaattttttatactaatctcaacattaagaaatttggattaagtaataaattagttatgtaattcaagtaatctgaattacagcagtacttttagtgatcattcataggactatatattaacccagctaataactcagtttttttacaaaatgtttcgagtattattggtaaaacactgttctaggctaagcacattgggactgtaaagaaatgagtagatccttggcttcaagtttacatctggacaatttataatctagtgtatgttagtattataactggatcactcatcaaaaaatatatatatatatctattgcccacctgctatctaccaggtacttagctgatcaaggcaggcccctgccctaaagaccttgtttatacttcctttactcacctgaaaactgttctccagtttattttcttctctctaaagttaaagagtaattcagaagaaaattttgcttagcataagaataaaattggactgaagaggcttaagcccattcagtatccttgattgcatttatccaacggcctttattcttcctgctgacagcagtaactcagaggaataggtagtagatttctgaaaattatccagccatggaaatgtaggtggggtttgagtttaaggcatttaaaaatgtaaatatctctagctaaatttatcttaagtagaactctgtgtttttgtaacacactgccagtgttaatatcaaattttagccaaattattactatgtgttttaatattttaaaataatttcactgcccatctttactggacaaactcatttggagttcaacttgtgatttctgaaagaactgatgaaattgggtactgctttttttctccatttttcgttttgttttaattttgaatttcatggtatatacttttagttcaaactcagctgtttgtacagtattgtattaggatttggtattagaaaagatgtgtaaatatcttagtatataattgtttctcatttgaggtttttcttctaagggaccttaaagagttttatatacttttgctcacagaaactgctggtgagattaccattttttgagtatctagtcttctagtttttcttttaggcattaggaagccttctttagagttcaaaattttagaagcctaatttgctcttacttccttcaattatgtgccatgtgttttggtttgtatatgttttaaattgtatatttccttggaatatgcttgaaatatttaagaatacattttcaaaatgtataatactgtattgttttgttgatcagaataataagtctcagttaaatgtttgttattactgatagtcaaaatgctcaatagaaatgatgagaggcattggttccaattcattgtcaaatgaacgttttctaattttgttcacagattctttccctttcgattgttctgtatgttaagatagtggcttctgctctcactgttttcctatttatattactagcaggtaggagtgctaattagaaaaacttagatggtattgaaattacagttgacaacttatatttttatgagatggagaaaaaagattaagttgatataacaacaaagtggactttttttcttccttatcctgcacgaaatattgcccttgtttcctctactttcctcttggtgttttctctttttttcaaacagaaacaggccaattccattttcttgagcaagaaagcttagtgtgttacttcatcaaggccagctaatactgtgttaaaccgggctgaaaatgagaaaacttgggagatggaggaatggggaaatggcagtgggataggtagggaaggattactcttaattgttttaaaagccataggaaagtcttccttgtacgtggctgtaaatttataagaactattgtgtcacataaaccaacaagaatgaacctttgctgcttcagataatttgatttttccagcaaggaaattaataagttactgattcttcagcatagaaacaactgagaagaattaatgcaatgtttcttcactagaaaacccaacccttcatttcttttcattgctccaaaacccagttttcaactaatggttttctcattaaactaaatgtttagaaaagttgtttagagtttttctttttcttttacatagtcctcctgatccagtataagactatttagtaacgtgcatttgtatggtactatctaaagtaagttagattgatgtaagagatcgggtagctgcggaacaaaattagttatatcctaattaggtacagtgaatgacacaaaatcattttagcaatgcttcttaaccttttggggtcacaggcgttttgagactgatgaatcctagggacttatttacccaggaaaatgcgtatataacatacatatctccctaaagtttacaatattgtagtggttcatgggccccctggttaagagcccattctaaagtacaatagggcatcatcccttttcctgcaaagcccaaaagtatatttctagggcatgaaaataacttgagtctattttaaggaattgtttcactctagaggtagataggggacctggctagaatctgacattaaaatatactttttaaaaaatattatatttggggtggggaaagtgattaaaaggtgaaaaaaaaacatagtattcagaagttttggaggttaatgtctttctctaagatttgccactttagaaattcaacagaaaagaggtaaaacagaaatggaatgtatctggaacatttttggcctccatagtgcagatatactatattaacaagtaatacatttatttacctgtcagatctccaggttttaagattttgagctttctagtattaggattcattaaatgttcaattcatttcatattctaaggaattaggttatttacttactaattcaggatgttaaaataacatccaagtcggacaaccaccaccaatgcacacagttaatgagatttctaaaatataataagtacaatgtaacaaacgtatagaattttgcatttgttgccaaaattagatgtttaatgacagcttatttaattcccatttgtgggacttctggaacatagaaaccattatcttacctggttatcccttgactaaatagcatatctgcaggaaaatatcttgtttgtagtgatatgccccaatagtgattgatttcactcttgaaatgagttatatcacttaatttgtataaatgttatgagtggagagacatgtacatgttaaaagcatgttgcattatatattcattttttaaactctataaatgttaagaataatataattgcagaaatatttttcttaaatacaatgtgtaacaaaattctccgtagcaactcacccactttgcagtttatgtgatccacacttttaaagaaattccataaatgtatattttgtattatgtattatttcctggtccaaagaaaatatgtgaattcagttctaactttaagaatgtactgtttgttttcaagttcattgaaaaattgcattcagcctgcgaatggttgcagattgtatgttagatgaaaagtagaaataatttctagtttggaaaactggtgccactaaataaacaggcaattacataatgtgtgtgtatttatgattgtttaatattgcaagcagcatttttattccaagaaacgtggagaatttgaaattagctgttggaagaccttaaaagaattgtttttttcagctgagaaataaatctgataggatttgaactagatttgttccttcctaattttaggaagtttactgaaagccaagaagtttgagttgatggttattgtcatgaaacattccagaaataaagaagccagagtagtttctctttggtaagaacattcccatttgtctgtcttctagtagatgattactcccttgaagagttgaaattgggaattgggagtggtctgggaaaggacttcctcacctggtatctgtggtatagtgcctgcttcaaaatggcacttaaatgtgtgtgtttctaggatgcagaaaggaggtgtttatttcctctgccaattctgatcattggctatattatatcctgtgttcattcatgtctgaaagtgacttaaacaggtttaattgattctagtcatggcttccataattagagaatttttagagttgaactgttaataaaagtgaaattctgtgagccgcaagagctcattttgtttattgtaaaatgtgtaataaaacagtaatgaagcttcataaccaaaggtaaaatatcttagaactgagtaaggtaaagtaaggcaaataaggttttattttatttatatgtaagtggaacctcttcactcatcaaattgtatcatgcagttttgttcatgggtttttttgggtttgggttccccctccaccccgctttggagcttttcttttgaatgttgaagctactttaagttgttttatttcttttttcttaatttattactgagaaacttacattggagtgcccttctctttttccttttttatcaattaatagttcaaattaaatttcccatcacttaatagctcagattaaacttctcatcaagtcaaattttattctagttgaaaagtgctatattttttgataaattaccctgggaaattggtttgcatgccctctatagaactttgcttacttgccacaaaaccaacaacttaccagatgttggtaaaagattttgctctgatggctgcctgttgtttacatgagcattatatgtatttcttctgatatgctatctaaggtgattcagagtgcctaaatagtgaattagctaaacattcaacatgtttctgtgatagtttagatacaggcttgtgtcttccagaccaaagcacttctctatagctgtacaaaagtttttctggaaatcaatttgaactagcaaaatttacaatatttagatttttgatctacaaaaatggcagttttatctagcttaatttgtttctgaaattagttgttattcttgaatgatcagattgcaagtcagtatttggtatttctctcattatttatattttaagtcttttaagaactggatgagaggtttaaagaaaagctatacatatttggacaaatttccaaatgtgaggctggataatatacaaatgtatacagatgctctagcattaggtcaacatcagtatgagaaatgttattccagcagtgactgggaaaggaaaggatgccgaatttaagtgttcagggaggaatataatagagactaaagatgggggaaatgattttaaggatttattttgaattacataattgaggtgagtagagagctcctttctaatattttattgggatgttgacgtggatccaatttagtctgtgacttagagacatcagtgagtaattctctgaaaacaattgttctttaaagtgcagtctttgttaaaggtggctgagggctctaactttgttctaggtgtcaactcaaactctgacttaggctacggccatgctgcaccttttctaaatatattttttgtattttattttactatttgtgtctgccttggtaacagctaaaaattacctagtattttaaaggcaaagcatttgctagaagagtgtaactgttctgggtcaacgggattagatgtgtaccttacattagcatactgaaaccattcagggattgttcttctaattctcagtgtgacagtcttgaatgtatatttgattctattaatatttaatgaaaatatttttgtgaagagccactgtatatcataagagcagagctattctcaattattttagccattgaacttttaactgcttactaacaatgctgaaagggttttttttaacttaaagtttccagaacagtcctaacaaaaaaattttctagtgattggatacagtggaggcatataagtgactttttaaacttattaggcatagcaaataagtctttatgtacttggtataaatttgacttttataactgttcacctttcctgatgtattttaacagacatatcctgttgcaatgatccttaataaaatgaaagagatcttagcatttggtaagaccaatgaaactgcttttgtgcccagatcacagaaaagaagctccctgggtatccttccttagaatttacttttatgtctgaaatcaggatgcttccttttttttgttgtcttctttgtttttgttttaaatgtgtaggtccccagaccacattctgttttagggcttctgtaaatactcttaggaaagtaagtcatgaaattctgcctcctcgaatttcataaaggatttgtttgccatgtgctctgtcctgatttttgcaacatatcaaataagccagactgttgaatgacaatctggttttaagtgtattacatacgcatgtataaatatccttgttcggggtcaactctacagtgactgtcagtagtgttattggttcaacttgaccttcagaggtttccctgcttcacgaccaaatggatttggcatctgacaggaccgcagtgtcagtaaaagcttcatcccaagaggagcagggttccaagaaggaaacttcctggagggcaaatctccataatttgagataaggaagaatacagtagcaatttttgaagatcatgtggtcagttctctgaatctcttggaactatctttgatattttagtttcttggactgaatgtcacttttgttcaaaaatcctttgggtataaaaatttggatatgtgaaaatgtactttttaatcttagaatgtgattttcttggacttaaagtcatttaatgaagttggcatttttctgtttggcaagggaggaagaggaaaagggaaggtggaagaggggaagaaaaggagataaatactaagggcaagaaaggagggttgtttaaagtgaaaaacaaggtgtgttttttaaaaggaaaatcatatttttatgaaattaggcaccttataaatcatccttatgttttatagcagtctctaatgcattactggttggaaaattagtcatgtctcttccccaccccccatccccccattatgtttttaactctcccttccagaggggtgagttagggggaggagggaataatgcagctttgattgtcacctgtcataggtttgattaggaaagcgattaaaacgaggtttaaaataaaggattgcagatttcccttctgttatcagttccctggcttctctgaagcagtggttttcaacctgccagcaaggtagagtgacctgggaagctttaaaaatcctttagcagtgaaggttaagttggaaggttcaactgaaagttacccctcccctcatcctcagtgaatccctgcatcctccctgtccctgctcagatcattgtcattcctctcttcaaatccctgccactcagagaaagccagtgtccttatagtggcctgcaaagccccgtatcttatgtggtccttgtgacctcttgaactcaccttcttcagtctgctttagatgttctggtcttatagctgacctcagaacatgcctgtcccactcaagccctagggtcttacaggcacttgctctagctgttccccctacctgaattatttcactggccaaagcaagtcacattgccagttcaggagggcctgaaagaacaaatcagaatatttgtgaacaagcctagtctctactgtggtgtctaatgtgtatttgatgactgaagaagattgtgcatctgtgtgcatctgtagaagatgagataggcattctgtttttgccaggagacatagtcttatttgaactggactatttgagataagtgctggtggtagagagg

SEQ ID NO: 335 - DNA, 2186 bp, Homo sapiens
tctgagccgcgagggcgccgacagccgggggcccggacgcagcccggctcctcccctcctccgccccttccccagcctgacctggcccgccgctgcagcggtgacccctcccccggctgccgccgctgccgccgccgccgcctcggccgaccagggacctgcccgcctgcggctgctccggacctagaggatcaagacataatgggagcatttttagacaagccaaagatggaaaagcataatgcccaggggcagggtaatgggttgcgatatgggctaagcagcatgcaaggctggcgtgttgaaatggaggatgcacatacggctgtgatcggtttgccaagtggacttgaatcgtggtcattctttgctgtgtatgatgggcatgctggttctcaggttgccaaatactgctgtgagcatttgttagatcacatcaccaataaccaggattttaaagggtctgcaggagcaccttctgtggaaaatgtaaagaatggaatcagaacaggttttctggagattgatgaacacatgagagttatgtcagagaagaaacatggtgcagatagaagtgggtcaacagctgtaggtgtcttaatttctccccaacatacttatttcattaactgtggagactcaagaggtttactttgtaggaacaggaaagttcatttcttcacacaagatcacaaaccaagtaatccgctggagaaagaacgaattcagaatgcaggtggctctgtaatgattcagcgtgtgaatggctctctggctgtatcgagggcccttggggattttgattacaaatgtgtccatggaaaaggtcctactgagcagcttgtctcaccagagcctgaagtccatgatattgaaagatctgaagaagatgatcagttcattatccttgcatgtgatggtatctgggatgttatgggaaatgaagagctctgtgattttgtaagatccagacttgaagtcactgatgaccttgagaaagtttgcaatgaagtagtcgacacctgtttgtataagggaagtcgagacaacatgagtgtgattttgatctgttttccaaatgcacccaaagtatcgccagaagcagtgaagaaggaggcagagttggacaagtacctggaatgcagagtagaagaaatcataaagaagcagggggaaggcgtccccgacttagtccatgtgatgcgcacattagcgagtgagaacatccccagcctcccaccagggggtgaattggcaagcaagaggaatgttattgaagccgtttacaatagactgaatccttacaaaaatgacgacactgactctacatcaacagatgatatgtggtaaaactgctcatctagccatggagtttaccttcacctccaaaggagagtacagctcaactttgttgaaacttttaacatccatcctcaactttaaggaaggggatatgacatgggtgagaatgattacatcagagaacttcagcagtacaacagctagcccagaactgatttttttttttttttttgtaaatttgagacttatgtaagcgtgatttcaaaccataattcgtgttgtaaatcagactccagcaatttttgttgtatgattttgtttttttgtaaagtgtaattgtccttgtacaaaatgctcatatttaattatgaactgctttaaatcactatcaaagttacaagaaatgtttggcttattgtgtgatgcaacagatatatagccctttcaagtcatgttgtgtttggacttggggttggaacagggagagcagcagccatgtcagctacacgctcaaatgtgcagatgattatggaaaataacctcaaaatcttacaaagctgaacatccaaggagttattgaaaactatcttaaatgttcttggtaggggagttggcattgttgataaagccagtcccttcatttaactgtctttcaggatgttccttcgttgtttccatgagtattgcaggtaataatacagtgtattcataagaatctcaatcttggggctaaatgccttgtttctttgcacctcttttcaagtccttacatttaattactaattgataagcagcagcttcctacatatagtaggaaactgccacatttttgctatcatgattggctgggcctgctgctgttcctagtaagatattctgaattc

SEQ ID NO: 336 - protein, 382 aa, Homo sapiens
MGAFLDKPKMEKHNAQGQGNGLRYGLSSMQGWRVEMEDAHTAVIGLPSGLESWSFFAVYDGHAGSQVAKYCCEHLLDHITNNQDFKGSAGAPSVENVKNGIRTGFLEIDEHMRVMSEKKHGADRSGSTAVGVLISPQHTYFINCGDSRGLLCRNRKVHFFTQDHKPSNPLEKERIQNAGGSVMIQRVNGSLAVSRALGDFDYKCVHGKGPTEQLVSPEPEVHDIERSEEDDQFIILACDGIWDVMGNEELCDFVRSRLEVTDDLEKVCNEVVDTCLYKGSRDNMSVILICFPNAPKVSPEAVKKEAELDKYLECRVEEIIKKQGEGVPDLVHVMRTLASENIPSLPPGGELASKRNVIEAVYNRLNPYKNDDTDSTSTDDMW

SEQ ID NO: 337 - DNA, 2344 bp, Homo sapiens
cggaacgggtggttggggaggggggggtggggggactctagacagctgaggcgcgaaagcgatgagtcctcggctcttcctcctccttctccgggacccgctctctgcctccctctccaacgcccggatgatctgagccgcgagggcgccgacagccgggggcccggacgcagcccggctcctcccctcctccgccccttccccagcctgacctggcccgccgctgcagcggtgacccctcccccggctgccgccgtcgccgccgcggtgaccccctccccggctgccgccgccgccgcctcggccgaccagggacctgcccgcctgcggctgctccggacctagaggatcaagacataatgggagcatttttagacaagccaaagatggaaaagcataatgcccaggggcagggtaatgggttgcgatatgggctaagcagcatgcaaggctggcgtgttgaaatggaggatgcacatacggctgtgatcggtttgccaagtggacttgaatcgtggtcattctttgctgtgtatgatgggcatgctggttctcaggttgccaaatactgctgtgagcatttgttagatcacatcaccaataaccaggattttaaagggtctgcaggagcaccttctgtggaaaatgtaaagaatggaatcagaacaggttttctggagattgatgaacacatgagagttatgtcagagaagaaacatggtgcagatagaagtgggtcaacagctgtaggtgtcttaatttctccccaacatacttatttcattaactgtggagactcaagaggtttactttgtaggaacaggaaagttcatttcttcacacaagatcacaaaccaagtaatccgctggagaaagaacgaattcagaatgcaggtggctctgtaatgattcagcgtgtgaatggctctctggctgtatcgagggcccttggggattttgattacaaatgtgtccatggaaaaggtcctactgagcagcttgtctcaccagagcctgaagtccatgatattgaaagatctgaagaagatgatcagttcattatccttgcatgtgatggtatctgggatgttatgggaaatgaagagctctgtgattttgtaagatccagacttgaagtcactgatgaccttgagaaagtttgcaatgaagtagtcgacacctgtttgtataagggaagtcgagacaacatgagtgtgattttgatctgttttccaaatgcacccaaagtatcgccagaagcagtgaagaaggaggcagagttggacaagtacctggaatgcagagtagaagaaatcataaagaagcagggggaaggcgtccccgacttagtccatgtgatgcgcacattagcgagtgagaacatccccagcctcccaccagggggtgaattggcaagcaagaggaatgttattgaagccgtttacaatagactgaatccttacaaaaatgacgacactgactctacatcaacagatgatatgtggtaaaactgctcatctagccatggagtttaccttcacctccaaaggagagtacagctcaactttgttgaaacttttaacatccatcctcaactttaaggaaggggatatgacatgggtgagaatgattacatcagagaacttcagcagtacaacagctagcccagaactgatttttttttttttttttgtaaatttgagacttatgtaagcgtgatttcaaaccataattcgtgttgtaaatcagactccagcaatttttgttgtatgattttgtttttttgtaaagtgtaattgtccttgtacaaaatgctcatatttaattatgaactgctttaaatcactatcaaagttacaagaaatgtttggcttattgtgtgatgcaacagatatatagccctttcaagtcatgttgtgtttggacttggggttggaacagggagagcagcagccatgtcagctacacgctcaaatgtgcagatgattatggaaaataacctcaaaatcttacaaagctgaacatccaaggagttattgaaaactatcttaaatgttcttggtaggggagttggcattgttgataaagccagtcccttcatttaactgtctttcaggatgttccttcgttgtttccatgagtattgcaggtaataatacagtgtattcataagaatctcaatcttggggctaaatgccttgtttctttgcacctcttttcaagtccttacatttaattactaattgataagcagcagcttcctacatatagtaggaaactgccacatttttgctatcatgattggctgggcctgctgctgttcctagtaagatattctgaattc

SEQ ID NO: 338 - protein, 382 aa, Homo sapiens; identical to SEQ ID NO: 336

SEQ ID NO: 339 - DNA, 215126 bp, Mus musculus
  misc_feature (1)...(215126): n = A,T,C or G
aaggaccatgttggcttcttaaacactgtctgagactccagttactgggtcatctaactcccccccccccccccaactctgaaagtgttgtcagaaatgcnnnnnnnnnnnnnnnnnnnnnnnnnnnnnnnnnnnnnnnnnnnnnnnnnnnnnnnnnnnnnnnnnnnnnnnnnnnnnnnnnnnnnnnnnnnnnnnnnnnnnnnnnnnnnnnnnnnnnnnnnnnnnnnnnnnnnnnnnnnnnntctgaaagtgttgtcagaaatgccctcggagcactctttaagacagcttcccatgttgtagtgaacccaattataaaattatgtcatttataattcgtaactataattttgctgctgttataaattgtaatgtaaatatctgatatgcagagtgtctgatatgtgacccctaagggagtcactacccacaaaaccctaaaggacaaaggcctctattctgaattttatctatttatttatgtttgttcagggttctttggttggtttttgtttgcttattttgtttttgtttttgttttttttttttagacaacatttcactacttagaccaggctagtcaggaactcctagagatccaactgcctctgcttcctgagtgctgggattaaaagcctgtgtcactatggccggctttgattattttagtgtgtgtgtgtgtgtgtgtgattctctggaggtgaagccattcagtgtggtactggaagcatgtggtcctctggaagtaggtacacttctctctggcaggtgttcttaactactgagccatccttcagctacccaagagagagttctaagggaggagactggagaagcagggatttggaagatttcaatgtagaagtatgtcttggccacttatatagactgttgttgctgttgttgttgctgctgctgctgctgttgttctcctcctcctcctcttcctcttgttcttcttcctcctcttccttctcctccttccatgacaaagatgattggggtctcaggcagggtttcaaggacaggagtccgttacaaattcttacaaactacaagctctgggaacagggatcagctgggttttcaaccaccaaacaaacaaacaaacaaacagtccatgtttcaccagagagaacacaggaaatgattaacatttaaaatgatcaaagctggtttgtgtgattttttttgttttgttttgttttgttttgttttttttttttttgtttttcaagacagggtttctctgtatagccctggctgtcctggaactcattttgtagaccaggctgacctcgaactcagaaatcctcctgcctcgaactcagaaatcctcctgcctctgcctcctgagtgctgggattaaaggcgtgcgccaccatgtccagccaattttagaaatttttatatgacctcaaaccctttattatactggtaaagttttcactatggaaaaaaatacaaaatagagataagaagagcccacagcaacagcaacactttataagttgctttctgcgtatcaggcactactccgagtgggcttcataacctctagagtggagaaggagcatgcagggcagtgagggttggtagggcatcaactcctgccgctaggatgggctgccttctgaatccactcatgacctgtgacaaccgctgttcacattcagggatacacccttccaaatttacagcaatccagcacttatacaagtcttctgccaaccaggattctggtcaactgaaccatttgttctgctgttttgttcactctgtatcaccaaagaagtaagatgttcagtatcgtaagcaaacaggtgcggctttatccaagagatgctctccccattcacactcaggtgactttgatggcgcaatcatctgaattgatgaaaagcattttgtgtattaaattttaccactataaatggtttaatcaaaggcgctctctctctctctctctctctctctctctctctctctctctctgtgttgtatctctgtgtgaagtttcttttaaatgacctaaaggtaattgtggaagaccttaataatccaagtatgatagcattatccagaatggaatgagtgaatatatggacagttacttaatggaccagagaaaaacccctgaagggtgagggtcccaggctggcattttcctttcccaagtttctcacataagtgacaccagctaataacttggttgatacttgtagttaataaccacttgacttgctaatggatcagaaccaaaccagacaaatgaatgggagaagctgaccatgggcagtattaataataggtttagagaaaaatgattactcttctaagctgtgctcccttgcttcttccttgaatgccttttttatgtgccaagaaaaaagtgctaaaagtgaagtcgtagagtaagttttaaattttaatccgaaataaggttcttgcctcacgtgacctggtttaatttccagttgttattattacacgtgaaggcaagaagtttggggtgactccatgcaattagtttcgactcccataaacagtttatctttttattgtatatgaaatgtgttttcttaattgacgaagctataatcaggcctttacgagtctgtttgttaacagactgtggtggtttgctaggagtgacacccaacctcggaggcaggcgatcctgactgtgacactctgatccgggcagattcagctgggtgagttannnnnnnnnnnnnnnnnnnnnnnnnnnnnnnnnnnnnnnnnnnnnnnnnnnnnnnnnnnnnnnnnnnnnnnnnnnnnnnnnnnnnnnnnnnnnnnnnnnnnnnnnnnnnnnnnnnnnnnnnnnnnnnnnnnnnnnnnnnnnnnnnnnnnnnnnnnnnnnnnnnnnnnnnnnnnnnnnnnnnnttctgtcctccgtctggggaacctgtcttacttgggttttaaggctcctcttcctgtgtcttcagaggacacatggccagtcgggcttttcctttatacaccctttccttctttcctctttcctcaggggctgtttgtcctaacagataccctagctggttgttgtgtcgggatcctgagctgacaaacctctctgatcttattgttctccccagtctctgttttgcctcagttcttcctctgaagaggttgaagcacttcctgtattctctgttcccttcagaggctttacagtgacactgtgggtctttctactcagtccctgtaatatgtgtatcacttttccatatgagacgggtgtcattcttctattctgagaaatcttagtttctgtgaagtatcgagcattctctgttcttttcggaacactcggaagtaggacatggcggcccctcctatttagatgttcctctgcatgcttagagatggagacggaacagaaccgcgttgacccctccctgcacgccactgtgtcctcctttgccttctactcagaaccagcagtactttcctaacatactaaggactggaatccctccagcatgggcttaggtatgcgtgctttaaaaaaagaaatgagccaaacccagcttaactgtgtattaactatgatcaaattcgtacaaatcttttgaccctggattcccttatttgtaaagcactgagtctaataaaacttgtactgttgtcatggggatcaaacaaacaaagtttatcaagcgtctcgttacaatggtggatgctcaatatattataatatggcagtcaatatcatggccaaagtgcaccctccatccagcaatggatcacgtggtttttgtgacttgtctatctccacaaccttttgagataagtaagtctattatttatttctaagcacagcaatctaacacccgtttttatttattttgcaatataacattttattatatgaatcttgtgtactttataacatatttaaatttaatagtctagttttaaatgttatttactctgttttttttgttgttaatgatatgtacttttaataactgcatagtagtcccttgagatgttactctaggatttacttacacatccacgtgttactagatgtttccagtgtaaggaccagctctgagtcctttgatgttcactgtcagattgctccccaaaggctgtgtgagacatagtaacaagaagtaagttttgacctggctgggacatttgctacatcctccaattctattttaaaagtggaatgaacattgcatgacatggtccttaagaaatcagaaaattggcagtgattcagtcaacccagtgcgctgatgatgatggtgatgatgatgatggtgatgatggtgatgatggagataatgatgtcccaaaaaatgtgctaggaatcacatacagagaagctcagttagtgtgtggctaagaggcactaggaaaaggtacttgtttacaaagtatcagtagcacagatttcaaagtgatggcacagatctgcccctatcattggttgctttattgcataacatacgtgtagtgagctgggaaggatgcagagacataaaggacttcttggtcatctgcctttcttctacaacaggcccagatctggataaaagctattcacaggtgaggcttgggctaacagatagccctcccccatggagaccttgggcctgtctaatgtctcctggaagtcactcatcttcctggattttggcttgaagatgctggtaaggaaatctttgctctgccagggctgctaagctgggaatctggagctgccagtggctttcttctctggttgtccagaaggagacagctcctggaggagaaaaccaggaaaacaatgagagaagaaaaaacctgccaagtggctcatgcctttaatctcagcactcaggaggcagaggcaagtggatcctgtgagtctgaggccagcctggtctacgtagagtccccggatagccatgtctacacagatccaccagaccttgccacacgagtgctgggattacagatctgtaccttcggctcccggtttctcctttttttcatcatcatttctttgttttgagacagccctggatgtctgaaagtttgagaccagcatggcgacattccaagctacacagagagaccctgtctaaaaatgtgggcaagagatgaagaaaaggggccgcatgtgacaaaaggggcagagagggtaagagagcatgtgagtgccctaggaaatagtttgactgatatcagaggtgacctggactttgcctgtggcatttttggggaatctaactatctcactgtcatgtgtgactttaatcagacagctttagcaagcagactaaaacacaaacatagatatttctctcaccctggagctggtgtctggctgtgttgctcaggctgaacttgaatttgggtttaggtcatccttttacctcagacttcccaggagctgggtctagaggcacagatgaccacatgagctcagctagatacttcttttaaagcagggcccatccctttattgctccagcattttcagggctgggtgccgcctctcctgtcttgccttgctacccactctctgagagcctctcccagtgttgcctccttttcttcagtgcacattctcctcgttctgaccaaaccttgtgtttttatgttacactctttacttcttcatttttcagctcaactcactctggatggtcacctactgccccaaagccttgtccactgctgaaaccacagggcgccttcgctctgtgcttatgtaacctcagcatcatctgacctagctgaacactcctcctgcctgaactctttatcctttggctgccacaatacctgtgcgcggcgccttcttggcctttctcttcctttcatgcttgcttctaggcatcactgcctccctctccacccacaaatgctagggtttctgagtagctctgtctttgttctttttatctcatgctgcaccgtctttgtctgtctgtcttccttccttccttccttccttccttccttccttcctttctttctttctttctttctttctttctttctttctttctttctttctttcttcctctcccacagcagagcttcgcccactattctggcttccattactatctgtataccttggctcctaaatttatgtctttagtccagactgtcccttggactgtcacaatcacctagccaattgccggatttcagatttccacttaaatgcatcaagcatccatcaaacccgacaggtttcaaatcgaactcttcgtctcctcccacaaatcttttctccagcgccgtctcggaactccttaacagctccccaatggacccagctgcttgagctgtattctgcaagtcatgctccatctttgccttcctcattccctcccttccatccagcctccaaacctgccagttttacctccttaacggttctcaaatcaacctatttctcttcatctctattaaccgcccggaaaatcccagttaacagcaaccttctcacaggaccctctccacccaggcgtcttcttttcaatagactggccacatggcccaagaaatatttttaaatccataaatctcaccctgccttggctctgcttaacagcttcctgggctgctgagattgctcataggaaatgtccatagcctttctcttgagtctcctccccagcctcagtctggcagtgtggctacctatgcagcattctcttacccacttgactttcatctttcctgtctccagctacccagtcttttctccagacaggtcaaactgtgctgcttcttcgagagtctgacccatccctgctgcctacctcttcagaggacatcatctatccacagggattacacgtgtcaggacccctggccctttcttttccaacacttgccacatgtgatgtttctgctggttgtttctaggtcctacaggagtatcagacacttggctgtcctgccgctgcccaccccagtgcctggtagggtgaatgtgaaatgtctggtgttccttcaaccccaaccccaggtcagctgtgtagctcctcttcatttggagatagtcttcttagagtgcagaagatgaacagcagccctcatggttcttttttttttccacatatttattttatgttatttttttagatattttctttatttacatttcaaatgctatcctgaaagttccctataccctgcccccgccctgctcccctacccacccactcccacttcttggccctggcattcccctgtactggggcatataaagtttgctagaccaaggggcctctcttcccaatgatggttgagtaggccatcttctgctacatatgcagctagagacatgagctctggggtactgattagttcatattgttgttccacctatagggttgcaaaccccttcagctcttgggtactttctctaactcctacattgggggccttgtgttccatcctatagatgactgtgagtatccacttctgtattttccaggcactggcaaagcctcacaggagacagccatatcagggtcctttcagcaaaatcttgctggtgtatagaatagtgtctgcgtttggtggctgattatgggatggacccctgggtggggcagtctctggatggtccattcttttgtctcagcaatacctctcctgggcatatacccagaagatgctccaacatgttaaggacacattctctactatgttcttagcagccttatttataatagccagaatctggaaagaacccagatgtccctcaacagaggaatggatacagaaaatgtggtacatttacacaatggagtactactcagctattaaaaacaatgaatttatgaaattcttgggcaaatggatgtatctggaggatatcatcctgagtgaggtaacccaatcacaaaagaagtcacttgatatgcactcactgataagtggatattagctcagaaacctagaatacccaagatacaacttccaaaacacaagaaaatcaagaaggaagaccaacgcgtggatacttcattcctccctagaatagggaataaaatatccacggaaggagttgcagagacaaagtttggagccctcgtggttcttaaggcgaaccggcagctctctggaggagccaggtccagctctttagggaagaagtcagagttgctttcacccagccgactctacctctacaaacgggttgctagcacactttggagagctctgcctgaactgaagtgaccctctacttccttgccccactctttcaggaagccttggtatttccaagagaggcccatccggccagcccattgttctccatctcatcctatagtgtgaagctgttactggtgaggtctcaactccctaatgagaaactgcccagaaccttctcagcaagccaaaccatgtgctagaaaggggacagacgaccaaccagcctgttcagtaagaacgagtatggtgagcgtccttaagcgtcttaagaatggcctggactttataggagacatattggttgcggctggccctcagggagcaagctttatggtagaatggattagaccaaaaggtgttcctaggagacaaaacctgtagaagtcacgagatgggtaaacttagggtctgcccactctgacaataacaacctagagtgtttgttcctagaagaggcagctgaaagccactgtgtgtcagggtggcgcatgtgaacactttgctgcccttataatgcaggactaggtggaccagcaaaccgcctcttgcggaggaagggacttattacatcttggccttgtcagtctccagcagaaccaatctttcctgctctttgtgcagtgacacacctctcccaggaaggagtacaggatttccatcattaccattgccctattaaaaaaatacgcaaacaaaacaactaattactctctgccgaaaaggcacataaacaggatgagtctaagctgaacctgggatgacccattccggtaaagattaggaaagggacctccccttccccacagaacacccgcctctggctagggctctgtcaccctccggcagggtctccaggccactacttagggtgggaggtaggaactccctgctgctgattttccgcatccacccgtcctgccaattctctccccggctgtctcccacgcctcaggtgtttgctggcggtgggcctggaatcctttctttttgtccagccccttagggcagcctccagcccgaaacgcaccgccaacccggccaccgggagcagggatccgcgagcactcagggcgggaaccgcccctggggtgagtggggagtgcgggcccccttcaccgcgtaaccccggcacccacccctcaaggcggtgctgcccgcggtgcgccacgcccccggggtccggaaggcgtggcagcccgcaccgggcttctgagaacttggagcccggcggcgcgcggctctggccgggatgcggctgcggttgctgctgctgctgctgcttcctggttctcagctcaccgagtgggggagagcgtgagcccgcggaggcgggggcaggaggaacgggcggaggcgggggcagagacgccaaagctggagctagccggacgggtcgctcctgctctccggggagactatctggccggccccggagaaggggcgagccccgcgcgctccagaaggacgatcgggagcccagcagcccgccgagggctcggagcccggctcccctcctttccacctcaggagaaagggcgggagggaaggaggggaggggnnnnnnnnnnnnnnnnnnnnnnnnnnnnnnnnnnnnnnnnnnnnnnnnnnnnnnnnnnnnnnnnnnnnnnnnnnnnnnnnnnnnnnnnnnnnnnnnggcgggagggaaggaggggaggggaagatccctccgaggaggcggaatggccggtcgcagggggctcgggcgctgcttcttcccagagctgcctccacgcccgtggcagcggagaggactgccctgagcccgggctccgggttccccagtgccagccagcgcggccccctcggggctccggcagcagcgccggcatgtcgtccggcacgatgaagttcaatggctatctgagggtccgcatcggagaggctgtagggctgcagcccacccgctggtccctgcggcactcgctcttcaaaaagggccaccagctgctggacccctacctgacggtgagcgtagaccaggtacgcgtgggccagaccagcacaaagcagaagaccaacaaacccacctacaacgaggagttctgcgccaatgtcaccgacggcggccacctggagctagccgtcttccacgagacgcccctgggttatgaccactttgtggccaactgcacgctgcagttccaggagctgttgcgcacggctggtacctcggacaccttcgagggctgggtaagtagcgatcgcctcactcctccatgtctgctggaccttccctccttttaattttcgaaactcgtcagagtcccgctccctcatcgccctgcaggggaaggaattccctctagacttcggtcctttcccaggtggcctgcactgttgacgcgacagccgtgggtgtatgcgggcgcaggtgggactctgggaatccgtcctctttgtggacctggactttgcacttaggggaagcccaatagtgatacagagttccatccccctcctcccggggtagggggtttgggaatcacaactctcatataaagaaaagcagagaaagggcgatatgaaagggatatggtttgaatcaagtgcttcaaacacttcttaggagaaagccatacattctcgcgagtattattcatagtgtttatggatgcatgttggttcagccacacagacgtgcacacgtgtttcagcatgcacatccattacatcccagaggtacaaaagctacactggcagggatcagagtgagtgcatggctttgcaccctggcagagttttgtttagcttttcccttggggattgggggcgagggtggaggcgggagtggtggggtgagaggtttaaaacttctctgtttgctcttaagttcagtcagcctgggtgtatgggtgcttccaaactattcctctgagaagaggtggccaagacaccttaggtttgggtctcctccctctgcgttgacctttagctgcccgcaacttcttatatgctgctgccattcccatagttccctggagatagaatttttactgtaaatttctcgagtgcctcacacagcgccagaacgcccatatgtcttaatcctcacgctgtctttgtgatgccggggttattgtgctcactctgagacactgaaatgataattacaacgaagtggtctggcaaagtgtagtgtgtggtaaagactctagagtttaataatggtctcagttctggcaggagtgggcttggaacccgaggtgaatcgctattcagaatctgtttgaaattcacaagtggcagaaccagatggacagtgacaaagattcatggatatatgtattttatactttgaagtgttgttaatttcaccatatattctgaaatagtacagaaggcttgtaaaaattcaccttttaaatagaaattaaaaaaaaaaaaccaaacccatgactcaaattatggggttaatttcaccttggcctttcttcttcttcttcttcttcttcttcttcttcttcttcttcttcttcttcttcttcttcttcttcttcttcttcttctccttctttggaatttagtaatgggctagatggaaactgattaaataaagttaaaagttaactttgttgttggtttgagacagagtctcacacagtagcccaggctgacttgatcttgggacaaaccttttacctcagtttccctgaataagtttacatgtctgtctgtgaatttccagacatggaattgaactgagcaagtgaattctgagttagtgtttggttaggagttaggctgggcaaatctctagaggaattaggtactggagtgtggtggtacaggatggtcatcagccatgataaacatgtcctgctggagacagtctagattagcttgaagatttgaattccgtgggagcttttaaacacctctacttttaaataaactagagaggagcctctgggcgtgggcctccagcatcagtacttagagacttcctagctgacagaaaaaagttaggtttgagaacatgagcataaaggaagacctagacgtgaggctatgataaaagagagctatgagtagggttagctaggcagggcatggagctgtttattgttgcaggagatgaatgaagatttaaatgggaactaaagttcaaagatctatattgcttaacattctgcctagatgttaatggggcccactaggggcattttgggaaatttaatggtagaataggaccagcatttaaatgatgccggtgattcctcatgaatttgtatattcatttagatggtatgtatgtctgtcagtgtgtgtgtgtgtgtgtgtgtgtgtgtgtgtggctgtgttttgaaaccgaggatagtatgactagaatgttttcttgttaagaatactcttcaaaattatcttttacagactgtagaaatgcatttgtgtatcaaattcaaatgcataatttgttcacagttcaagtggaagagtaaagattattctggttgtagtggaactacaaattgctgacctaaaaaaaaaaaaaaatccagcaactgctggagcctaagaaagggatgtaaccatgagttcattataaagcagcctttttattctcattagaatagactctgaacctctctatgcttcattgccccagatactttccaagtatgaagatggtaaccagttattctggatttaatatgagtttgttggtgttctgtggtgggagaaaggcaaagagctattttagcaaaatgtatatctggtgccaaatccagcatcttacatttttattaattgtacacccactttattcagtatatacaagataaatgaatgggatgcaggtaaattttttttctttaatggaaacggatcataccagacaccgaaattggtaagacctcaagttgaagatttgtgttttcaccttgaacctgaagagcaaatggagccaagaataaggacgtttgtaaagataccagaacttggccaagtagacaacaggaactccacacaaacgaaaagccaagtctttccatttttcaattgataagcctcaaaacttgaatgccggtcataagagggaactcgatgcaggttacctacgcttgtaataagagcgagaatagggctgtaaagcctacctacagtacaaaggggatgcgggtgtgttacaaacgatgttatgccagtgagctctgtgtctcagacaaaatgcacacatagctcgaaaagacagaagctgcccaattctcctcaagtaacttaagtagttttatgatcgttaaactaattgagtttatagttagaagtcttcaccaatacaactcactgtcccagatggctttagtgatgacttatatacttaaaagatgagttattacttgctttgcacagattctttcagaaaatagaaggcaacgaaacagattacttcattatttaaaataataccaaaacacaacaaagatattacaaagcatgacaaaaatacctgtaggcaggtatcatccttcatgatgtaaaaagctttgaattttagtcagttaaatacaacaccctagcaagtggagagtatcccataaccaagtgagggctgtatccgggactctaaggcagatttaatgtttgtagagctgctagcgcacacttcttgtggatagggtcaaaataaaggcttctatgaccacctcaatagataaatcaaaagcatttgagaaaatgaacaatccacccaggataaagtttctgagcaagctggaaacagagagaatcttcttagcgtagaggccgtctatgctaatctgcaggaacatcttggtgacagagtgagtgatactctgctgtgatcaggcacaaggcaaacgtgctgctccctctacttccacactgtccaagagtgcaataaggaagtttcaggaaacaaaatgctcgtagaccatagaagaagaagaagtaaaaccatctttacagaaaaaaaaggaagaccaacaatcaagtttagctggtttgcaggatccaaactaatatctagtgtacaaaaatcaactgcgtttctaaatcattagcagtgaactattgaaaacggaaattatttttaatatatcacttgtaagaaaattgaagatgaaattggatgaattagacaaaatagatgtgagacttttccagtggaagtgataaaaacattgctgaaatacagagccaaggaaatggagactatgatgtattcatggctggaaggattttgaattattaagaaccctgctcttccaaaatattcagtagatttagcaccgtctcagccaggatttcaggaaggttcagaagtcatagaaactgacagacagatactaattatatagagatagagacaaaggacctatattggtctgagaattagttttaaaaagagcacatagaaggatgcgcactatctgattttagaggttattgtagtgttactgtaggccagtggaacagaagaatccagaaacggatctgcacatgaaccatcagttagattttaacgaaagagcccagaagttagttcggtgggggaacatgtccgtcttctcaacaagtggccgggctgtgtagccctgtggagaagcggaggctttggcttctacgccacaccatgcacaaagttaattcgaaatgcaagaagaaactgtaagatttctgtaagaaattatagcagaaaatcgtaataattttgagctcggccaataaataaataaataataaaggaaaaaaacagctatcccaaagcccatattattaggattgagctttttcagatttaaaaattacttgttttttttaaaaaagatttatttattactatatgtaagtacattgtagctgttgattacagatggttgtgagccaccatgtggttgctgggatttgaactcaggaccttcggaggagcagtcagtgttcttaactgctgagccatctcactagccttaaaaattacttcttaaaagatgtccagcattatgaaaacacaagccaatgtctaagagcagataactgcataatgtaaattaggcagagtgctggcaacacaaataaataaaataactctaaaatcgcaacagtaatgagaaaacaccctatttgtgcaatttaaaagctggtcatagcatttgaataaaatccctttatggtaaatagcatattatggtaaataccataatcctaatcactaaggaaatacagattaaaaacaaaatcactgtattccccttggaaaggccagagtcagtgccctgcccgtcccaagtgcaggataggaagggtgcagctgtagctgtcccacacagccgttaggaaagccaagtgctgcagtccgcttggaaaacggaacatgtgcttattgtatgatttatctacccgtgtgtttaccaagagagatcgaaccattcacaatgcgacctgcgcaagagcatccacagtggtttcatctgtgacagcttccaatccggaaactcgtgtgcaacaaacaggaatatgtaaataaatggagttgtagccataccagtcagaacacgtgaattagtgatgcatgcagcaatgtgggtaaatctcaagggaaatctgccctgtgcgttggccacagctatgtggccctacccccaaagggcattattgtaggattcaatttatgcaaagttctggaaaatgaaattaagccttggtgacaagaagcacatttgtgggtgtctgggagtgagggatagatagaacgtaatggaggctcaggggcattctggggacaggtgaattatttattatttttacagcgatgatgggctcacagtgacacgccaagggctcaccaaggccttcactttatagacgtgcctcacgttacatttcagtcatgcttcaagaagactgtagaaaaacagtcaaggtttatcatctttattttgctgaaagtgtaaaatgagtgctaacgatgacagatttgagctggcaccctctctgggaagcagcattgctccctcagagcaggatcctagaaaaccaaaaccccataaagaagtgtattaagttaatttttggacactttcattgtccagattatcattcttttttctgcttcttctggagcttgtttgttttgtataatttcttggactccagaatattcagagttcgctgaaggcactgttttccacccccgccccacgcatgtctcccagatcaacccagccaatcagtgagttccagcctcagtgagagactatctgagnnnnnnnnnnnnnnnnnnnnccccccgccccctgttccccccaccccccgtggtatttgcccttgttttctgactcctctggtgtctaaaacttgaggctgggtgtagaggacatgaaggaggcaagaggagcggggaggctgcgtcatggaaagaccttggcgcccctcaggaaggaaggacctgcttggcgggatcccaggctcttttcctgttcaacctcccgaagacattccgttctgtgtggccctgcagagcagctctctcagtttctcttctgagatacccctttgatagtcctgtcaggtggagctgcctggtgccctgtgggcagccagtgactgtctcttgacctgattgctggacacaagggcatgagattttttttttacaccaaatttcttctgtattttctatcacttggcttctttcttctcttttgtactttgtaatggttattaattctcatgattggtttttgttccccctgagggaacaaaggagcgtctagcattgactagcttgcagtgttttacgggaatatgatttagactctctagggaggtctggtccgacgtctgaatgagctctctagtccttccgtttcattgggagatggcttttgctctgggagggctggttgctttgtcatgtaggttatggctgggatggatagctgcctccacagatgcatccttcccacctctgctcttatcactctctgcgatcactttgctaatcaacttctttattatacctctcctatgttttcagtgttggcgattgaacccagggccttcacccatgctagccagtctctcccgtcactgggctacactgctagccctcacatctcccttctgtagtgtgtaaggtcttggggaacagggtactcttctgaccccagcactgtgaacagtctgtggtatgtgacaccagatgtctgttaaaacaaacaaacaaacaaacaaccccaacaaataaataagagaaagaagttttatgtgatgttggggcaaataaagtgtatgtatttggagaatatctttttctttaaacctttcattcatcttctaagccagtcagtgttgcatctgttgatcagtggcatacccacgtgaccttgaaagattggcttggatgtttatgtccattaaatatattagtagatggaaaatgctctgtgtggtgggcttgttggttttctggggcaggaggtcccaaccacccctgggcaggtgcttgtgggttgtataaaacatagataggccaacagagttcctccatggcctctgcctcagttcctgcctccagattcctgccttgagttttcctcaataaaggactgtgacctgccagacgaaatgaatcctttgttcctcaggttgcttttagtcatggtctttatcacagcaatagcaagcaaactaacatagatgcaacatccctggctttatccattctaaaagtctatgggttttgtattggtagtatctggtaattcccttcagttgaaatttttgagccctgggttatgtctggaggcataagcaagagctgcatgggaggagtctgaatcatctcgccttgtgcagtgtggttatctgagagcatctgaaaaggtaccttgtggaggcagaagtggacgaatttttaggaggtgagtagcaagcagttagggagggaagtccctgaagtctttcttctacagttttttttttctattttatgcaacagctggctatcgcatatctcattgtgtatcgatggctaagttctcttttattaggatgtaataaaagatcgagcctgcgtagtgactgctttctactcttactgctgtaacacccagagtggcctttctcagttgccacccagaaaccacaagctcctcctcggtttctcgggcctgatcagagaaacccacaatttctagttcagttcggggtgttctcctttgttttgctgctggtttcctcttgagacatctgtctccccgcactctagcccacacgctgcagagtgagaaccttccagttcccccacagacccaagcatagtgctcattcctacctacaggcttcctgacagacgatagccagccaagagaaccttctctgacctgtccagttctgctttgctgctccttccatccctcttggccacaacgtctctaacctgaaggaatggagtgtgaatggcttgtctctcacagacatctgggaaactggtctgtggcagttcagagtatacggcagccaagtgactaagcctcttctttttcggtctagaggtagctggtgtaatagacacatctctatctgaaatgcccagctaagcatgcccaccgtggaagagtgagctatggaccaggcttgatgttgtgtacccttgagagtccgtgggtgaaacagacgcagcctgttcctttgtaggtctcatagttccagtgaggagataaattggggatggaaaacccataaacaacactagccaggaaattacagcatggaggccggtcgtcaggtattggtaagcaactggtttgggggaaatacagacattttcctggagagaagaggagctgatttataatgctcttgcatagataaccgtgggtgacctgctttgcttaaatgacggaaagatccctcctcaagaggaacaggaacttctgacctgatgatgctctccaggagacatcacaggtgaaaggccttcctgcgtctctgagctccctgcccccagacgctttggaaactatggcaaggaattatgttttgatatctgtaaatagcctgcgaatatttgtgacttccacgggcagaaagcagttaactctgtgtttgactcacacagcacctcaagttctgtatcttcttgaaccaggagccagttagtgttgtgacactccagtttgccacggtctccaccgctccctgttacacaagcagaccctttgactcagggccttctcaaccctgggaggagggtcggagctggtgacaccatagcctataccttcattttcaggatgtgggaactaaaattccagcccaagcagtattgtcactgtgctcacaggaagtgtcacacacacacacacacacacacacacacacacacacacgagcacatttaaggtctgtatactgagcctttaatcctagcactcgggaggcagaggcagaggcaggcagatttctgagtttgaggccagtctgatctacaaagtgagttccaggacagttagggctacatagagaaaccctgtctcgaaaaaccaaaactaaaaaaaaaaaatctgtacactgtgtatacatataagatatccattaatttataaatatactaatcgatctttgtctggattccagattagatctgtagtgtcctacgcagagaagcagatgtctcagtaattatgttggggacttaacttttactggaaattagtattgtatgacctattagtattgtatgacctatcccattagaagaagaccctttagatcttcttttattatagtgttgaggtttggacccagcacttgcatatattaggtaagccccgctttgctttgtagatcacagcttacatcgtatgtgaggactgtgttgtcaggagaacgggtgactttgtcccctatcagctgggatctcaggcaaatctccacttatcagagtttcagctttctggcctttatcccggaagtattgcagcaggatatccctaaggacccttccatctatctgtatagcctctgcctccatcctgtaggcgactctatatgtcatttcctgctttaggcgaccgtcatttcctccctttgggagtagctgggttggtaaagcagtcagtgtgagttatgtctcattagagttagtgactcctacgaattgaattggccccaaatctaaattgctcaggctaggagaggattgagcctgtgtccaaatgacttgtccggcatcaacaggaatgttggcgttatttccttggcttaaaaaatcaaatcagactgaagtaattatgatgaagcctcatttcaagccaggtggttgtagttcttaatttacactaatgcacttctcatcctattgggcagttctaagttatgcccctcttacctcatgccagagagagagagagagagagagaaagagagagagagagagagagagagagagagagagagagagagagagagagagagagagagtagcccactgtttaagcttttgatagattctcattagcagggtaattaaagctttgtagtcttgaagtgtctgtagccaccagtttatatctccaccctaggtggtgacaacacagtaaatcacttgcaggacagatgttttaattagatggaggagggagcccaagggtactggccatcatagccctgaaaggctgtgctggagaatcttgtaaagcaggaggttttgctgagtaccatccaaaaggttccggcacagttaggatgccagtctgctcctgtaggacccagtgaatcagagccctgaccatcaaggcaccagggtagagtgtggtagaaagacccccacaggccactcatcagaggcacgtttactgtttgctgccttcttggaaaggtcctttggttttccattttacccatgtacacattcgacctcacaggtagaggaatacttaatgagttagcagtggtgtttggtttgttcttgaagaaatttgccagagcacagagccacagtcaacacgagcccctcataattgcattaataagccaaggccagtgtgagccaaggccagtgtgagcatgttctatctggccctgtgaacctgatttcagacctaggcttcattctctgcacaagctaaaaccacaggctgcattttcattttttttttaaagtcatatttacccagtgtgcaggcacagcaccacttctgcgtgtctgcagcacttacctgtggtatgatgtggcctctgattccaagtcatgtatgtgttagcattctaaatggagatgcattcatttattcatcagctatgagtctcctggacctgttgacatgattgtctgtgtttcatggtggctggaattgttgagagcaggcttcaggtgaagcagacggctcagaaaccatttcagtgtaccgactggtaagaactatggacctgtttctagaaaaatatgcatgtggtttttttttttctgaccatattctgggattagtggtcccctgactcctgactttggataatacagagtgtcaggtaaaaaagccaacttgaaacatactgaagctcaggcttttgttaatcctaacaactcacacagcaatggttttagtctttgtcccttgtgttggaagacacctttcctcccgttaatcttaggagacacttggccagttacaaacagagagaagctatgcattttaagatggtgttttaaaagctctgtttttttgtttttgtttttttcttagttctggctcctggtggaatatagtagatcctggcttgctttaggaccatttggtcatgttatttaggtatgttcaaaagcctctgtatttgaatgggagctttgaggtttgcagcagacaaaaagaaagaaaaaaacaaaactaggccccattgagtgaccttggtttggtatcttctgaagatctaaactttcccctgtgagatggaatagggtttgtctgttcccctagctagtaggggataacatgagaatctggccatctgcactttaggccaacatttttcccctattgcaccccgatctggggtagtgtaaatgcccagtcactcacaggtatttgtccggcactactgtgtgcccaggtgtgttctagaggagcccatgtagtagcatctatataacctagaactgcaacctcacagagctctcgccttcacagagagatcaataaaagaaagaatgaggaagggaactcagttggcagaagcttatctagcaagcaagtagccccagattggatgccaaacacaggtataaactgggtatggtggtgcatgcctgtgatgccagtccttaggaagtagaggcggaggggctgggaattcaaagtcatcttcagctgtatagcaaatacaaggccagtctgggctacaggagacggtgtgtccaaaaacaaacaaacaaacaaacaaacaaacaaacaaaacaaagcaataaactcaaaccttaaaaggcaagaaagcaagtgacgaagagaatataacaaactgtacagagatttgtaatgagattaaaacaggatggtattaagcaagcgagtcaaagctgctttgtccagaattgcagaggagtgtacagagaaggtggcatctcagtcaagtgataagaaacacacagctgcgtgaaggttgcagcaaggtgctcaggcagagacagagcagcctggtgtgtgggacccaggtcaggatggtgggaagagaggggaatgggagccagccagctcagggctaccatctcaacactggcaagtaacaagtcccttccatctctgggggaccaatcaggctcagatgtcacgtcataccttaaacctggccagcacacagtaggccctcaagaaagaataactgcggatgctttgttgacagtgacattcagagaagaatcacactggccaacaaaagtcactcagaagattgggtttagggcaccagtgcttcaaggtggccatgggaaagtttctcagggcgggggaggggcagccttgtggttgctcctcagatgacatcagagaaacttctgcttatcacacccgaggatctgcttttgtctgccagcttcaggcccatgattgctggctgaaggcctagagcggtggcggtggcagagcgagaaaccagagtctgaactgtgttttagctttcacagttcctcacttgtttctgtaaactcatgagtattaagggaaggctttaataatttaaagggatggggcacttgtattgcagtggcgctgttggtagggtgctcaggtggttgttttaaatcaaaatataaacttataggtgaaaatgaaccaactgacataaataagattcttagtaagaaaactatatacagtttatttttgcttactttgggaaattcacttacttggttggttatagttttatgagttagttcttgacaattttaaatagtttcagataaggctgattttgcaataattttccctttatgtttctgacaccctccccacccccgaacattcctttagcctgtgccgagtataaaaaggcacctgagcacttgcctaagtctcacaatttggcgtgcagagtgtgcagttgtggactaataacacacatgcagcttcaaggggtcaatcagagagctgccttccgtaccatgttcattatagtgtgacggttggatttcagcaagatgctaggtccactcttagttctgcctcctgttagcagagctgcctaactcctgcaagttagtctgcctgtctgtccatctgtctgcccatttgttcatcattcttcctttctttttcttgatgtgtttttttttttttgtctctatgtttgtatgtggtgtatgtgtgtgtgtttttgtatatatctgtatatatgtggtgtttgtatgtatatgtgtgtatgtggtgtgtatgtatgtgtgtgtgtgtgtgcatgcatgtgtgggcctttctgtagagaagaggccaaaatttaatatctctctctctctctctctctctctctctctcttctcagatagtctctcactgaggctggaactcactgattggctgggttgatctgggagatatggagccttcaatttctggcccccagcccttgaattatatgtgcactgccacaccccagccttttttttacctgtgtgctggatccacactcagcccctcatgtttgcatctatggccggaaccttcccactgagccctctccccagcccccaacctcagctttctatccctatcagtacctacttcacagggtcgtggagcattcaggatggacttatgtaaaccattgttgcagttatagacaccaacatagaaaacaaagcttattgttaaagccacagccatggctaccccagcatcctcagtgcttgcatataaagctaagggcgaggtcctttccccaaggtgatgctagggcattatttacacaaaattttagagttagaaggaaagtttgagtgcagcgcttttcttttgcttagctacttgtagctgcccctagctagaaagctgagttcctagggatttggtgtaaattctgcacaactgtccacttagagatctttcaaggaagatcggaaaacaaagtttccatggtatacatagctacaaagctggccaaagtgagttgatggaaagttgtcagcaggatcttttggtttaattatttggtagtggactttcgaaggctcagagttagcgcaaaatcaacaaaccaggaagaaataaaattacaatgtttcgctgaagactgaaggggtcctttgaaaagctgacctgaacattttattgttgcaactaaggggtaaacagcccctcccaattgacaataaaagatgtttctgttgattcaggcctgaagtctaattaatatttattgagttgcattgttcagccacgctttcaaggagggaaactccaatttaaaaaatggaccatttgcatgtgggtttatggatgaaatcaagggcgccaagagttctgattgggttctcagaaaacttgaaatgcttttagccctcattccgaataggattatctgtacttttgtctgctgtctggacacttgttttggttcttccgggcttcagttggctttacattagcattttctgagctgtcttcctttaaaatttcagaacaaaagtccatttgctccccagtcctgcacagtaaggtttgcactgggttggagttgctcagaagtctccaccagtggagcttgtgttgtttgagttcctgctgggcctcttctctttgtcatgcaggccctgtacctggatggtggatatattgatttgctgtggcgctgctggggcagatgtctgcagtgaatgagaatgtgtgtatggctctttgccctggctttgatgatgaccttgctattttcagccccaagccgtgttctctgtgccaatgctgggaccctcaggctcatctccgcatctggtgaagtgcctgcccttatgtggtaaggtttttgcagagagttgtagagggaagaaattcttcacggctctcagttcttgagtcagaatggggacttaagcaccattgatttgaccctgagagctgaaaggtttcctttagagatgtatctttctgatggagatagcagtacatttgggggtgggtgggacatgtgtgaggtcccagaggaatagttcatggagaatgattccgggatggattttgttcccttggctgtgtaaataagtgcaaggaatcacttgccaaactcctggtcctccaataaaaacttaataacttagtttgggtgataggctgtagatttcaaatgaggacaagttgagaggctaagccgtgtccactgcatcagatgtccagaatgttctaagaggcctcgtgagaacaggcacctgtgagaggaacagagtccacagaggtacagctgtgaagggatggctgccatttaactcattgtccccgagctacccctttctcaggagatagcctgatgttgctgcctcggtcctctggtttgcagttcccttcagatctgaggttttcaggggtcacttttgaatccatttgttataatttggctctgtaggacttatgcctataacattttgacttttattaatttttcatagtcttcttttaggcagagtcctgctctatagcactggctgtcccagtactgattatgtgacttccagacttgcctcacatttacagccagtgccctgtcttagcctcccgtgtgctgggagcacagccgtacctcactccttgtggctcacaattttgttttaaattagaaaagaataatgatcctggaaagtcatttctgtaaagatatcacacggcccttttcatcagtattctttctgttgtcactgtttaaaattttttaaaacttacagtcatgtatttattttctatgtgtgtgttggtcacatgtagagccctgtgtgtcactgcagatgacagctcgtgggaatccattctctccttccatcctatgggtctcaggtattgaatccaggttgttaggcctggtggcaggtgtccttacccactgagaattgtaaccagtagccctccgacatagttttgaagagctctatgtcagtggagatcatgttgaaaggaagaaaccatcccagggaactgataatcacttcagtcttccccaatttcaagctccttgcctaccagtgagctctcctcaggcttaggcaggacttttcacgtcctgacctttctcttgcctaggcaggccgccgttcaggaaggtcctaggttacagctagagtcaacatagggggaaatgtgttagttccctagctctcaaatacattctccagtgttctgagaagtctggtgtccgcagagtgagcaccttcacagacctgcagactgtcctctgctgtggccctgatttcagatgctgccagtcctggggtgggccaccttcctccatgctgctttgtgagatctctcctctttctggactgagccttccctcttccgtcatctgaaacatccccaggcctcccaagtagcctccctggctttagctgaccaggcgacccagccctgtctagacctggcttgttgtctttctgatgtaggcaacggtgtctctccacctttttcccaaagagaaactacttttaaggagccttctctccagtccattcccacaggactcagccttcctgaagccgaggcacaaggtcttggctccagctgaacccaggggcacccatggtgtcccataggttgcttgttactgatctgggtggctacttctttctcttttgggctctttgggttctgtgtttcttcagtgcttactgagggatgtttttctctttatttcttttgtacctcttccaccatgcatcagacatcacactccagatggcgttaccttcttgtatactcttcactgtattgttcttgtgccaggggctcaaaagccccacgtcccatctttcctgctgactgtgacctctgcttcaagcaataggcagattcaaagagggcaaagggctttctactctgtctcctttggccttccccctcccacagcaggattaggaagaggggaaaactatggcacacaccttttccacctgaggcacgtgcaagagcggaccacttgagggtctaatgtgcttctgcacacgaccacttgggcatcctctacacatctccaagccaacaagttcacaattaaacactcacttacatctcatgatcaccctgctcctctgcccatttcctgtcagagctcaccatcattccggtcagccgggtaccattgtgtctgtttccttccgtctgcccccaagttcatttattgtcggattctgatgaattggattgcaaatggtttgctgtgtgatttttcccctttccatcagcatcatcccttttggtattcttatcacctgtatggattattgagatagctgtagagctttcttcacaaaatagacttattgtctcagatgaatcctcagggccgccccaaggagcttcctaagactcaacactaacagcttttctgctggagggcttctaaatgaatcctgttcccttcctcaggctgctggggaagatcctcacaggctggctccgaccatgtctcttcctcctcgtgcttgcctggcttccaagttcatacatggatgagcttttcctgttcctccttctgctcatgtttcagttgcttcgtcattagtaactgttggaggaggagggagaggacttgggtaataatgtctgatggagtgaaggagggtctgtagaagaaatgtccctgtctgtgtaacacccacaaacaggcctgagcacacacatctcaacacgtgctttaggctttcctatgacaggagaacagatcaggtgctctttggaggttgttgtcctgtggttggagggcagaaccactcatgatgtcatcagagatgactgagttcaggatagaagtgtcagtagggaactagagagttgtacctctgagtatgcagcgggcacgtcttgtaggaagtgggtcccggagtcagtctccagggtaggtcggtgttaaccatgctgaaggtgatgtgcacgccttctctcctcttcatcttgaggatctaaatttgtcacctggagtttcccctgttcctgtctttcttttcaccaggcagatactagctgagtgctttcagcaagtaaatgtgcctaggtcagactgttggtggaaactggcttcctgatgaaggcagatgtttaagcccctgacaccgctgccccacagactgtgctgaaggaatgtcagttggattggacaccttgaagggagccatgagaaagggttcttttccttccctggagttggcagaagtctctgtgatagttgggagacatgtgggtacccttgtgggaatatccttgtaaaaaccctgatacctatctctgtggtccagctctggtactttatgggatgggcagagagagttctaggtatccatttgttgtgaactgcactgccaaactgatttgcaagagaaggccctgcttacaataagctactaattcagtgcacagagaaagatggtggatcacattttaagaatcatatggtactctccttattcataaggatgttgatggttgtggtttgtcattttctagcgttagatacggctgggagaggtacccttgatgatgagttgatcagtaagcaccgctctagaggtctgaagatgccagaatgtgtcccacctatcttcgggctttatctctcagttaatgagagattttctttttatctctgcctaagggcagtcaatgtttgacttagttggaatccgacttactggctccagacccgtctttccactgggcttcattaccccctactgttggggcgaactagcctttgtgttttttttttcaaagacccgacttgatcagaagcatcgcactgtaagtgtttccacaggaactctgccctttgtctgtgtcactgtggtggctgtgcacagaacccacagggcggaggtgtcaccatccccgttgaaaatgcaacagttctttccatccctcggtgtgaattttccagtggcttctgggaccactgtggtgtcttgaaccccagggtttacacgagaactgataacgagcaatccttactggttcgttgaaagttggcatctggaaagatggcttcatgtttcccgctcagtgaatataaacggcacataaggcactgaagcctgtggtatcatcttcaacccagccagggatcgttagctatggagaaggtgattttttgtccctgtttctttggggatcagacattgttctcagtgagttttttatttccctcttatcctctttatatacacttgctgccttcacgaggtggcctggattctagtcaaccctttgttgtggtggtggtggttgttattttctggtaggttctctcatgtgcagactggcctacaacttgttatcatcctgtctcagcctcccagctgatggcactgcaggccggaggctctgtgcctggatttcctatttatcaataactgaggtgaagcacttgccacgaggacctggtttgggggttgattaatcaaaggtctggcttggagcctagagtaactgccaagagaaggtgcttaatgcaacttcaattaagaaatgaacgagtctcaaacaaatgtaacccaagcaagagagcaggtctttctatggctaagtttgtggggtaatggagcctgtgttggtctggtaaacttgacacgggtacatctagaaaggaggagacctcagtttagaaaatgcctctatcagattgtctgtggacaagtctgtggggacattttcttgattaatgattggtgtgggagggcccaggcttctggagagcagacctgttcctttcaggccacaaagcctgctgtgggaccatctgattagctgtagatacatctgggacagctggcaggtctgtttagtataggtttgtttgtgaatgaaatggataggtggtcctgggttgaataaaaaacaagttgaacaagcagggaagcaagccagtgaagtgttcctccagttctgcctctaggctcctgccttagttcctgcactgacttccctcagtgaccgactgacagggaagcatcagatgggacacaccggtccctccctcagttgtttttgtcagggggtttaccacagcaggaagaaccaaacgaggacaatgaccaacaaatatgacattggacaggacagaggagacttaccagttgatcctctcaaacaatgaagggattaaactgttaggaaaagagtttcatttgttcttgggctaagctaacaggcggagtagagactgcagggtggataacaggtttcttcctacccttgccttacgtcaaacttaatgcgagaagtaaaaatctcgcttttggtcactaggcaatattttgagtaatgttttgttatagaacatcccatgacacactgcaaaaatgtaaaaaaatttgtgtggaagcataaatatgtgtacagagaagagttttgtctataacttgatcaagctggaatgggtagaattgtctttaacaccaagaaactcatctgggatattcagaacaaatgctttctaggtgtgagtcttgtgtaagaaagtgtagttggggcggttggcttttctgaggtccagaaccttgatgggcagttgttaagtgtgcgtgtgccctgtgctcccagaacctggatattataccaaacaggttttgcatgctgtagtgcatgctctgttggatgttgatttctagtggtgttttctagcaagctccacccctatcctgaaatggtgaacatgccactccaataccgtggaacctgtaattgaagggtggtgacttgggtgctcaagatagaagggcaacagcttgatctcacacgggcagtgagctggctgatcctaagttctcttggtgctaagagatctaatgacatccacagccactgccacagttactgtgtgtgaggctggatatgtagcaagatacagaaataaatgtcacctagtgtgaccaagcccattggaagcaggatgagatttaagctagatgatacctggtacttttttcagccatgttggtacagaaggcaggcttgaggttcactgtgcggcatgtgttcccatgaaaggaccctgaccactggcgtgacatactgaaaacagattttagcgacaaatttaatctcccctgactattccatccccactctctcccccttcatttgttcaagtacttaatgattgtgataatttaagagacaaaaagcaaatgagtgtcatggagtgtgtgcttggtggctgtctgtgagcagatctgttcctttcaggccaccgagtctgctgtgggaccatcccatagctgtaggtacagctggggcagctggtgggtctgcatagcatgggcttgtgaatgagatggctaggatggtcacaggctacaacccctgacctgatttgctggcctttgctgggttgagtcttctttctcccaaggcctgcttgcgtggccgtctgcttttcctaggcccagatcgctagctgtacaaactgaaggaaccttggtggtcgtgcaggactaagttgttttaaatataggatagctctgagctcacggcggggggagtggctgaggctagactcccgtgtgtccagccccacaggctggtttctcagtttccgacttcaggggccttatgaagagggcttctttctatttctgtcaccagagaagctcctttgctcatgtgccctcagttcccgtttctattctgtttcctaactaatcatttccctctgtccactatttctagggtagcatgtgctgcattattcacacagaaatggcctcccttcaaacatccgtccaggagtcttgttcagtgacagtcccctgggggggaggggggctgtctgtgacttttcctaagtcgcttataggcatctccacagccatgttgtacttggtttgtctgggctgtgtacgcttagactgagatgagaaagaagtgcatcattgtagcctttctcggtgcagaaagcacacctttcagtacttgggtaaggacaagccacagattaatggaccagggtggagagatcactgcaaactgtgcatattgaagagcagcagcacctgggagtgtggctgcctctgccttggaggcctgcggtgtcaggagggaggagggacgagatgaatggagggggagggttgggaggccactgtggtagcttcttggggaagattaattaggtgtcaggctaagtgcttcacatgcgtgaactcagctggtcctcatggttccttggagacctatagatcatattataacccccctcttcacagggtagctgaggcccagggagggcaggattcttgccccatggagagatggctcggtggataaaatgcctgctgagagcatgaggattcaagttttgagtccccagtcctctcctaagagccaagtgtgctgctgtctgtaatcctgagttggagacagggacgagtagattgcgaaggctcactagctaactcgtctagcagaaccagtggactccaggttatagtgcatgtcagctttccacccttctctctcaatccctctccacacaaacaaaaggaaagattcctgctccaggacagagctggctctacctgccccaggtgtggctccaaggcaggatgaataactttgagacggggatgcctgaatatttgccttttaaggttacaccccagggttagtttgtaggatggctccctggataggaaggataccatatatgctccgtatatgctctgtatatgttctgtatatgcctctacaaggatgataggtgctgggattgatgtgcctgctttgttcaagaaaagcttggcatagtggcacccaggatttcttaacatttcaaaacagtaattgaagggataacgcaaattaaattgacttgagatttacctcctaccactgtgccacagcacattggacctacttgccctttttttctgttctttttttattttctcttaccttttctgttttctttttttttccattttgagacagagtctcattatatagccttgaatggcctagaatgacatatatagatcaggctggccttgaactcatagccatctgcttgcttctgcctcctcagtgctgggattaaagatatgcacatccactctgagcaatatttctatttttaatttatggagactttttttgagacaaagtatcactgtgtaannnnnnnnnnnnnnnnnnnncagagctggctctacctgcccccaggtgtggctccaaggcaggatgaataactttgagacggggatgcctgaatatttgccttttaaggttacacccccagggttagtttgtaggatggctgccctggataggaaggataccatatatgctccgtatatgctctgtatatgttctgtatatgcctctacaaggatgataggtgctgggattgatgtgcctgctttgttcaagaaaagcttggcatagtggcacccaggatttcttaacatttcaaaacagtaattgaagggataacgcaaattaaattgacttgagatttacctcctaccactgtgccacagcacattggacctacttgccctttttttctgttctttttttattttctcttaccttttctgttttctttttttttccattttgagacagagtctcattatatagccttgaatggcctagaatgacatatatagatcaggctggccttgaactcatagccatctgcttgcttctgcctcctcagtgctgggattaaagatatgcacatccactctgagcaatatttctatttttaatttatggagacttttttttgagacaaagtatcactgtgtaatgtaggctggccttgagctcactggtagccctgagtcgtttcaaactactctgtctacgctgaacacgtgcgggaggagggctttctcaacaacagtggcgagaagcagacactctacatctgtctgtctgtctgtagctcatgaacctgttctgttaacatgggcttgattcaagccttcccacagccccggatgtcacctgatcagccgccatgaaggtgcatgtttaagtgactttttttgcattggtcaccttcccttccgaagcttagctggaggtgtagatgctgtgtgtccacaaatcatcttcagcattgtctgggagtggcttgggaatttagctgcctcttttctgtggctgctcctttctttgaaatctgttcacagatgattggttgtgtctttgtgaggatggcggacgatgaggacctgaggaccaggggcggatgggaagaggaactgaaggtggacaccccgaacatgggggagggattttggtttggcagtgtggatggaaatgtcatctcgttgcctttgtgccaggctgaaaggggaaataaatcctggggtgacaacaaaaatgtgggtttattttttatttcattgctttccttgggggcgggcggggggatgnnnnnnnnnnnnnnnnnnnncccaggatttcttaacatttcaaaacagtaattgaagggataacgcaaattaaattgacttgagatttacctcctaccactgtgccacagcacattggacctacttgccctttttttctgttctttttttattttctcttaccttttctgttttctttttttttccattttgagacagagtctcattatatagccttgaatggcctagaatgacatatatagatcaggctggccttgaactcatagccatctgcctgcttctgcctcctcagtgctgggattaaagatatgcacatccactctgagcaatatttctatttttaatttatggagacttttttttgagacaaagtatcactgtgtaatgtaggctggccttgagctcactggtagccctgagtcgtttcaaactactctgtcttagttcatcctcaggtcttagcttctcaagtgtgggattacaggtatgcattaccacttctggcttgattttattcttttcaatcaaacagtgaagaagtaggcgtgattgactattggcactggccattgtatggagcgtgaaggaagcaccacaaacagttgatgtggtgtggaatttccccacctgcagtcctgagatgttttattctctttggaagtatttcaaaatgaactgttactttgccaagaggctcatcacttctgctgttgtttggtgctaaagaccaaaactagggttttgcacatgctaaacccacaccccagctctgccttactatatatagcctggactaggttcagcacttggctggagcaggtatatatctggtgttaagctagccaggacatgaagaagttcaagggagcttgtcttatagcagaagcagatgcatgcccattttggtggtccagagatttacatctgtgtgtattcgagagctccacgctgaacacgtgcgggaggagggctttctcaacaacagtggtgagaagcagacactctacatctgtctgtctgtagctcatgaacctgttctgttaacatgggcttgattcaagccttcccacagccccggatgtcacctgatcagccgccatgaaggtgcatgtttaagtgacttttttttgcattggtcaccttcccttccgaagcttagctggaggtgtagatgctgtgtgtccacaaatcatcttcagcattgtctgggagtggcttgggaatttagctgcctcttttctgtggctgctcctttctttgaaatctgttcacagatgattggttgtgtctttgtgaggatggcggacgatgaggacctgaggaccaggggcggatgggaagaggaactgaaggtggacaccccgannnnnnnnnnnnnnnnnnnngcgggaggagggctttctcaacaacagtggtgagaagcagacactctacatctgtctgtctgtagctcatgaacctgttctgttaacatgggcttgattcaagccttcccacagccccggatgtcacctgatcagccgccatgaaggtgcatgtttaagtgacttttttttgcattggtcaccttcccttccgaagcttagctggaggtgtagatgctgtgtgtccacaaatcatcttcagcattgtctgggagtggcttgggaatttagctgcctcttttctgtggctgctcctttctttgaaatctgttcacagatgattggttgtgtctttgtgaggatggcggacgatgaggacctgaggaccaggggcggatgggaagaggaactgaaggtggacaccccgaacatgggggagggattttggtttggcagtgtggatggaaatgtcatctcgttgcctttgtgccaggctgaaaggggaaataaatcctggggtgacaacaaaatgtggtttatttttatttcattgctttccttgggggtgggcgggggatggggctgctgtggttctcaacagtcagtgtgtggtgatgcttttatgattctcttcagggctctggaggatgccacggccagtgcatgcttctgtggctcctttggttgtcctggaaccccccggtggccctcacggcagcttcctctgctatttctggggccgatgcagtcagagcatgtatagtttatccccaaacccgcatttatgtggagctctgtactctggcttaggctcaatgacctggaagtaatggttagtgccaagcacagatgagagagaagatacctgacatgggtccctgtcattatagccaggcctccttgctactttcttgatttatataccagaagcttaacaatactactaatgacctctccagcagcagcacagactggcacatctgaggtgtcggacatgacaagtgctttgtgcctctagtgttgctcattcagtcagcaagggaggagccaggtacttttgctgggatggaaaggaagagaggacccaggtttccagggaacaggtgaatgacctctttaatgagcgtggctgaggcagtgggccgaggggaggaagttagtgtgcccttggaggagggtgttccacttgtttctcaagctgattcatctaaggccaagagagctaaggagcccgcaggggaatgcccaggtccttcctgttcctccctcagagaaggtccccactgcagttcattcgatgggcagccctctggttctgtcagcaccatcccttcttagagcctcctacaaggctgtgtcctcaggggagggcatagctcccacgtgtcacagtcaggaagaggcaaggcacctggctgcctgttggggtctgttgcgggaaggacattctgaatgtccagaaacattgggttgcatgggtgagaaacagggcatctcaaccccatgcagagtctggaaagagaggtggcctgataacatccggtcaggaggggacagcaacagtgcctctgtctcggatgctcaggcgtggatgcagaagactgggttaagatggggggaagcttcttcagttctttatggaccccgtaaaaagggcagaagttttattggcagctttttaattgtagttggccaatgaggtgatgggctgggcaccagctctggtatgcaacttttgacctttccatcttcttgctcaccgtcctccagctcagttaggaccagcccctctgcttcctccatctgagtatggttctccagcaagttgatcgttggccgctttgcagtatttgggtgagatatcttacaaccagttactcatcccatcctgtgactggcagctttgttaggacgcagtccctcagtagcctctgcctctgggtttccagcacacgtattggcccacagcagatactaagtatttcttgtatctgttaccctctgttgctgactgacagtgtttccttctgaagctgggacccagtttaaatgcagtcttcctgagaggtgtcagatcagtttgtgctctttaaaaagtgtatacttcagctccctaagaaaccgtttgtttgctcagccttttatagagttcgaatgtttattccatttcctgtgtgttttctgctgtgagccctctagtgtttctctaagttcgtcactaactgtgcttggagatgcatgatcttgtgaaggtaactggtaatgtaagaacatagctgggggctggagagatggctcagtggttaagagcatctactgctctttggaaggttctgagttcaaatcccagcaaccatatggttgatcacaaccatatgtaatgagatctgatgccctcttctagagtgtctgaagacagctacagtgaacttacatatttttttttattttttaatatatatataataaaagtacatagctgggacctttccaccgtcttatgttacttgctgtactcattgtgcacctactatgtgcccatctttaacatttgttatctttatcacccactaatcctattacagtagatactgttatctctgttttacaaacgaggatgtgtggagcttttgtagggtacacaatattgcgactgacatgtgccccaaatgcttgtgtcaggcactgcggaggcataggccgagcagtaggcagcgcttgtgccatgcttatgcatgctggcttgttactttcagatccactccatctatggtgtcctttcccattctcacattcttcctctccttccttcttcttcagcctctccagggctcagggtgagatgctaacctgtccgaaggccaccagcccgctgccactcatccggaagaacaccagcatatgtgtctgcctgtctcgcctctctgtctttctgtacacacaaaactgcagaggcaggaactgacaggtccttaggtgtgcaggcgtttgtccagatgagccccgattgcctcgtagaggtcggctggtgtacctgaatccatgctgctcaagaaacccagagcatctcattccctggaagaagcgtttctgcaactggattccactccccttgctggctcaccggcacccccctaaatgcaccatcttttgtgcctacagatacagtaggtgatgccactgtatctgtctacacctgtgagctcagggtgcttggctatgttggggtgagcctcagaaagtgataagaaggaggttttccatttcttgctcatgggacaagatagggacatatggacatcagaagggttgttgtaaccctttaaaatgccttctcttgtttcagtgctcagctaccccagagacatgttagtaacctctaataatggcgtggttttgaatcacatagtgtctggaatctgtcctttgggatctgagcctggcaagagtttctgtgagggctataggttatttttggccttccttgtgccagcctctctcacgtggcatgagatgaggaaatgaaccacttcttcctcctcctgctgcttgctgcagcaccactttgcttggcgtggtagggtctactccttcggccagtttgcacacattacatcatgcttgtttaggaaggggcagagctgtcaggaaatgattcttgactaaatgatgatgtccccacccaccccataactaacctagttacatggaaacagaggcgcgtcactctgattgccccctctctcttggagaggggacgagaaaggctggatcctggtggaccgtgtttataaatctttcttttgctggatggcagtttgggccaaggtcttgtagagttgccttgcttgcatctcttttctgagtgtgcaagctttggggaggagagcacagccctgggcaggacagcggcaggcacagagactctcatcactgagtcccctttgactttccatgttctgaatgtacatgggacttagtgtacatgaatgaaaacacattggctcacgggagggacatactagggtgaatttactgggcgtggaggtagtgaggggtagggagacgctggggggcactcttctggaattgattgtttgccaggtggcagaataatgaatattggaagtgttcactcctgtaagggtagctctcaggtatcctaaacacaagtcgagatgattggtgatgatgatgagatgatggcctctccttctactttcagtttagctgtggaagtctgggagaccgttggtctgtaagacatggctgcctcacagagaaagctgttgtggcatctttcacagtcaccctcggtagcccttgctgtcagaccacagtgtccgagagcatcggcagaatggaggcaggagttgggagatggggctcctgcagtcttaggtcagctgccaagaggttctgggatctctgggagtcacggtatctgtcgccaacaagatgaagcagaccatcatctaaggttctcctacctctgaggtctgcggtatctgttccttcttaatcattacagtgagtctaatcttttatttaaattatgttctcatctccatcttaaggtcaggcttcttattcttctggttttgttttgtttttgttcccttaaacccatgtggctgtgaagatagtgaattgatgtggaaagatgcccttgatacattaataaatgatatacttgaagagaagtaagcaagctttgacccacttctaaagtaaaaatgaaaataagagaaacattagtacaaatccaagttgttggtttttttttttttttttaattatttgaaactgttggggtcagccctgtgtctgagcgctagagctgccttaggttcgcatctggccgggtattaattacactgactgttaataacagcatctctggtggagagtggggtggcacctgtaattgaaaacattaacatctctgcagtgacagatgaatgtcacttttcaatggcatgaagaaaggttatgagttgtcactttgggggcacattttgaccagtactttaaattctgttttggctttagaacggattgaatctcaccactgtggataagagagtgtggccctatgcagcctggaaagatgggaagatgggtccccttaaccactggggccagctgtacaagtggaatgggattatggagacattaatgtttttcaagctacatattttttttccaatgagaatctgcaatttcataataacaaaaaaatggttaacgtggacatataagaggtattggagggatgagacacagctcagctggttacctacctggcgtctggcccgggtaacagcttcactctccagtatgacacagacagactaaataaacagagaccttttaaaacaggtgaggtggaacctgttgttatcctagcacccaggaagcaaaagcaggagtatcgttacaaattcaaggccaggctgctctacatagagagttccagacccaccagggccacagagtaagacactgcccaaaacaaacaaaacaaccaaaaaaaccaacaacaaacaaaacaaaaacaaaaaaagactatgcagaattatatttaccaaatctgtagtagtgtttattttagaatatcaagaccatttcctcaacttttagaattttgtaatgcaattatattttattggattttatttttcttgattgtattaagagaaaaggtctgacagtaaactagaatggctgaaaagcctctctctgatgtatgtgctacttccctcttgacgctctttgctgactgttagccgagcctgtcacatttgggattcctgctgttagaaacctctctgtgcttgttcttaggataacctggtccattcagggtcgcctgcaagaagcttgcaactgctgtcagattagtaactgttggaataaggttgcacttatttttagaaatgattttaaagattatttatttatttcatgtgtatgcatgtttgcctgcttgtatgtatctgtactgtgtgtgtgtgtgtgtgtgtgcctgatgcctctggagggcagaaggcatcagatcctctgggactagagttaaaggtggttgtaagtgggggaaccaacctcaggttttctgtaagggcaacaagggctcttagctgttgaaccatctctccagccccggtgctctacttctaaaggggtctgcagtgtgtgaaggtgggctggatgggctttctgtgaaattgaatggtttattattttaagacgggaggctctgaacacattatgtctgtaatataaatgagctggctggttgtgtaattttataagtcggtacttagggatatgaagcatacctgcttttacactttcccatacttctcatagaagccacctgtttccttagctatgttactaatgtcaccgttttgcacggtggctgtacatatttcacacagcgttttttttttttttttttttaatgtaacttgctgtgttttccgctgctgcttctaattctttctctgtgttgcaaataacacctcgccgaacctgtaattctcccttttctgttctctttggtttttgcagttggggtggttttcttaagaaagatggactgactccgctaagcacttctacacctcttccacgagcacctattgagcatttgccttgtgctgagttctggagatacagggatggactttaggacccagatgcacaagctgtctgtgtgtcctggtaccccctcctttcccctccagtcacctgattcccccctaacttctactttaccagtggagccaccatgaccttcagagcagtacagtattttcttcacatgttctgggatcccttgtcctagctctgccttcctcatcagactctcaaggctgagaggaggcatgtgtctgacttgtccctgcagtgcccagcatgtcatgcatagcatacagtaggccatgaattacataaacaagcatttgaatgtgattcctggtttgagaagctgagaaggttagaggcaaacagtggcctggatctggatcgacgatatcaattttgcatatgtgatttatagtaagcagaaaagaaaacttttctttctagctatcccatttcctgctttacagtgaggtccctagaaaactccactccaacctgccgtgagatgccttgtgaccagacaggaagaacggctcacctgaagctaattcttttcgtgccgtagatgtggcatttctgtgtaaatccatcatctatgagtcactccaagtggccagctcacaccacgtgccgtgaacacccaccgctgttgccttttgatatctggggttgttgttttttcttttactagacaaatccatttcttctatgtccttgctagacctattccggtcttcatgaccctttaaaaatcttaactcagaagaaaagattaatgtcctgatgtcctgtagtgtgtctacgaccgactcctaaggaagagggatgctcagacctagggaggatacgtggaagatccattttcttatatatgatgtactgagtttcttaagtcaaatggagaactttcccttttaaaaggtgatcatcaattaggtgtttaaacaatttgacgcaaactggtccttttattttttaacactgtcagggaagatttttgtggacttaaaattaaggctgaaaacctctgacttacgaactgtttcttgagtggcttcaacatacacttcttgccaccagctggttcaggatcaacatgactataatgtattgctacatcataattttaatttttgtttgccttcgtgtttttttgctaactggaaatctaggtaagcatcatcaaaaacacttgcctgactcagtctgagtttagaagggccgcttgtgagagaggctgtctacagccatagtgcttagatgaagtctcctgaaatcacagatcttgttccataggatagaaactggcaggtgactcacaaggggcggacacctggagctaagcccgcggggagggcggtctttcctgtagcgcattgctagccacccttttgaagcatgcagagaacctgaagagcaggaagtgccagtcccagggcctgagcgcttggcattccttcatggaaagatgacagctcataccgggtgaaagaggaagcgggagggcagctgaggggcatggaacaggagtgtgacctgacatttccattgttgtgtgggccgcagtcttgtgaggtgggttgttaggggggctgggagaaaccggcgtctgcagtcaagcatttccacgttagctggtctccacgtggatgtcccgttgaccttccaaggaggagggactggtacccattttatccttgtgtcgattcatgttccagatcgcttgtgattatagccatttccctcacacttagcgctggactcacttttgggaaccaggattcttctaagatgaatttctgtacagtatgaaaggctttcacaggccatttgtcggtttatcctgacatatttcatgctctctgtctttgtctctgactgtctgtctgtctctgtctgtctgtctgtctatctctttctctctcacatttatttatttatttatttatttatttatttatttatttatatttgtgtatttattgtgtacctgtggagatcagaggacaactgacaggagttgctgtcacctgcagtataggtttgagcttagactgtcccactcacgggcacgtgccttcgctctctgaaccttcgtaccagcccaccactgacttgttttgagggtcagtttttttttgttgttgttttgttttttttttgtttttttttgtttttttttgtttttttttgttttttgtctcagaggctcccatagcaaacgtcagagtattgccgggctagcccttgttagggccgtctaggaagatctccagtggagaagggtgttaccttcctggattctttgtttctatggctggagccttctccgaggagaggagagtggaggtattggtgggcagccagcagtgagcagtctgtaaaatggagaatccttgaccatggtcagtacctgagtcactgtgacacaccagcgcacccgccatccttgagcagcatgccgaagtcaagactgctccctccttacctggttatcaggctgcactgctgctctctgctcctctttgttcttcatttggccactgttctccctcagtgactcttcacagatgactttgtatccaactttattaagaaacttaagaatggttgcgtggaatggccacccatgcccgtttggtgcctataacctaagtacaatcccagtcaccggctgcttgctttgccaggcctatcccgtctgctctgctttctcctagatcacgctctattagtcagagtgtcttcttctgccgtggcctgtgtttgccatgtctgcatttctcaggcccagcactgatgcctaactaacccagtggatgtgatcggctgctgtggtagcattcagcactggctgcctcccgctggcttttaaagaggctttggctcactctgtggttttcttctttttggttgcttctccgccttacattgccttagcgggcttttcattctttgctcatccatcctttttattttaagtgtttagttcagggagagttgcttttctcctcctccctacatgtgctcccttggtcttcgttgccatgcccaggctgatgtgtcccgtgcctcggcactgctggttaccatgtatatatctgaaaaggtttctgatgctctccaggtctggatgtaccaccgttcctcccagccctgccttgtctgctgtgtttagacagcattggaatcagaaaagggtctgaattgtgcttctccctcttattggatgttttgatcttgagcaagtcattcactttccaagcttcagtgtcttacataaaaaaaaattaaattattattagtgtcttatgtgtgatatttgtgtaggagggcatgtgcctgtggggttgtatgtgtgtcgtgtgtgacatgcgtgtaggtcaggggacaaatctgtggagaacattctctccttccactttgatgtgagttcaggaatcaaactctcaggtcagcgggcagcagccttgacccattgttctgccctcagcttctttttgagtttgaggtaacaatgtctacctcacaagagccttctgggggtagccataaagtattcgcacagggcagagtcagaagagtgtgatgttcctgagtggcttctggctgtgtccagtcccagttagctccattcatggactcatcaaaactaataatctgggagtcctcccgaatacttgttttctttagctcccacatccatccggtctcctgggctagcagattctaatgactgtttatctcctagatctggaaatttctgaggtctcccttcagacgccaaagaccaagttccttgaggtggtgccatctgagcctctcttcttaccactccctgactccagatttgtacttgagcaacacttcctgtgtttcccatttcccaccaggctctcctgcctgcttcccaccttcctgagcctcagggcttggaatgccccttcctgctttcgccatacgaattcctcattctgagctctcagtccagatgctacctccttcctctctgacccctccaggagaggtcagatcacctcccgaggagatctgttgccctctgggatcagcttaaacttaccacgttgtatcataatgtgtttaaatgtctttaccccccaaattcagtcaaaaaaaaaaaaaaaacaaaaaacaaaaaacaaaacaccagtaagtgagttccttaacttggtatgtccagcttcgtgattgacatgaagcaggcaccaatgaaatgtttagtaagtggattactgagttcagtgatggacaaacctctcggtgacattggtttctgaggcagggctgggtctgaggagttttgagctgtgctcagggcatccataactgaagttgtcactctaatattcctcttattgcctcttcacttctaaggcctgacactgaagttgtcaattcagtgatgtcagtgtgaccctgagagttattcataagcaaaataaaatatttaatattgtaagcctacttttagcattttttttctttagcattttagaacttctaatgtcagcgtgttctatttgtataaggacttccatgataggtcccataggtagattttttttctaactggtgttaaactgtggaggaaccgctttcccagaacttacgtgagatgtgaagtagactggcttctgtgaaaggctacccaagccctaactttgtatttttaaaaggtaaacaatgaactcccccaagtgcagtgaacattttagacccacattgctcagtcctgtgaccacatgaagccatttcagtttgaatgggattaaaatgaaacaagatggaagctcagtccctccgaatgggcagccctaccgaaagtcctcaacggctcccgggtagcgagagcccagctggatgtcacggaggtaaaactttccttcagtgcagagtgttcagttagcagcagcttaggatgtgagaatcctgatggataattctgcaaccaccgtaccacagagggagtcatggtataagaattcttcctgggaacaccacacagttactaaatcattgtatatagagcatagcattgtatcactatgtcttgtgaacgtctttgtaatgttcagagagtaatgaacatggcgttcatcgtgtagcattttctgcctggaatccactttcttatacagcttggaggggaaagagagggacacaagtctagccaatagaattgtttttctctgttttacattgtcataaaaaacctagaggctaacgtgatgcctggaagtaaacatttacgtttcttttgaaaaaatccatgtgtgttttctttggatgaaatgattttgtattgttgaaacatttatttacaaattaacaccaaaagaaaggcaaaatcttcaacttcctttcctgcccagttgccttaggtggcttccagggcctgaggatcaggaagccagcaaaggcttattgcaactggaaccaggaagttcttgctgtagcaattgaacagcgtcatggacacaccataatctttcattggtaggcagccatttttcccccactccaagtatcatggacacaccataatctttcattggtaggcagccatttttcccccactccaagtatcttgggtcccagggcctgagagggacaggacggattggaacattcaacataagaatggaagacctacccatccatcccatcacacacacacacgcacacccacatgcatacctatattgccactcatgggaagcgtgggtgtgattccgggatcaccatccctgggagaccacagtgatccccacccagatggcttctccagctcatttcagactataaagcctgtagtctcttctttagattatagagagctatttcgtctccagttggtgggcccattacccagactactcagagcatcgcctgggcgcgtccctagctttatcctgtttgtgtccttggaagggaaggggcagagcttgcaggtggcaggtgtagaattcccacttgttacctttctgtaagaagttctgttgttgggttccccttattgaggaacagagtaggtagatgacctgcttataaatgagtgaaaaaggtatttatcccagataatattcataataggcaaagaggaatactgaccaccattaaatgtttagtttatcaaaaaactgcagagtttcagacggttattggtggagttttctgtaggatatgtctaaaacttccaacatcgttcttaggctcagtttataacccatgtgccctttgagaagaagcaggctagccggggattgtgcagttagggtttggacaaaaactcaaagcaggttcactcatttccataaagagctttaaaaatgaacagacttatcaagttcattgatcacgttgatgtgtatatttggttatatatttgagtttcactgtgtgtagtttcccagtgttagaaaaatacaaggaaacaggtgagatagtctcagaagtggtattcttagggaattaattagaaaaaagtggaatgtgctcaaaaggctctgctgtagtaccaaaacctttttggaaacaaattgttgaattaggaaaaaataaagaggccaaggttaatggggaaactagggtattaagaggattaacttaaagatttatgtgtgtatgtgtgtgcatgtgtgtttgttttgtgcacgcacactcatgcacactgacttgcttgctgtgtgttcctgatacaggcagatctatggaggtcagaggtcaactttcaggagttgcttcccaccttgcacagggttaaggctgggtcttgcttgttgcttttactgaatactccaggctggctgcatgtccctgtctctgccttctgttttgcatgggtgctaggattatagatgccactgccacgtccagctttgtccttgtgctcctgggattaatctcagtgtctggcttgtggcagtaatgctctcacctgtgaagccatctctcctgtccctcggaggattgctcacaagacaacgagacctttgattgcttgattgcttttactgttctggtaacgtcagccactgaattcatccatgcctgtgagaaatcacagattcattttcgtttgtctgcttggttttcgttgctcatgcatattattacatatttgtgcacctcatgtttggagtggccctgccacagaggaggtgggatagtcaagcattcctctctagatcactttgcaaccaccctaacaagaaaaagggaggttctcttctcttaaatgcctatgccgcttgggccggtgtcacggaacacaagttttgtcggagctccacaatccactgatagccgtctttcatctgatactaggctaatccctgagcgagggcatgagtgaggagtagtgtcagtttcagggaagcaggtcacctagagtgaaaacctctgcacaggtgatgccagtgtcaccttagtgtgagagtgtccttaagggacattgccaagacagagcccttgtcccttgtgaaaagaagagcatcagaacaaagctgccctctgaatagtccttactcagcttgctggagtgttggataatgaggatggctggtcctgatgaggagaagaagagagccactcgtaccccgccatttccctctctagtgcaaaccacgtccccttccagcaatggtcccattttgctttcttgatttctgtggtttctccaggatatatgctcccgtctataggagcctccacaagaaagaacaggagacccttgtcttccagagtctgggttacctcacttaacatgatctttcctagttccatccatttacctgcagagttcatggcttcatttaacaactgaatagtactctgcagtggataggttagtggataggcttttcactatccagtcatcattgggagggcatttcgttagtttgttcccgttttctagctcttgagaggagagcaacactgagcaagcatctgtggaccgggaccacctccttggggtgtaggtcaagctgggttgtctggtggatttgtttttagctttttgagaattccccacagtgatttccatagtggctgcaccagttttggatccctttgacagcaaatgagagtgccccacccctacccttatcccccagcatttgatggtggttgttctgttgatctttatcattttgaccgagttaagatgaaatatcaaagttcttttgatttgcatttctctaaatgctagggatggtgatttttttgttgattattttgtaaccatttttgtttcttcttttgagaactctctgtatggatcacaggcccattatgggaaaatgggggaagggagctctaattggtgggaacagagggagataaatacagaataagaagaaatgagggttaaacagtgatagggtatctaaaaacccacaaggaagcatactgttaaccacctaaaaatatctatagcacatagaagttgatatatacatttacatagtttaagtgaaaatttcccatctgggctaacaatgctgcctcaaaagcaggaggcatggaaacctgccacccccccccctttttttccttttaatttaaaacatggtctcacttcctggccttgtctagcctggcgcttctgatgtaaaacaggctggcctcaaacacacagagatccatctgccactgcctctgaactactaggattaaaggcatgtgccaccatgaggagccctcctttgtgttgttgttagggttgtccaagagtctttcaaaacataagttattgctattgcccttgttgtcccccctagaagtggacagtaagtcccttttgctcaagacactatgcatttcagacacagggtccagaggacctgaactggatctgacctgaaagcctccttcctgaggactggctttcgtggtgccagaaggtgccgtgtagccttccaaaggatggaagcagccagtgctcagctgtggtgtcaccacaacaatgacctgcatggcatgataaccttaagatggtgcaggaggtaaccaacagctatctagtcaaatgtaaggcacacccaacaagaaggaaatcatgcctggtacggataacgtagccaagcatcctatgagggctagtgaagtcatggatcttggaggagaacctacagctgtccctttactcgccagcacaatttctaacaacattctaaatacttacccttatgccccagagaagtgtagtccccacccacatcaaggatgcttacctcagtaataaagaccattacaggaaatgacagcccacaaaaatgcagagttgtggagtcaaatcccacctgacaacacaactcttgcacctaaggctcagggatcattgcagacaaggaggcaggaagactgtaggggagccagaggaacaggaagttgttggtgagattgtgtctcccagaagtgtcagagaagctacaccagtaagtcttaccatcatggctgcctaaacatgacccgaacaaggacaaaaccactgggataggccacccccaagtcagctttagtgtttcatagcagagtataacggagttgaggtcttgaagacaatttctggagtcggatagtctggaaggaggaggaagaagagatgagccaagtgtaagagatctgaagagatgccaagacccaacggagagttgggactatgagtttggggctagaaagatggcatgcacagccagcagaatgggggacattgcggacttgagtttgatcccaaggacccacattaaaaaaaaaaaaagcaggtgtggtggtccatgcttggaactcactgctggggaggtagaaacaggtgaaacctgaggcttgttggctagcagtctggccaaattaacaagctccaggtgccctgtctcaaaaagaaaacacaacagcagtgaggatcaactaagaaagacacctgaggttgacatctggcctctgcgggtataagtgcacatctgtgtacatacctgtccacactgtatgcacacatgaacatgtgtgtactcattcatgcatgtgcacacatatacacacatctgcatgcatgcagacacactaacacacatacacatgtttgcacatatttacacacacacacacacacacacacacacacacacaccacacacacacagtggctcgagcttgtatatctgagcagaggcaacagatgataagattggctcttggtagcatttgaccagttagatgtggttgaaagacaagacaagagagagaagttagggcagagtgggtgtgtgggagggatgttaaaaaaaaaagaagaaaatgtaccaaagggctaacaaaaacagtggctacagcatgtaattcagttatttgtgctgaagcacagaacacagtccctcaacccagacaaacaggtgtcataggagaagggcaggaggctgttaattgatgtagatttctggacagagatgctccagggtgtggccaggggtagatggaagaagtggcctgtcagggaaggcctatggatggaggacagaaccaggtaaaatggcgggagtagggcctctgttctccttcacaacattatgttttaggctagtatgtttccataaggcctaagtgctttagctgtcctgtgggatgcagaggcaggtatagggcagcatcgtggaagactcctgcccatttgtttaaggatggaaaaaagcccgagttcctgactcttttaggagatttgacagtgggtataatttatggtaatatttcatctgtttgtattttactttttagtcattccattgtttgcaatttagttagtgtattggctctgggaaatgtatttattgtcatcatcactgtcgtcgtcatcatcatcatcattgtcatgaagatcatcatcttttggggttttcaagacagattctctatgtagatcaggctggtcttgaactcagagatcaacctgaccctgtttacccactgctgggattaaaggcatgggccaccatgctgggtgggcaatgcacttaaagctctcttttgctttctttaaaggggtaggaaggggtgtgcatgttatacatttccctagataatggagtagtaacaaaaacaactaaaacttgtaaagccgatttgagcatttcccagtctgcggaaagcagtggaaatgggcttgaattctgtgcatttccatgtatttccatttaaagtctcatttgccacatgccatgtttccccttttactttaaactggaggcacccttcgtctgctaagtgaagagtaaaacaaatgatggagtcatcattttctatgatgtatcaagtagcgagggcacataagagaataatcgtgtttcttgctctcagagagcttccaactgagttgcagaagcagcacgcaagcacaaaaccatggaggggatcgatcatacagggttgaagcaagcaggcgtaataggaccagaagacacatgcaaggggccagcgggcaggcctttacagaaagcggtgaagtctgaaggataaaaacagtagagaggaaagtaacaggcgacagcttgggcatcaccacacccttgctctgcaccttctgtcttgcctttttgcctcaatttctcaacctcgaggagacggtctgtgttaccgcctgttctgtcagccgacaaaactgattgcaaagctctttgcaaatgaggcctggtcctcccgacgtgtgtgggagtaacagtcacacacttcgaaggcgtgtggagttttagtttaataaggttttatttcttttgtttaggtttatcaagtaagatgttaaaaacaaccacatgggcacatattagcaccccccatttcctaatgagagatgaagaaactttaagcaaagtttacattaggaatatcatttccatgactttgtgtccttttgtatttcctttttttttaaagatttatttatttattttatgtatatgagtacactgtagctgtactcatcatgagccatcatgtggttggtggttgctgggaactgaatcccagctctctctccggctggtcctactcactctggtcaaccccgctctctctggcctaagtgtgtgtaaatagactgtagctgtcttcagacacatcagaagaaaggcatcaggtctcattatggatggttgtgagccaccatgtggttgctgggatttgaactcaggaccttcgggagagcagtcagtgctcttaaccgctgagccatctctccagcccttgtatttgttgagagaagatcacagagagtaagagccactacagaaagaatccaaaccttcgaggaaagtattctgtgactctgcctcttgacgaaggcatccttcaggaaggtcagtagggattaactgtagattgacagatgaccactttaggggaagcccaggttggcatcagttaactttggaagtaataggtcagagttcactgtttcccggacatgaggaaataggagctagtcattgaaaccttacattaattgttttgagaatctgaatgctgttcatcaggcaaggaagcttgtacccagacttggtaatcaatgcaagtccttatgcaagcaatgcccttctccatcccatgtttcatggtgcttttgtgcatatgtgtgtgtgcatgtgtgtgtgtgtgtgtgtgtgtgtgtgtacttgcctcaggtgccaaaggctctgaggtaattttagctcctgcagctctttagtgatgacagaaattggactagaggtccttaggtctccccagccttgattctgctgagaatacctgtctgaactttgctcctagcatcctctctgctctaagatagcagtaaggtactctactgtggtgtgggatgtgtgggaaacaatgtttctgactgtaaggaaccctgttttcttgaacgtatctgctttcctatgggtcccatcccttctgggacagtgagggctttcccccacttccatgtcctttctgggatggtgagggctttcctccacttccattcagtacggagctagagcttaagagatagaagaaggggctggagagatggctcagtggtatctgctcttccagaggtcctgaattcaattcctagcaaccatgtggtgactcataaccgtctgtaatgggatctgatgcactcttctggggtgtatgaagacagctacagtattctcatatacataaaaaaaaactttaaaaagaagagttttttttgtttgtttttttgtttgttttttaaagagtcagcagaagatatggcagtaagaggagagtgacagaaagatgaagacagtgtgaatggtatctgtggagaagcatagaatcagccagtagctaatgctcaaaaggaccaatgcccacctctaccccagtctaaactattcagatggcaatgtcttcaagggacacgggatccaaaaaatcagtaggagctgctgctgccccaaagggagaggtagagaccccatgcattagatgtttgctatggtgtaacaacccccaaggttcaccatgggtgaggtcacatgggtgagatcacagtgcaagcctgcttctgctctcctccacagattttccctatttttggcacccagcatggtatctggagcgtaatggcgtcagataaatgtttctgggatgaatagttggatgaatgggtgtagatgccaactccttaactctggcctagttgaagggcctgtgacctggaatcattctagaaaggatgtgacatcccagagatgatgtatggcctgtttgtttcttataatgacaataaatattgtcttcccagatagacaacaggcccttgacctgggatgcttggaagagcttctaggtgtgtgtggatcttatgaaatggtttgtcaagttaggattgcctagggagaaaagtcagatgaaaagtattaccttggttgggcccagtcttcccgtgctacctggggccactgagcatgacagcaatctctaaggcaatttctgctacagatcttggaccctggagcccacccctaacctcttcttacccatcaccagcacttcctctagaaagagagaaacgggatcccaaggtggtctggtctttgagcttgcgtgttctcagcaagcggaggcctgctctgtgatatctgcgggatcctgtctcatgcctgacgcaggcacactcctcccggctgaactataagagaagcgacagaggacagagctgcctttgctctactgtgggtcagcagacactgacgcttaaggtcaaaggaacaaccgggccaagggtcagaggacttagggagatgagtcctctggcacccgtacactcgtgtggttgtttctcatctgtaaagctgggctggtactaattacatcctcttactggactgtggagctaaaaccgcagagcttctgtggaaggctttgtgcagattttatcttttttttttttaatttaagacaggaagatgtttgattataactggtagttttccttcaactacaacaaactcatggaaacagttttgcagcctttgagaatgacactctgtatttgctgatgggtacttactgcccaggtggtagtgttgagcagatgtccattcatggacacgtttatccattatcctgaagacgttctgaactgaatctgatacgtgaccttgggagacgtggatcacacagcctgccaggtctgccgggccccacgtttccaggctgtgcagatcagctttgccttcatcatgccctggggaaaacccctggtgtggcatgttgggatgtttctgaacaggggtgtaaccaccctcggtgtaaggtgtgtggagacacagcaaggcatgactgtcagctgcagggtctgttacacaggtgggtgggtctcacctcgagctctgactctgttgcaggaggtgccaaccatgatgctgttggccctgaaagcgtacactgagaaccacggcactagaaacaccttccttgactgaagggccttagaattatttcttctgagaaatgggcgtggtgtcggcatgattggcgttaattgtgttgctaactccggtttcccccctccctttgcttcagaactcagaattcacatctgtggctcaggtttaacacagcttacactgttcgtgttttaactcgttctcctgtttcattacccccattctgatttccacatgtttattgtaattttatcacatatactcctggatgttgagtctattttgtggaatttagtggttattaggaaatattacttctgacagcatcctttcccagagcatttgggttttaccttaacactaaacttttgaatgttttgtattgctggattaactacgggcagcggtttcctctgaagtgttggtttattaatagcaagcagttagcgaaagaatggagaagaaaaaattgtgactagaacttattttaaaaagtcacagagatcatagcagaaaaacctatttctccatatatagcattatatatttttctatatatatttttctctctcctccctccccaattaaaaattgtctaagatttgaagtgtttcgaatgctaacatgattccacaagttgaaaagattccacctggtttcatgtgatgggctgtagttgaaatacaggtgtgctcaaaattttgtacaaaattgtcccaggctctgtttcaaggtatgcctggaacatgtatgtttagacttgggtcccagacctaaaacatctcattaagtatattaagtatattaaatattccaatatctaaaaacctctcctggcatttaaaatacttttggtcctcagcctttctgagtggagatatttgacctgaatatttccctgaacagacagtcctatatatacaaggaaccatctttggctgttggtggagagaggggcagggtggtgataacatgaagaagaaactacccacagtggttgccagactccgtaggcatgggagtcacctgaggagtttgtcaactgggatgctggtttctgaggcttgatgtgggggtgggatggggagtggggtgaggggtggagggagtcctcatccttaatcgctcctgggagaatctggagggggggcgctggtttgggcaaagtttggcagtccttaatccctaagtgttggggacaagaataaaaggcccaggctgtgttggaaactttcttgtttagagttttccaccgagtttgcagaaatcaaatagtgtcatgtgcatggtggtgttattcatattactcagccttagctgcaaaacgttactcccgatgttagatatcccttggcggtttgtagctgtgcttttgactccccatgtcccttggccacccctctcccatcctcctccttcacattgcctcctccccctcctctgtgtcttgccctttcttctgctttcagcttagggaggggacttcgccagtcttgtctgagaacaattctgagaaggaagttattttgaaaaatgtgttgggttctccctgaggccgtccctcctcaggactgtgaagtagctagcagttcccgtgacctttgcacctttgctcagcctggggtgctgacacctggccagctgtgggaagttgggcaggagcaggagctgtgtgccctgcagtctgggaaggtccggtttccctttgcatggctgtctctggctttcttttcacccacctggtgatggagccagactgaaggaacatctgtagtaattgataagagactgagagtatgagattacatccctctgagatttacttgggtttagaactcctcgaggccagttttcctttaaaagtcacatctcttgcataaatgcacattttaaaagagatgtggaattacagaggtcacacagagttccataccctccaactctttcctcgaggactagtgtcctgtgtggcgtgcctcacagtcaatgaaccattaatggcacttgtgctaattaaattccatggtttctctgccttcttatattttactttaatgtcttatttctgggtcagaatccccctagtaactgagagttactacagtttctcagactttccttggtttgggtgtgcttcccaacttaggaaatactagccaggcgttttgtacagtgacttgatttggtttgtctggtgtttctcttggatctagagtttgggaaggaagactgaaggtgctgagtgacagatctgatggcattagtgtgtgctagttaatgtattgccctgtatatacatacatacacacacatggtgaatgaacacaggtcgtcactgatgggagtcttgctcccctggctgaggtttgtcagacatttcttatagttaacccctcccatctatattgtagtcttcgaaaggaagccgctatgctcagcccacacttaggctgtggaaactatgtttcacttccttgagggggtgttcagaaataagttatttagaattctaatcttgtgcccttatttattcagtcagcatttgtgtgtgtgtatttgtgtgcatatatgtgtatgtgcatgtgtgagtgtgctgtcacctgtgagtacaagcatgagtgtgcatgtggatacacatgcatgtggaacctagagaccggtgtaccatgtcttcctccatccaccttgtatattgaggcagatctctccttaaggcctgagttcaccagttcatatagttctactgagctagctggttccaggggatccccttgtctctggctcttgaatgctggggttacaggtgtgcttcatgcccaccaggcatttttgtgggtgctagggatctgaactccagtcttcatgcttggcaggccatctctcaagcccctattcagccatttgtaccattatagacttttagttttacacgttgccagtgttgacctggggagctttcccagtcagcttccttgactctcagtgacatgcctgtcctcactgtgggagtgtagtttgtttttttaagcacttgtttattttctctgcttccatctttgtgtaggtgctggtgatgaagtcaggttatcaggttcaagttgacattgatatttttgatccatcttaatcatctatttcttcaaggaaccttagtttttttgttttttgttttattggagaatggtgttcaaagccaagttaggtccacaggtagtggtggcacacacctttaattcaagcactcgggaggcagaagcaggtagagctctgtgagttcgagaccagcctagtctacagagttagttctaggacagctggggctacacagagaagccctgtctcnnnnnnnnnnnnnnnnnnnnnnnnnnnnnnnnnnnnnnnnnnnnnnnnnnnnnnnnnnnnnnnnnnnnnnnnnnnnnnnnnnnnnnnnnnnnnnnnnnnagagagagagaggaaggaaggaagagagaatgaaagaaaggaaggaagaaagaaagaaagaaaaaaaggaagaaagaaagaaagaaagagagagagagagagaaagagagggaggaaggaaggaaggaaggaagaaggaaggaagaaggaaggaaggaaggaagaaggaaggaaggaaggaaggaagaaaaggaaggaaggaaggaagaagtcaagtttcagatgctaagtgccctcttgttattgggcgatcctgcttgtaagttttctcaactaacagactaaagaagttgatgtcttctaactcttgtatatgtgctcatgtattaagaatttctgtgtgtgtctatctgcaattgatttgtgttctatgtgagttcatactgatgtctctaactctagtgtggtgcctcatggatccttctagcctttgccccttgtctggatgagactcttcttcctggctctcattacccttcatctgctcacttcttaaactgccaagaagtatttcccaagaaagaactccccagctactgttcagaacttgcattacatcccactcagtttctctccgagtctctacattgtcctaaagttgcttaggccaggctgcccccctctcttgcttcagtgacactgttcatacattttagtaattggttttcatttggactctgccttctgtattctacccagggactcttgatgtcctgaatttaattataaaaaaagcataagtgtgtgtgtgtgtgtcatgtgtgtgcatgtgagtgtgttatgtgtcttccatggtgctcatgtggaggccagaatcatgaggagttggcggtctcattccacctttacgtaggtgctggggatcaaattgggtcatcaggcttgcgtagaaatcatctttactcactgactcctctcacagatcttcccagatttagttttaatcgactacgattcatttcacggtgctgtgaagttgtgcagattttgacgagtactagcattagctatatcaatacaggtcgacgtcgatattaacaagcaaataaacgagacaggaaaacttgatgaaacttcctgtgtgaaaaacattaagtgacaaggtttattaaaaagtcacaggcatgtttgggttccagtcacagagtggtagggatggtagccaggccttaaaatccaaactagttcaacctgccactgacctactaagtcactcacctgtggatggctgtgcctcatcgaaagatgacacacgatttcagtctgaaggtggctgtaaagataagagaaagaattgtgtgtggcccatgggagacacagagcccagcagacactgttctttctctcctgtgggacctgctccctcccattttctcatggtccccaagccattgttctttaaactggtagaatcccttgtctgttgttgagttcaacaacagttttgcagcccagctgtcctgtggatcgctctaacatctttctccctttggcctggcttacttttaggtttcaaccctcatttctctctcgggcaagcatttctgctgaaacaacctcctaatacagtcagtatatttgaaaaccagtcaccccaaactagctccccttcttagaatcttccaggtaaaccttttaacctttcagatactggagccctttcaagcctcctgccctttgccacccagttctcttcgttttctattcagcactcactctggtctcctacagtccagtctgccctttccccccacccccaggcttagcctttaaactattgcttaaggatttttgctaggcttttttttttttttttgaaattgacttttcatctgttaacctggtgtcagaaacccttagcccaacacttctaaatttatcttctgacatcattaaactacacagtttaatattccttgctgcataaaggaacctctccctccccaggcctgccggagatgaggtgggcgttatgaataaagtctcccttttgcctccacttcccacgtctaacagtccctttaaagtcatcttccctctccactgtggcgcttggaggttcccagtattgaactttctccaaggttgctcatcacagacttcccacctcccgagggtctcctccggttctctcttcttccttctctctgggtctgttttcccttcctttcctgtcgcccctcctgaggggtttgatgtatgtaaagggttaccttttcccaagtggtcgcccagccttatcttcactccacattttgcctttatttctaacttcttaccaattgtttctatttcaggagttctgtgtccaaacttagactcatttccttccctctgaatcctgctctttccctcagagctccatcatgattaatggaaagtgttccaaaaagtgttttcttcttcttcttcttcttcttccattttgtttgtttgttttctgtaaagggcagagatttttggcttggtggaccataccatctttgtcatcactgtagtcccatgttacctaatgatgggctacatcctgaggaattcctcgttctgcatttttgtcgtagaaggtcataaaaggcaattttaacacagatcttggtggtgaggttcctcactgagtctgccctgatgctatcaggagacctgagaatgggtgagccatgcagcagctgtaacatggcaggctgccgtacagtgaggttgtttttgctaagtatgactgtattttcaaataatgacaagcattcttataggaacttataagccagtactcattgtctgttatcaagtgttatgtgtaggacgtaattgcacatgctgcactcttctgtccctgacagctcagaggggttgtttaccccagtattgctacagccccataattccatgtgcagagacatcaccatccctaagatataactgactgataggaactcttagcttcaacattacctgataggaccatggccatagcagcagtctatccctggagaattgtcatcatatggtccctgactgtatatggtccctgactataatgatggctctggttagatgatctgagacttacaaaggcatgactgtgttttaataaaactttatttacaaaaaaaaatgacggtctgatgaaattggctctggggtactgtttagtgacttttcgacttggtcacgcaacctaaggtgacatccttttgacctttttctcttgctgttcttgttagatggttttcattaattacactattccaaaattatctatatttctagactgtaagttgctgttccctggtttagtagacaacctgcctctctgcccagtggtctctatcattttaccaggtgcagaaccccaggtttctccttggccttcattgtgggctaagtcccctggatgcagctgtttctgattctctgtgaatgctcttccagcctcccaccctactgcctgctctcaagctggttctgtcttctctccacaggccaccgactcagagtggtctcaccttccactcgtaacgtgccttcaggtctcagtgtagatgccacttctcagggagacattctggtggctcagagcactcgattctcttggtctgagcagcacttgtcatgtggatgccacctgctcagttgtgatctgtgtctctcctctttcacccgagcttccagagtggcttaggttagcctagtggatacgtagtcaacagaggcaatcaaattctttttttctagccccgttcgttcccatggagcctctggctcagtcagtgactcagtcagtttgggactaagattggtccttgatcccagacatgccaccccctttacctggtacctcaaagtggctggatagtctccctcctgggtattatttcttcctaaactcccattttgttgcggacttccttcattcagattagcacactggaaaagttctttaatgtgtgcccgtcaccaccactttctgtctacttcccataccgacttctttgtataaaggtctgacacgtaaggatgatgctgtggctttgttggttgaagccccccagtactccctgtcaccccagggtcagggccagcctctaatatgtcatcagaccatattggtcctcagcctgtgtttctgaccttacgtgaacaacctgcatttaaccatgtgtcaccccgcaccctgaccgctgcactgttcctgcctgctcttccccatccaccttgaaaacagctggcaggatttctaggcgtggtctcatcccttgtagggttttcatctctccctctagaagatcaaagggagtaaagatgtcataaaatggctattgagatagatgcttgggtttgatgcttgtaatgtgccttgggatcaagtcttccaaagatagtccagtgggtgagccattaaccagagaggcatgtgaagtaccttgaaatgcttagagttttctctgtatggtttgtacttaatcttggttgattttgctgggccttcacctccttcctccattacaaatgggcaatgagaatcaatagtatagaataattctgggattatttatatcaatttaaaatacccaactttgtcagtttaaactgttagagtgggccagggaacaaaagaataattatttcgtggtgactaagatactcctgttctgcaaaggtatctagattcttcctattctaatatttcttctttcctgaagcaagttctataaaacaaaacaaaacaaaacaaaacaaaacaaaacaaaacaaaacgaaagagaggtccagtcctgaacccataaaggtggttaataagagaggggtacactctgggtccctggaataggaggaatcataggtacagtcccccttccaccagggccacagagacacccctttcctctttcatctcatttgggagggccctacccagcagaaaggagaagtgatgggctcctgcagaagtgctctttgtaggagatctgcagtatggaggagtgtagtggctattcctggttgtcaacttgacaatatttggaatgaattacaatccggaattggaaggctcaccagtgacccttatctggaggcttggagatccttatctggatcttggtttgaagatcttgagccacagtggctatgaattccagaagattgaatctccgagtttaaggaacacacatttaatctgggctacgcctttcatctgggattaaaggtgtggtggaacacacctttaatctgggctacaccttctgctggagacaatataaggacattggaagaagggagtctagctcgagcccttgctccttcgcctgcttgctgcgtgagactgagtaactgctagannnnnnnnnnnnnnnnnnnngttagagtgggccagggaacaaaagaataattatttcgtggtgactaagatacttctgttctgcaaaggtatctagattcttcctagtctaatatttcttctttcctgaagcaagttctgtaaaacaaaacaaaacaaaacgagaggtccagtcctgaacccataaaggtggttaataaaagaggggtacactctgggtccctggaataggaggaatcataggtacagtcccccttccaccagggccacagagacgcccctttcctctttcatctcatttgggagggccctacccagcagaaaggagaagtgatgggctcctgcagaagtgctctttgtaggagatctgcagtatggaggagagtgcataaggcaagtggggctcccctctcccacctcagcatgtgctctggagtgagctctcagggtggctaactggagcagagtatcaacctgacactatttctggattcaggagaggagatggcattctttagaacttgacccagtctttgaggtgctccatcataagcagtgactgtccaggtaccattatttagcggcagggggggcccgagtcagccccacatgtggcaagcacacaacacattcccccagcagaaagtttcagagagaaaaggggcagaccaggcaaacactatgtgcctgcgcacttctgttgtctctgcagtgcttggactcataggcgccgaaagcacacggagacccaaggctgaaaagctacctgaaatcaaccgtaagaactctgactggtttaagatgaaagaaagcaccacggtacctgaacggctccccacatctcacaaatctcagcagggatctaccttctccctagctcctgctcccatcaggagcacagaaccgggctgtcaggttgactcctctcccaccgtttttggcattgaggaggcaagaccagggtgggaagagggtaacaagcaccctcaggtgatgatgacataaatcttgctaggacttccagggagccagtgacgtggcgacctcatgtacaggctggcattgggttgaccagcaaacatacagaccggtggggccccgtgctagagtaccatggagagaggctggtaaggcaaaagcagaggatcttcccagaattgaaatcttaactgagccttccatgcttctatgaccttggctcattcagaaaccccactgggactccatctttccatctgtttaatgggcatggtggtgcttagcctgcagacagtaaaggtgagagataatgaggggtagggatttagcagcacattgatggaggccaagaggaagttgtcctattttattacagaatgcaggtgcccatctcctttcgggtccctgataggatcctgtaaggacctgcatggtcatcataagcttgatagcttcgtctttgaagaatgatgagatatacttcgtcacgttcctttgtctttaagtgcagactccggaaagcaatagaaaagggccacctaacttgtaatttaaggtatgtggacccttttctcatagatgtttctcgtgcagcccacaggcaccctacaccttttgctcaaatcaaagcctttcccttttaacagaccacgttcctctgcttacttcaggccaggatgaagattgcggagatggcggtttcctgcctgtgatcaattctaatgccttttgtgaaaggaaatgattataggttattatcagttaattaaatgagcatttccctggagtcgtgtgctcaggcttttattaaagcctgcttagaatcacggaacattagtgctagacgaagggttctgagaaaacaccccattggaggtgaaagtgactcgtgtcacttctgcaaagtgacgtcattgagacacagacgtggacggggatgctgctgagtgtaattacaaagctgtgggctgggcaacctaatgtgtctgaagtactgttactgttattagtgtgtgcactcgcgagagtgtgcacgtgtgtggtgtcgcacatgcagaggtgagaagataacttgcgaaagctggtgctgtggatctctgagtgtaaggccagccttgtctgcaaagtgagttccgggacagccaggattataccaagaaactcctctgagatctaagagatcaactaactcatagtagtagcttcaaggtctgattgtgtccaagttttgaaaagcgccagcccaccctttcccatttcccccagcttagtacagtatgcagagtgtggtaggatcttggtgtctgtgtacttaacacttctccttctatctcttatatctctggtgcagagatattaaatggcatgcccagaaacacagccaagagaagatatatctagttttagagcccaagtctcttctggcattgcgaccaaacagattcagaggataagtttgggtagggaggtgaggtatttaagcaacatgaattcctgtaggtacaacttcatgaacttccttcttcgtgattcttcagattactatgggggtgcatagtggggcttcttgagctgcctgacactgtacccaaggaccgttacacactaggtactaaggcaaccttcagtgattaaaagtgctatctattaggtagagaaaataaagaggtaggggttgagagtagaaagcacacagatcgacgctttgtgataggtagaggatgaagaagatccgaggcaaagactctttggagggcattttggttagggaaaggatgaagacatgcttcctccctcaagtaagaaactttttgatgcttgttgtggtaataattaatgggggtttctaccccaccttagatcatttagttcccctataaaagacacaaacctttctgtttataataagccacaacagcactagagctgggcagatatctaccctctgtgctattttgtctacttccttgtcaataaccccaagatataacttgctatgttcctcctgggccactcttactccagctggccaggcttcatggccagttctcacgatcccttaccccatggtgtcttcctctctgcaccttctctccctcctcctcagggtcctgcctcaggctccaagctcaggaactgaagccccacctacttctcttatatccagctctacactgtaggcatctttattcaaccaacagttttaaattaaagagcaaggttacatagcatcacttggtgtaagtgaggatttcctcatccttagaagcaatcagaccctggggaccagtatttagcattacagtgcatagcaacagactaaacctaaacagatgctactattacatctatctatctatctatctatctatctatctatctatctatctatctatctattttagatgttcttttttattattaggtattttcttcatttacatttcaaatgctatcccaaaagtcccctgtaccctccccacgccctgttccccaacccacccactcctgcttcctgaccctggcattcccctgtactggggcatatagtcttcgtaagaccaagagcctctcctcctaatgatggctgactaggccatcttctgctacatatgcagctagagacacgagctctgggggtactagttagtccagacactattgcatatgacagcaagattttgctgccaggaccctgatatatctgtctcttgtgaggctatgccagtgcctggcaaatacagaagtggatgctcacagtcatctattggatggaacacaggacccctaatggagaagctagagaaagtacccaaggagcttaaggggtttgcaaccctataggtggaacaacaatatgaactaatcagtactattacatttaaaagtgaagactctgacttgggtcagagacttaagtctccagactactagaggaatataagagggggaatgcttcaggacaattttctgggcagaggttttgtaggagacacacatatcaaaatcacatccaacaaaagtggaaattgacaaacagggttacaccaaactgaaaagccagtgaattgcaaaggagacagatcatgaagagggcccacagactaggagatgagatacagaatttataagaaacccaaagattttatctgactctaaaaggggcccatgacctgtgtatgtcttttcaaaggagactgtgtgaatggccagaatgcagaatgctgttacagaggacatgccaatcaaagctacagccttgataaacatcatctctctatagtaagaatggttatgataaaaaaaaattctggtgagattatggagaaaagggagattcttgtcattatatgttttcccaatctgaatgtttcgtatgaatggaatcataagagatgtgtggtcttttacaattagtttcctgctttcatgatccatctcactactgacagctcatgtctggcctctgtcaatggacttttagctctttttactgttgtctgaggatgtgtttaaaaaaaaagttaaaagtaccacatgccttccacacttctaaccctttaatggttacatccccttccttgattatggtctagattccttggtatagcacacagccatggactctatgcctccttccagctttcagtctttgccagcccacaacaccaaacacatacaatttcaaccacccattaaaaattctagcacgttctttctaacaaatggtaccaaggcacccgaatctgtaaagttggactccttcatcagaagttgtgtaaatactaatttacaatggaccaagacctaaatttaaaagataaaaatcataaaactcctagaagaatttcagtaatgaccctcgcagcaatatacaaccacattgatataattataacatgactgttataggagcaatcaatcgctttttaaaaattggatttaagaccctcttcaagaaatggaactcatacttgacattatcaatgaagccaataatccatggctagataagtcatgggctttaagagaaaacctaccattgtcaccctgctaaatggacataaccataaatgactcccagtgaatcattgctataccagtagatcactgcatcaattaaccctcaccagagaagtttattcctgctgcagatggcctgtcttaaagtattattcatcagtagatcagagaatgagagatgggaggggaagggctggatacagggtgaacatcagaagggtgacttcatggtgagggttgttgggttttcctgtgggctgctggatgaatgacggcgtaagggatggaagaaagtggatcctgaaatgcaaatgttcacagaaaggcatctataggttttgggggaaagatctgtgttgtgacataggaactaaatctgacactgcatctcatcttcagcccaccccttattggaggtgcattatcttctcattttctgttccatcccaaaagtttaacatctcaggaaatcatgggtctgaatcttccaatggaatgaaaagaggattgaagaacagcaaggtggacagatagaggatggatgctagctagctagataaacagggaaacagagacaagcagagacagagagcatgagtgactgcattctaggagcctgagaaagctggagaagaatggggagggccatggaagagtgatgtccagcagcagtggtcctgagatggggtggggaaggaaactgccaataagataaaaatgctacagagaaatcagctgggatgaacacacttgtctttgggtgatggaaatggaccagtccttggatttgacgggaggctgagatgaatctgaagcagaaatcagattataggagatagcatacacaagggatgtgtagttgaatttttggtttattctctttttattattatatgcgtcagagtgttgtgtatgagtgatagaacatcctgttcagcatcgctgaataatgaaggaggagtttatgagcttgaataattgaaagcacgaggctagagcatggcaggggttgcaagttgaaatggtatcataaaatcttggtcttttctgtttgtccactttcgcatgctttttacctcatcctttagttttgtgagacatcaagggtgccagatacttcaagttgacatcctagcatgaagctaagcagaagtgagaccgtgtctctttcttgcagatctaagaattcctaattgtatctacttagactttatgcttaaacttgaattagcagtgaccaagaggagagagttccattgtgctgatagccaggatacagggacagtgtcagttctaggctgatgtattagttgcatgttgctgtgttacatacttgacagaggcaacttcaggaaggaaggggtttcttacgttcagagtttgggggtgcagcccatggtggtggggaaggcacgacagccagaacttgaggcagcctgttccatcatatctgcagtcatgaggtagaaagtgttgaacattggttctcaatttcctttctcctctttctttggtgcaggacatcagccaacttaatggtgttgcccacatttatggtggctcttctcagctcagttaacttagtctagatatttattgctccataggcttgttctctttagtgattctcaattctgtcaaggtggcattgctaaacatcacagtccatcaatccgggtgtagggacttgtgctttgattgattaatccttggtcatatgtgcaacctgtaatttgggtgggggtcccagctgaatgtttggaccaaagatcaagagctgctctaggtgttgcagtatgtatcatggtctagagagacagtttccattaaagctgtggtggacagagctagagtcagtgagtggaaattattgatctcagtacatctctgctctgagagaaagagcttcctgtggagtagtgtaataaagcgggcctgttgttgatgtaggcagtcagctagcagtggggacatcaaagcaaacaccaggaattaagtgacaacagcccatcttgtctttccaggtctatgatctcacatgtctctataacacagtaaagaaagcatctttatcctgaagaagagggggaggaaagggctgtaggagacagaggggctaaggacaccacaagaaaacccatagaatcaactaacctgggctcatagggtcccagagagcatgcatgggattgacctaggcctctttgcacatacttaacaattgtgcagattggtcgtcatgtgggactcctcacagcaggagccggggctgtctctgaatctgctgtctgcctttgggatccgttccctactgggttgcctcttctggcctcagtaggagacaatgcatctagtcttactgcagtttgatttgccaaggcaggttgatacccatgggaggcctccccttgtctgaagagaaagagaagaggagtggacaggggggtggggagaggaggactgggaggggaggagggagagggaactgtggttgagatacaaagtaaatcagtaaattaatttaaaacgaatgcacctttacattgaaatcttacatgcatataaaaatgcaaaccaaaacatcatgaaactggggcttgggagggtagcttaatcagttaagtacctacctgtctcacgaatatgaggccctgagtttgatcctcagcgccccataaaaattggcgcatctgtagtgggcagacaggtaggtcttagagctcaggtatgagctccatgtctcaaataataaggtagagagcaggaaggctccccatgttggtctctgacctgcatatctacatgtatgcatgtgtgtccatatgcacatgcgtgcacacaaaggaacatgtatacacaaagttttacaaaacagtactcttctttaacacttgtgtttatactttctgtcctgtttgattttatttaaaaagtcccttgcaatatacaatccatttacttgtttttcccatacctgtgattaagtcttggcttaacaatttgaaacctcatacttaggtcccctgtcttagcacatctgcttcccacggacaaagcttgaagatggggcttgaatctggcctctcatgatgcccatcatgctagagaatgaggaggaggcaagcctattcaatgtgtgtaagcacctgattctgggtggtatggtttcctgacatctgtcagagagctcctagcccattgagatgaggtactcatctttgtgggccctctgggcattgttggcaaaggctcacttgctggttgtgggtgtaggatggcagaggtagcctggtagtctgtctgtctgcaggctatcagtggctgtagcagcactagcagcagtttgtgctgtgaggttgagtgtgagttctttgtcaggcctctttgctgaaagtgagggagtggcttttaaaaataacatctttttgacttgaaacaagtcaaggcagagagaggagacaattagacactgacatcctgtttagtcatctctccagagagactattttcagaaccactcaatagaggttcacaagtgccgtcaaggtaggtgacatgacattgtaagttagcgttcatcatgagacaccagcaggttaagttgagcatgggggtgatgtatgaggtgggcttcttactggacacagattctgtgcagagaaaggcagagtttaagaactggctgccacaatagagaggtaaagacttcagagagtacaaagcacattgcattatgaaaggtgtctgactggagcgtgatctaagaataaaatatatatggtagtgaagtaagagaaagaccaggccaccttgagggatctgtgtttacttgtaggtacagtaaaagcaataggtagcactgttaagttctctgatggcagccaggccagaaatgcctcatgctgttccccccaaagtctcagagaacagggaggctctgggggtggaggactggggccactccagagccaccttcagtagagtcatgcagtccttcagtgcaggggtcctctgttgtagcatgagatttgcagcttatttaaagttctattctgccccataagtcatacttagctacacttagtctatacttaaatgggcttactgtaggtgaaaggtcagagtcaggaatggagccgtgagctgaatctgaaagatctatttgaggacattcataaatgcatgcatttaaatccacaagcatctcatgttgcaggattttgaaatgtgggtggacagagaggttagaatatgccagctcaggtatctggggatgctgcagttccattctgggtaccctgctgtatgagggtctttagagtacatgtcttgatgcctcagctgatagctaacttcaatggctgttgagcagttaagagtaactaatccttgtcatggactagacgggtatcaaaagacggagactctgtacaattgactccatgaaactaggcctttgaagttgaatgggccaatgcattgacattgctcctccagcccacttacttgccatgtagtttagttacgtgaggctcccactagataagcaatacggtggctccaaagcatgaagcaaatatgtgcttgcttttgcctcacatcaagtaaggtaaaggagggagagaaggcaattcaagaggaagggcgttctgagtacgtagtttccaagcttgaccgtttgttcctcaagatttcgcttatttctttgtctctactgtacagtgaaacacatttggatttgtgtggctgtgatttatgcatttaggccatctcgtaaagaattattcaagagtcacaaaaagtaattcaatattaaaatataatgtgcttctctctctttctaggtggatctggagcctgaggggaaagtgtttgtggtaataaccctaacagggagtttcactgaaggtaagagcaagttgtgagtggtttctggtgtgtgtgtgtgtgtgtgtgtgtagttttggcacatgattaagaggaatgtctatcgatggaaattataacaggagcatttcctgaaagatgctttaaaaccacagtgtaaattgagctgagtgagctctgtggcccggcaggctactggttcagatccacaagttagcgtctattgtggatcggttaattttgttatcatgtccactgcggctcggttcttacccgttgtcatcctagctaaactgctggatcgttttctttctttggagtcacacttgttgtattgtactctagcgtcttgtgctaggcttttggtttgcccccaaaagaaatttgcgattcgcgttctctttttcataatctccactttattcttatcctttaaccaattctgtgctttagtattcggcagacagctactaaactgtcccccacaaaccaaaagccattttttaaaaaaatcgaggcaaaaaattatacatggtgaaacgaaagatcaaatgtgaataacttgaatttcagcaaataagccaatgactcagctctgcagtccagttcttcagaaggttctctgtctgtgcttcctgttggtcacccctgtggcccaaggcaagacgtataatacagtctcattcccatgaagtatttctgcccattctagaagtttgtgtaaatggaattttatagtgtgtttttttggggggtctagtgtctttttcttagcatcatttcttatggattcattcatcattgtatctcagtatttcatctttattgtcaatcgtattccatgtcactctgccatggagacaaccgcaaaccccccagttagatggaattgcctttaatacagcttacggaagttcttatgccttatgaatggagggcctttgtgaaaatgcaaacgacaactgtttgtctcagtttcctctctgcttgcccccttttccttcctcctggaaactgaagtgacgttggggtcttgtgtgtactctgcaagtgttctacacccagctcttgcatagccccttccccatcttctctttttgagatgggatcttactgagtgtccaggtaaacctttaaacttatcttcctttctgcctcaacctgccgagcttttaatttagccattttttttaatttaggagattttatttacaataaagcccagtgtgtcagcatcatcttccatactttgagcattttgtgtcttctttatgaggtctatcatggagggtcacagagatttgttttgttttgtttgtttgtttgcttgtttttgtttttttaatgttgcaactttatgttgaagccagtgtgtgaccttaacgtctgtgatatagcaggaattcagaatatattcacagacactagtaaaagctccccattgtcgttggcccgccacagaacttttgttggaagtcagttgatcccgtgagtgggcccatctctcttatctagtctggatgttgatgtttgggcgtgtttgggtagtggcacacgctgtgcccactgtccatttgcagtaagatgtaagtcacctttgctagtgcttccttagaatttaaggttataattagctggtcatagtattttgaattttgatttctgtttcagcatcggcttatcatttccatacaggaaccttctggatattaaattgaatttgagatgatggctgtctagatcagttttagcagaattggcagcttattcataagtgtcttccacatggcacatctctccacacaatggctttgaataattagtattattggtattgtataattttcaatatagagcttgcttgtgctttaatttttttttattgctaactactttaaggtttgtgatgttggaaatggaattttaagaatttcattttaaaattagtgtatggaaattatgttttgtacattagctttatatgccatggcttaattactaaattcactactatttccaataaatgtttgcatatgcttgtatagtaaccatatcgtctgtgaatagacaattttatacacttatgcccctttaaatgccctcatggtatcccgaggctactgtgacctaaatcatggtctcatacctaccctttctaaggaggaagaccttgccatcctcctgcttcagcctgtggagtagttggagttacaggcatgcaccatcattatcatatttttcttttcttaacatggtaaatctttaagcacgaggctctttagctgcagatatttgactggttgactttatcaaatgaagctttttctagttctggcatctctcagctcttaaaaaatggtaggagaaaaaaaccccagaaagtttgaagccaatttttagtcgggcgtggtggtacacgcctttaatcccagcactcgggaggcagaggctggcggatttctgagttcgaggccagcctggtctacaaagtgagtttcaggccagcctggtctacaaagtgagttccaggccagccagggctataaagagaaaccctgtctccaaaaaacaaaaaaaacaacaacaacaaaaaaatggtaggagaggctgttacattctggcaagtgctatttctttctgagagtatcccgtacaagtcttcttgtattcctcttcatctttctagcaagtacttacgtcactagctgatcccccccccctccacacacacacaaacccaaagtcatggaacttttcaagaatgggactgttctgcttcgttcaggacaaattccacagtcctggggcacaatacgtactcaacaagcaaaggcaatctggtgattcatcgaaaatcctgaggattttaagtctttttaacttttttagtattttgctccatattttcaggacatcttgggtctcccttgcgcagctacagttcaggagatttcaaagcatgtagtctgtttgcatattcagcattgatgtcttgcaaattggttacagttcctttgagagcagaaacctttcttttgcttgttatcttggacatggagaatccgggacagatgaatttactctttgctcagtggaataaaattaatgtgatattctacgtaccggccgtggtacagggaaacccagaagttggaaaagaagccagaagaggagtgggtgaggttctcgccttcttgcaatgctgcagggacacgtacagtttgttgtgctatggcatatctgactatgctgccgacattgtgggagcgctagctctcttgcactaggagtttctaagatgtatcttccttaattgtgctgatgtgggaaaacacgtggatcttgccttggtatttatttctcagtcttagtgattagaagggagaaatgacagattatttgggggtgagttctcttaggtcacagcaactctattctgtttggagctggccctttgtgacaggccgagtttacctttgacaactctatctccctctaagccagtccttctttctgactccggtaagaatccagctagctgctgctgaggaagacaatgagctcattggctaacaacactgtgccaacagtgctcgtggtcctagcgctccaccctaggtgcatttgcatattttaaaagatgatatataatctattttgcacacaagaactagactttaatgttgggatgttgggagcagaggcatctaagtgtgggacttatatgtaggaacctttagcgctgtggtgtctatgggagcattgtcttttcagttgggattctagactgggactcagcttcagctcacttgtggctttagtctaaatgatgttctcttgtcaatgcagaggatggaattcacattctccctctctctccctctctccatcccttcctctcttcctctaatcttcttctcccccctgcccccacctctgcccctttcccagccgagacaccagccacagctgtggcaagagcctgactgcctcttagagaatgtgtctggcttgggcttgctcccagccacccccctcatgttaccacaggggttgcttgacacaggtagtgtggaggagctgaggctggaggcatgccaatggaggatataagaagagacttgggactggacagtgccattcgtagctgttaaacagcacagtcttttagtctctgaagggcagccaagttagtaaattgcagagtacacactacttctagaattggagttgatgatgagggaccacggaagattctgcttgtgtgtgtgcagtataatgtgcatgtgcatgcatgtgtgggtatgtgcacaggcaaggggaggccagaggtcgacgtagggtgtctttttcaaacactccccaccttatttttgtgagacagtctcttactgaagctggacctcacttattcagctagactggctggccagcaagcccaaggatccttctgtctgcttctccagatcagggattcccagcatgcaccactgtgtcaggctttttaaaaacaaaacaaaacaaaacaaaacaaaacaaacaaacaaacaaacaaaagacaacatgggcgaaggggatggaacttgcagttcttcgtgtttgtgcatcaagcacgttgccaacgaagccaccttcccagcccctggggaggaacttaagcagagagaagtgtgatctgacttggtgtcagttggttttaaggcttgggaggagagtgttagatcgtaagagctcagagtgtggcgagccattaggagactataaggggaaactgctgggctcgagcaaaggtggaatctgaaggaccagacaaggatggtagcgctgacagatacatggaagcacaatcaatagaacttggagatccactcagtaccagggggaaggaggactctcgagggttgctcggatggtattgtgggcttatggctagggtcaaaacactgcatggacgataatgactttaggctcggacaggagaatttgaggtatttgtgagaagtctgggaagagatgtccaagttgaccctgaaatgaaagtccagactctggtcaaatattccaagctctaagtgccaggtagaagtcagacacatggctggagggaccagtgagaagctgtagagaggcagacctgaccaatgttgtagctctgtgtgactataaccaactaccaccaactacagctactaccaacacttaatgtttagcttagagtatgtcaaatcaacttaaactcccttgtagatttacctactgagcacttgtcttactaacatactcattactgaaataccaatattggaatgcttactgtatgttagggagcttcccaaagagcatctaacatactccaggctggcgtgagaatgtttgatagtgaagattgaacaaagaacgcagcataaaagactttataaagcagtgtttgcattgaggtgtaaaagtgatatcttcattaagatagattcagaaaagctctagaaaccattgctttgtggaaagtcactagcccaggcctgggacagaaacagcttatgattgagaaaggtcaggagcagaactcccaagtgctgaggcagggacatggctggcccatggttattttgaaaagactgttttatgtcattctgctcctctttgaccaagtattcctggggtccatggtctaatccagttgggatttatgacagcggtgaaacagacctggatcttaatagacttagacactggcattgtggctactttagttgttatcactgtgttgggctgagtctcactcagagacaaggaaaaaaaaagttgaagggtcagaaaggtatcaaattaaaagcatactcacttgatttggaagggaaccaacagaaataaagtatgatatcctttcacttgagaacaagtcaagcagatgttgctatattataatgttattggaaaatacagagtgatgtcacacgatttggagagaatgtggatttgtctgactcacggttcctcaagctcaggtgtttggcccatagcatgaacatttcactcggcatgtcacctaatggaagcccagtgaggagggaggcttgtctgcatctagccaggcttccagagccaaccatggggatcagaggatgggagaatatctcaaatgccaccaggtaatgccatcagcaaaatccataggggagacgttttataggaagagaggtttgaatcctttgaccgatttgaaggaaaagaagagccaagaaaatagacattttaaccaggtataaggtatagatcattcttataggtggtgattatatggaattgtaacattatttaggtgtgattgtggctgtttaagataaagtgagcatctatttaccaacaaaatgatataacatctgtgctttatggatagggttaaccatgaattggttggccgaatgattgatttttgtgtgagtgtgtgtgtgtgtgtgtgtgtgagtgtgagtgtgtgtgtgcatgtgtatgtgtgtttctgtgtgtgtttgtgtgtgtgtgtgtgtgtgtgtgttgtcttctggagacattctgtctttacaaagaactattattattattatttcttcttattgacttgattagctcagaaaactctcttaacaaggaacttcacaaccacagaatgttatgtaagtgttaggagctgatccacccatcactcatgatgtatgagagcttcctgacagaaaggaattatcttcctcactctgtcctacctgcagcttttgactcacaacttacgtgggcatattaaaaaatctttcttgagtcctttagacatttaaaattttaatatacctccttagaatacataaaatcgagaattaagaataaaatagcctcccccaaaataccattccctagcttcaatttttaaagcaagaatagtacatgtattcagagttacagcatgatcttggtgtcataaaagcaactcagattctggctttttgtttaaaagataaatactttcttttttttcatttcatttttcttttagctttcttattaaagacaacaccaagaacatgcaaaatcagacaaggcagcctaagaaacccatgtccaacatataattattatgtaaattcagtagtcaattcatggagactggggagttggctctgttgataaagtgctcataggtcacgatgaagccctgagttcagatcccaggctccaacccacaaagccaggtgtggtgatgcacacaccaatcatcaggaagaggtagaaacaagaacacgggtgttcactgcatacgtatagtctcactgaattggtgagctctaggtttggtgagactctaactcaaaaaagaaagcaataaaggaagacactcaacactaacctctaaactctacgagtgtatacacacacacacacacacacacacacacacacactcgttagctgtgagtttgaagcttgcttagggaaacgggtggtgggtggtggttttatcttgagtcgtgtgtctccggggcaatgcagagaagaccctgggtgttattaacctctgcagcaggcagcgagttagagtgcacggtaagggtttgacctgtttctttctgcacgtttgcctcagtgttcccctcatgcttcctgtctcagaccacggctgcatgattgtgaagctcggctcagaccctgcggccacggccacatggacggagaagcagacgagacgaggctgttgcaaaactgcagcccacagtttcacactctggctaatgcttctcgcacctgccattttaaaaagaaaagcagtcacctctgctggcagttgatttatgatgtttctttgtcacctttgaagccctgtgagaatgtcttggcttaggtttgtttttttttaatcagctttaaaatttattcatcttgtttattgcattagtcttgggaatgagtgaatactttagaattcttccaagcctgagcaatccttgtgattggcattggaaatgactggcaagtgaagacagggtagaggaactagggaaggaagagatgatacttgcatctcttctccatggcatctagcgtatttgtggagcatcttctggggaccgggaagtgccacactcacattagaacacagctctgcctcattccttctgctgtcaggatggcctcttaatcatggagtccctgccatcctgaacattagcccatttgcttccaacaaacttgtgtggccagtgtggttctcagtgtgcaaaaggtgaggcagtctggggacagtgatttcctctgacccaatgtaagataaatgacagagctgaactccagtcagagcaagtccaagatcttttcagaatatctatctgtccggaacagggaagcctaggttgaggggttccatctaatgggccatcttgctgctttgtaatagggtagtgttatcatacaaggaggtgggagacttacttaacagccttgataatgacagttgattgaaagacagagctcctgttaccttattattgagctccccatgccaacacttgcatcaagggttacattttccacatatgagcttcagtgagcacatcaacaccccagtacagcattccttagtgttctttctctactccaccccgaggagaactgactttggtggtggcatagggccaccttctgcagagtctcccatcttgtgatactttttttgcaaggtttcttatgggctcctcctttgacatgaagatcagcactcccttgggggcctaatgaacatgccattttgtgcctggaacagcttttctaccttggaagagtgacaggcaaactgtagtaatggaacttggcaatttgtgagatattttcctaaaaaaaaataaaaagaagagtggattgagtcagttacttcaaagagactattgcagatgtttggtgcccgccatcaaaacaaaacctttacaccacaattaggctttcagaaaaaaatttatctctgcctttttttctgtgtgtgaatgtgttgtttatagtaattcaaaatcatgaatttttgaaattgtgtaatgaaatatatcaacttttggaagagttacaggactcagtaaacacatatttttcaaaatgaccaatacaagatattccaataccataatcatgctgaaattgttagactgaccagtgtaaaagtatccagggctttatctcccacattggagcatttgttgagttttgatggatcaaagaagaatagccgtagttggtgggagggctgttaaagtgcttcccctttaaactcctctctgtgtgaggctggatttcgcttactctttaactagaaaaaacgctgtcgtggataaagtacaggaagagagggaagaaggaagctgctgctttcaagtcagtcatcatttaaatttttaaattataaaacaatgtgatcgtttaacgattgtttcattttgcagtacatagttgccttttgaaatgccatgttactatggaatggcttcttccttacagtcttgagtcaaggaagaaatgcttacactttgacgtttcaatccccaatgtgaccatattagtaaaatctatacaacccaaaactctcagagcaccagtagctttaaagtgtataaacgagtcctcaaacggaaaagagaaaaactttttataatttctaggttattgtccccaaagctcaccatttagtgggagaagacactggcagatgttcatttaggttcaattgaggactattaaaattttagatgctgtaagcaacaagctaatttagtcatgtttgtttgtttgtttgtttgtttgctttcagtgtccttgagtgggctcgaacttgttgcgtttttttaaaactataacattttgttattgttattactataagatacatattttcaaccagttgttccttacaagcctgctctcagaaaaataagctcaggaagagatgataccaaaacaatgccaagcttcaggtggtcggtcacaaggagagtgctgactgtctagctagggctgatggagacagcctggttacttctgagcaggtggtcagggctgtgagtgcaacaagctgccctgtgaaacctcggaaccctgctctgtgtgtgcatgggccactcgcctgttaactgcacactgctttgaaaacagagctctttgaaaaacaaacaaacaaacaaacaaacaaaaaaccggtccagctagtttcaggagggttttcaggctaatctttctaaactgaaattacaccgatgtcagattcttccagtggaaaaaaaaaagagttgagtagaacagaagttatttaatttttttgatagaaaaaattatttcttcaacgttttttctaattctatttcagtgttctctccagcagttctttgctttctgttcattttgttcaaaggaacgagatgtaacagaaggctcttcatttttctctgctcgttgtgtggatgcgatgttctctttctgaggtttcccaagcaacaccttgtgtcaagtggcaggcagagggcagaaggacacattccatgtccctctctcccctcctcctctaatcctgatcgtcagcatcataacttcctcatgggttctgaggcttgtgttctgggactcaactgcgtgctggatgactctagcaggacattggtgtagtggcctagggttgtaaaactctctctctctctctctctctctctctctctctctctctctctctctctctctttctctctctctttctctctttctctgtgtgtgtgtgtgtctgtgtgaatttatatttggctggctgcacagcacatgggattgagcaatacttctcaatgactactactccatcccgctcatcaagaggaggtctgttcatctgtccacccacctccccacctatccatccatacacagagtacttacataaaaaattatgtaattgatatatgtgtttacatacataatatactttataatagccctgttttgttctcagagcattcagactttggtgtgtgggcagactctagcaattagactttttaagatactgcaatttccttactctgtggaaaggcattggaagcagcgatgggattgtgtgtatgtggttctctgttcaggtggctagggagggcatagagcatcatttgagccactgaaggaaggaggaagggagtggtctgggaaacgggagccagagaatgagaagtgtaagtccttagaagggatatggcgactgagtgggacttgcagtagggaggggatgtagagaggcctgaggcctgcaatgctttgggtgtcctggttgttggcacacgatcagcactctgttaatgcctacttccatcttccagaaaattcccatatcacttaaatgtagctcactacagcatggttggtgcagcttcccactgggccacgtgaatatccacttgtaactttgggtagaggcccagagggcagaacgtgtcccctcttaccgtgatttcatgtactcggctaaaacaagagttttctcaagttctgaaaattctgtactggtttttcattgttccaagctaccccggaagccgtctaaccattccgagctactaactttattacagcttcctaacccctcaaagttcactttgcatggagcttgaatctgataggtaacaagtctgtgcactgcccagggtaattagctgtaatttagttttgagttatggctcattaaaaatgacttatttatgcaccccactgttcgaaaacacgggtcagaagattgaggctggagcctccgttcttatctccgagcgagccgtcatttgttgtgtagctttaatagatgtcggtggcgcatctttcccctgaagctctgcagctgtaaacaggcaggagcctggtgtggggagactcagtacctttgagaagcttaattcttcctgcattctgatgaagcttacagtttacctatgaatgtatccatcgccctctgagtcctctggcacagaatttagagtttaccaagtagtgaaaacaggaacttccaaaatatgaagtggcaagaggaaaacttgttccaaagtgatgggttccatttaaattttcggggggaaataggcctcagactgaatccaaatctttgaatacgacgcagaagcagccagttcgaacaaggcatctgcttggctgattcttggccttttttgtctgcctccattgtatactaaatcatctcatttgatcaaaggaaggtgttgacgatgggaagagttgccagttggaaaaccacataggagaaaatgcatagaggagtggattgctttggtgtcgtcctttaagagttgaccacggaccagccagatggttctgtgggtaaaacctgaagacctgagttcaacccccgagacccgtatggtggagggaaagagctgactgtgctggctaacagccctggaaatgcctgcaagctctcagtgctggtgtggggactcagtccagccttgaaagtgatacgatccaaatgtgagtatgagttctggctcagatgctatccaaggttagaccagaggcagtctacaaggaacagaaacaggcaggaaaaggtaacgttacgtgattccagttaaaattgctcccacactttttatagtacgtcctctaaaaacaggctcgattggtactctgtcttgaaaacaacagtgttttttttccaccctgtatttgtcagtgatctgtttacaatggcacccaggtactaattcttagaagccagaatggatcaaatatctcagcgtgtacctcccggcctgatctgaaagcatgataatgtcactgtcctggggaaggttaggtttgcaagattgtctcaggaggtcagtgtttctgactccagtgttgatcttttccttcatgttgatgggcccagtgccccagatttgccatgtctaggcttggctatgatctgagtgcttttctgtcagttttctgacctcctgcaccgagtacaagatctcacctattgggtagagactgttatggtatatctctcatactgagaaagggggaatggtgaggtttgcatggtgggccaggatagggagactgagagcatgttcttcagtgacccctttttaggctctgattgtgtaatttgcatatttaaatctccctgttggagacattttggtaatgagtacttagatcatgagtttaggtgtctatgacaacatactggctcttaactaagatgtagtggatagtgtctattctgtgggaggaaataactggctaggtaccctcatctcgtctcctggatacttgagccaaaggagcatacagcagttcctagagcagataatatcctctctcatcgtgggctttttgaaggattcataaagactgcagtttacactggaagggagccatactatttaacaaaaatattttgtaaacaacttagtagggatgatagcttcccctctttagggagagctgaggggacacccagcctgtgttgtagaagggtcacagtcaggagtatctggtttgtcaatcttttctacacctctctcccacgtgttccttgaaacgttccatttctacattcttgctctttgctggcttgatgcacagaagtggcctcccatacagctcgggataatatagttttactcttctgaggggctttgggtgggaagaagtgataaaggaatctctttcattcttttgtttgaccccagaaaataagtcctgctttcaggtggaccttttaaaatgggtttgcttttagacatattaacgatccagtataaccgtataacaggtcaaacgagctaattaccagccttttacttaataatggtgacaaccccctacccatggatggctgttgtggggggtgtctctactacgctggatatgtggggtgggtggctagaagccattagctttagatcagataaaccagttctgccacacgcaggtagctgagtgactttgagcaatggttgccttgtgtatggaccaggggcctaatgatccccacccctaggattgctgcgaaggtttcgggagattatgcacaggagcacacacccacagtgttacattagggtctgatgcagcgtgtggaccccacccacttgtaaggaaatccataacccatttacttctaggttcttggtgaatcatgaaaaaggcactggaaaataatatgatgacataaaccctgtttctcagccattgtttcaaattctaggcagcaactgaatgtcacaggatgtatgtcagagcggggtggggaaggtgcaggaaggttcattctccagctgcctcaccagctttcagccctacagctggaatgtatattgcctctagatccacccattagacttgagtctctccttccccgaggcactgccctaaggtctggctaatgccaggggctgctgactggcttctggggagcagctctactttgaatggtatagacaaaccctagctgtaagtatccctagtgctgttctgagggagtgtttagacttgagctttaaggtgatcagagaaccagagagttgtcatctcagggagttgctgtctggggtctctttgcaaagcattcccacactagctgcattcttcagtataaaggaatacagtgtgtaccttctccctgctctcttaagatgaatacattcatcaatatttacaggacatttctaagtcccagaaacaagatttaagagattgaataagacctgaccaagggagtggccactgacttggttattaggtcacaagtagatgggattgactcattctttgtacttatttttttttatggcctttggtctttcccccaaatatttgtcctcttttattaaattaattctcatttttaaggtaaaatatgccgagtgtttgtggttttaacctgacaggctttgttgtcctcaagttaccagataacatctttagcttgagtcctcaagctggttttgtttgcttgctggcttgttttgtttagggcttaaccaccacccaggtcctttgtaaattaaaggtggtaacaagctccagagaaaatgcattgaggaatccggaacttgcataattgattaatatacactatgcaaattttgtaggcaaaatgttaattttattacatgcaaaaggggaaagatgcctgtttctttctaatctgctctgtgctttgtgggtatgtgggtgtggggtcatatatgtgggactatggaggctcgtttgctgcagtgtacaaatctcataaatgtgtattcaaggcccttttcattgagggctgctgggaagtcctgctgccaggagagaatggagtctatctcagggtatttgtttcttggtatttctggcttgtggagtatggggaggttgactttcatctctccattggattcttgggagccatgttttctttgtccaagagtttctgtttgctagttcaaagaaaagagtcatctgtggcccgtgtgcctgactttttcttctggctgtggaagacacagatgagggcagccatcagggccggctctcttagtggtcaccctcaccctcactacttctgtcagcttgcacttgtgacaatgactggtatacttggctaattctaacccacatggcgtcctgaagcttgcatgaccacatagatacattttagtggagagtgatagcaaagatacagggaagagaatgggatgtgatgggtgccatctctccgatctactgtcagttgggtagctaactctcctggagcaaagagcagcagagcccaccagggacagcatcctagtgacctcttagacacatgtagaaccacgtgacagagggtatcattcctgggcagggggctgagccacccttggggctgccttcctcatgcccatggtttacgcattgctctgctcatatctggtgccacctcaagtgactaacattgcaggtgtcaatggttgtgtagtaggaaatagagtaattattttctctctctttctcccccccgacacacacagagaaacagagagacagagacagacagacagacagacagacagacatcttgtggaatctcttacttcagaatgatcagtgggtaaaactagagagttatcaattcaggaggccactcccagctaataaaacatggatttatcaggcctttaaagctggtgggataggtagtcctcggaatactcaagggggcttttacagttactcaagattttgtaacaaggatagaatttactcagctcgaacataacaaaatatggataaaataaatgaaaaatgggtttttaatacactagctacccgacaagagaaatgggaaacatataaaatttatgtattaaaaatgccttgaactgggtgatggtgagacaggcctttaatcccagtattcaggaggcagaggcaggtggatctctgagtttgaggccagcctggtctacagagtgagttccagcatagccagggctacatagagaaaaaccctgtttggaaaaactgaaaacagaaccaagaaagctccctgagctaggtgtgcagttgtgttggtgttgacacacagcttgcctggaatgtgttaggtgtaggtttgattccccagaagcacaaacagaacaaaaggaaagaaattcagatgtagggccttgattcattatccagcgggggtcatgaacctgcactgagagtttcagattgtaggaagaagaaaggtgaggcacctgggtgcctctgttcagggtcacaaggataagacttcggggtagggagggagggagagagagagagggatgagggannnnnnnnnnnnnnnnnnnnnnnnnnnnnnnnnnnnnnnnnnnnnnnnnnnnnnnnnnnnnnnnnnnnnnnnnnnnnnnnnnnnnnnnnnnnnnnnnnnnnnnnnnnnnnnnnnnnnnnnnnnnnnnnnnnnnnnnnnnnnnnnnnnnnnnnnnnnnnnnnnnnnnnnnnnnnnnnnnnnnnnnnnnnnnnnnnnnnnnnnnnnnnnnnnnnnnnnnnnnnnnnnnnnnnnnnnnnnnnnnnnnnnnnnnnnnnnnnnnnnnnnnnnnnnnnnnnnnnnnnnnnnnnnnnnnnnnnnnnnnnnnnnnnnnnnnnnnnnnnnnnnnnnnnnnnnnnnnnnnnnnnnnnnnnnnnnnnnnnnnnnnnnnnnnnnnnnnnnnnnnnnnnnnnnnnnnnnnnnnnnnnnnnnnnnnnnntaggagggggcaggggactcatcttaaaggatcagaaatgattttgtctggtgcccacacaggaccagaaataaaacctatacctaccactaagacctgtaaaccagaggaaagaggctttggggcacagggctgggcatgcagaaagtagacaggtcttgtcttcctggtggaggataactagccctgagtgaatctgcaccagtctacctagcaaatcttaaaagcaagatctgatggtatcaagctatttccaagtaccttaactgggtcacagatgaaactgaaaatgtacggtgaagccatctagcactcagttggcaaaaattcacattgtctggcattcaatcaaaattcaacaggccaagaagcaagaaggtattacccacaccgagagcaattaatttgaaactgactcagaatgcagaccatagaattgacagacaggatggttaatgcattgataactgtattccccatgtttaaaatgttaattgcaaatgtggaagatttttttaaaagtccccagttgcatctcaaaccatccccttgggagctcttgaagaggtcactgaggagagtgacactgcctggtccaggaagcactcgtcacccaccatcttacgacactgatgctcgtcatgcctgctctctcagagtcctgccctctgacatctacactctgaattttgagggtccttctggagccctgtagctctctcttgcttagatctccgggtgtctacgcctttggtcagtgttcttcaagggtcagatctcagctcccgtccctgtcattcagagtccaccggctctcctctggccatggattgtactctattctccattccttcatctgtgtctgtggcctgggtctcctgagtcctagctctagtcaggtactgcgcactcctacctgcattcatcctttcacttagcaagcacacatctcccatccctatgtttatttgagtataacatgcagcatgtggtggaggaaagtatccctccacactcccagacccctcttctaccaacctcctccctcttctgcccccccaaaacagttttgtgtccttgactagtttttctgtttccttccccaatttctgcccatctctctgtcttatgacttgccccgcctccttgctcagggaacgtctgtggtaccacattccaattctgttctccccgtgacccttggtttcatcacctcagactccgcctagtcgccctgtttctgtcattgcttccttccgggatgccaaagcttcaacagtgaacacaagtatttccccacccaatgttttgtattctcagctaagttaatagctggttgagtgccctgtacccctcccctccctaacatggtgatatgtgtctaaagaagaccaagaggaggcgagggagcaatggctcttgtcatttcccctttaacaagctgctgcagtggctgctctcctccctgctcatgctgtattgtcctctcagaggttatgtatttggggattttattcagccagataaatgctgaggaagagagttggtcttgagtgagggtgtgtaatctccaatcagtcaggaaagactcagcatgtttgtatggctctattgacagtacttgctttagactgtgctgtgcaaattctttctttctctttggctaccagatcccttaacgccatactgggtcagctttataactttcctatcaccctcctttaaaataaaaatgattctgattgcagtaggatgcacataacatgaaaggtaccacctcataaatgtagggctcagtggtattgagttcattcgctctgcgtgcaaccactctgtccatattctgagaccttgtcctactgcaaaattgaacctgagtgtcagctcaacaccagttcctctgtcccctgacagccaccatgtaaccttctgtcttaggctttcactatgctaagcacctcacatacgcgccatcttacagtatctttccattctttctagccttcttttcccaccacatagtataccccaaagtcagccacattgtattatgtgccagaattgtgactttacccaaagatatccactatctctccataattttgcttacctagtcttctgccagcacacactgttactcacctttagttttaaaatgtgttcgtactattaagcttgaaccttgtgcattttgaaaatttgcctcagactaagtggacactttcttagctcaccacctctaacttggctcagctgcttggagtgaagaagaggccgaggtctcgtcctgagatctggttccccttaccatctctccacattttctttcttctgttccctccccacttgccccggaagaattctcttagagtttccctcttggagtcatttctcctccaaagctctgcctgcctccaggactgacagcccttctttcctctggcgtattctgactctgaagacatggagcagaaatggaagtgttctcatctccaagaagttcccagaagagaaggctctgagagctttatagtggggtactgggccctaagattctgggacaagaggaaaagtccacccaatatctgtgggaagccacatgtgccgttgctgagtggcactgactactgctggccaccatgcataagattggacaaacaaccaatgtgtacatatgcagtaaagttttttgcaaaaacactgcctggcccaggcatgataatgaggttctgtaaggtactgagagtataaccaatcggatgtgagacatgcaaatgaggtatgataatgaggctcagtgaggtactgagagagagtagccaatcagatgaggaacatgcaaatgaggcttagtgcataaccaatcagggtatgagacacgcctctcctaggcctataaaagcagcaccagctctgggcaaaaagtcttttcgcctctacaatcaagctctcccaataaacgtgtgcagaaggatcctgttgcagcgtcgttcttgctggtcgagtcgagcgcgcgcaagaaatatcctgctacgtttaaactaaaaaggacctagtagcttcctatgccctgtttagggtttgcccagaaattcttccattttccccttctcatgtctaccatacttggacatgaggtgttgggattttaaaccctttattaatctctgcaggtggcttcaccctctataggagccagcctcttccttatacatgggcttctttgaaagggtttttgtcaggctatctgaaccccacagtgctttagcaaatagaatctttattactccccccttgggcagccttccctgatgtctcattctcagtggatgggaagtgcttcattcctaaggccgagggaacaaatccacacaaagtggcttcgctgctttgaaccctttgattaggagaaccaccactaaattccccagagccccgcagaaacatctttcttggttaccaataatatacccaacctagtaacagaattcagagaattgaggaaggaaattaatgaggtccaagtgaggctggagaggtggttcagtgaataagagctctggctgctcttccagagaacttgggggttgattcccagcacccacgccatagctcacaatcatctgtaactctagctctaggtgttctggtgccatcttttagtctccatgtgtgccaggcatgcatacggtgcacagataatgcatgcaagcaaaacactcatgcacattatggtggtggtggtggtggttgttgttttgtaaaattaggaaaagtgtgtaagcaatagatgtgttgatgcttgattgactgggatagtcagatacttttataagaaggtctccctctgcctcagaagttctggaggaggggaggagggaaggaaaaaaagtggggccagtggggaaaaaggccgaggaggaagtgaacagttatcttgtgtcttataggccaagaccatgcatccactcaatattctactcccatatgccaatgttatggcaccagctgtgtcctggtaataaaacaatgaatgggacagtatttgtattttcagacagttcacagactcaagcagaaagccatgtgaattacttctgtgcgtgccatgtgatgcttactctgcctggagaggtaccacagctttgacagacacagtgactggcatctagtcggaagggctttgaggctgcagtgtgtgtatgtgagtttcatatacacgcctctaaggactgatgtggaagctgtgcttcttggctggatgtgtaaagtcaaggccgtttgatgggctgattaaacttgaaaagggagagtgtgccttctgccacctcaaaggcagctgtttattgaatttctccaccctgtgattgttttgagtatggaaagcttcctggaggaagacctaacagccgcacaggtctgtcctgttctttgactgtgtttactgaagtgacttctgggcttgtgttcttacaatgcagccttcacgtacagtgtgagagagaaaaaaaactgcagtatagatttagtagatcatactctgaagcatattttgtgtctgacagatcaggcttttattccccatgatctgggcatgagcttatatcctcatgacagagagtcagatgtgtcannnnnnnnnnnnnnnnnnnnnnnnnnnnnnnnnngggatggaagatgaagggggcttacaggaatgtgctgtggagctgtgcattctgtaagggccagcctatccatggctgagtgttacttccttgtgccaaaaatgtacctcagagaacctcaggatagcaagaagcatttgtgaaggagaaggctggctgtattccctccccttgaccccagaatcagaattcctcttgtgtgtttatttttggtaccaaaaggtgccggttaacccctgggattaactagaaccagtaaacagtaaatagcagtgactggaaaagtgtcttggagaccgaagagcaaggacattaacactgcagctcaggcagtgttccatcttgagcattaggctccaccccttcctaacttcccattgtggtttcaaatgaagaagccattgttcaccttccttcctaaaagaagcaatatatttaacttctgactctctgccagactgacagagaactaagctctgtgaaggccacacccatggcttcccacccgcacaaacaggctgcccctgtctgctttctctgctgattttcaaggggtctcagctggaggtttgctgctgtgtgctccatggtggctgcagggcccttgattctcccaaccagtggtgaattgagcgggacaaaagacagactcttagctctttataacagcttttgattcgcctttaaaagcaagcgtctgatgtgaaaatccgtgctatttctgcactttaaagcccctcacaaaggaccaaccctttgttgaatagtttggagttcatgcaggtgtcctagagcagaagttttcatttatttttaagcaacaaataccttttccctcaaaggaaggtctccagagcacaagtgctgtggggtttctcgcgttctctatgctcactgccggtgggactgtgctctgcacagtgggctgcctgccagcttccctggcctgtgcccacttgatgccagccacatgcatgctctgctattattgtggcaatcagaaaaatgtctctaaatatgataaaagtccccagaggaattacaaagtccttcttgcttgaggcccaatacaatatggttcatgagactggttttcaaaaggaaggaatccaggtactagtggtgggattaggcccccatctgagagctctgcccagggtcccctgacggatggtttagagatctctgggtgttccagagcagggcagattacaactgttaaaacctgggcccagagagcctattgctaacaaagcaaaacaactgaactaggcagatgcataggtgtcttgaacctctgtacatgagacgcttgtgtgtgtatactctacatgtgtacctggggggacttaataaaggaaaaggaggtggctgggtgatgtctgccaggctccatagcattatggtttagctaccacagtttgccttgaccctgccttcccatcttgtgcatgcagtgtgtgtgtgtgtgtgtgtgtgtgtgtgtgtgtatttggtatttgtgtgagctcgtgtgcacttcagaggccagatgaagactttgggcttctgcccttattcccttgagaccctgtcttttgctgaacctggaacttactgctttcctgttacgctgtcagccagcaagctccagagagccttccgtctccccctcctcccctgggcttccaggtgttcatggccctaccttgctttttgtcactaaatgggtaccaggtatttaaattcaggtccttgtacttgctcagctagtgctcttgtccatcgaatccccttcccagcccccagtttgccaggcatgccagcctcaaacacatggctcccagcacgtgtgaatacagttggcccttagaggcatcaaactccagctcctatgaggcttagcaggactagttctgctcccggggtttcatggatggtctgtcttttgtggcctcttttgattagtctcaccagatttcagatcggaccagagttgttccaaagtcataacatgggtttttgtaccaagtaacacatccttgtgtgtatgggctaggtctagagcagtggttctcaaccctttaatacagttcctcaagttgtggtgactcccaaccataaaatgatttcattgctgcttcataactgtaattttggtagtgttatgaatcatggtgtaaatatctgatatgcggggtatctgatgtgcagcccccatgagggttgtgacccacaggttgagaactgcttgcggctcctgaagctaggtgctgttttctcccagcccctttgagcatgggtctcagggggaactctgggaatttggcacacacctctccacccctgctatgcaaactaaggccgagaaagcattgtcatggtctcttctccagacagaaactggaccttgcaaagtccaaaaccaattccactaagtgagccacttgtcactgggaaaagacaggctgggaacaggaggaagggagaggggattggctgcttagagcatctctgtcaatctgtctcccaagcaaactcagtccaaccctacttggcagcatgaactcaaccttaaatcagtggccagctgctgcgggtcttaaggatgtgcccctcatgctaatgattggtccggctgcaggtgaaggtctcgtgttcggctggcagcgtttcagttttctgaaagaccacatgaccacagcagttagcctgcagatgggagaaccaagaactgactctgtgtggccatctgtggctctactgagaaacccactcccttgggtcccgcagaggcaggcttcccattcctggaagagccagagatagcatgctgccggtgttggcagtcccttcctgctgtcttagattgccagaaagaagctcacatgcatagcttaggttggaacacaagcaaaagacctgacctctctcaccttcaactgcagttccctctggcacttgatggagggagaaggttgcaggtataaaaccaaacctgatctgagttttgaaggcatttgattggcttacatctccagtgtggatcgttgctatgagatgagttacctaaccaggaggactgaacgagactcagcaaaggttatcgctgctcctgttagtttttagtagtcatcatctagcggttgaaagagtggagttccagggggaactctaagctctgtcttccgtgtaaggagtagcgttctgagggtacatctctctcccatggttccctgtaagggatgccatttcctgagttttgcataccggtcacttcttatcaaaatgtgtagttagttttaggtgatactgatagaagcacaacagttggactaatattactaagttaattggaagctgagcgtagtgggctaaccccgtaatttgagaggctttggcagaaggactggaagtctaaagccagcctaggctacataatgaggctttgtataaaaatcaaagacccagctgggtttggtggcacacacctttaatcccacccctggggaagcaggtagatctttgtgtttgagaccagcctggtctttactgtaagttccaggacagcgagtgtgccacatagtaaaaccttaaaagacagcaaaacagaacaacacaaacacacaaacaaaaatgcagcagggattgaatgcatttggttgtagttgcagagagtattcctacattttttttccttaacctaatacacacgaaaacaattacacatgatcttgcctactcatttctaatcagccttttcacaatggcctttccttggcctcaccttgccagcacttggacaataggggagtttgctgtagagatctgtcaggcctccctgtgacctgggaagccttacacttctctctctggtcccaacctgaagctggctccttgtaaaactctcatacttacatgtctatcatacatgctccagtctggtcagagcacaaggcgtgtaaggacctaactgtgttaggctcttttacactctcactcccattgactgcctcacgcaagcatggattcattcactcacccattcactcccgcctgagtgtactgtggacaccaggcatgcatctctctgcccctccccccacttctaggctgagcagtgtgctgctgctgcttaaggagggtggtggccttgcttctgtgggagctgtgaggagggcagtcacactcagactgaaagttctcaaaccccgaggcctctctgaagttggtcacttgaattagcaagcagggtgggagagtaaggagaagtaaggatggcagtggtcagagctgatatggactacagggctggccaggctgggtgagcaataaggtctgattataacacggcctgctgcagatacacagttttgaagatttttgtccaaggcctgaaaagcagtcatttgctgtaggagtttggcgggatgcaggttgctgaaaaaccctgttcctactgacaccccaaaactttagatccaattcaggcatcacctactccaaatatgttgaggattcctggacagttcttgtgcttcttctcatgtctcctagcacactggccacatagaccggagataagacgacaattgcttttatactttttctgtttactgacttgtgtgtccttcctgctggacctctggttctcagcacgtaacatgcagattcttggtcacacctcgaatgggctcactgagaggttgagtctcaggatctctggtcactggcagacacattacagtaagctgggagcttattgaaggccctgctctttacaagtgtgtacacacatgagcatgtgcacacacacacacaggagctcctgtgctttctcttattcacactccatacacatttctgatggacaaggtgtgtatgcaccaagcatttgttttccaggctacaaagggtgttggtgtgaagctgcctacatctctgggtgaaaatgtgttagagtgtaaggttcacagatggctccagtggcaggctccttctcagcatcattgtgctgtcaggatggcccttaggaaacaagaagtccctttggagtatagcatccagggacacaggaatgagataagagctcttgaaattgcattttatagtttttaatagcacttaagtataatccacagagacactattcatggtagtcagacagtctctgatacagatgtcgtcgggaggatgcaaacccataacatttaggtcttgcctgcaagagtgttgtcatcttgcagggctaaaggcaaaaatacacaggtaactgaatgcacacacacagagtgtaaaggctgcacagagcactccctcagcacgggagagcattagaactgaggagagacacaggaagaactggaaagagtgtgatgggctgtgaagctctgcagaggcctgagggtgaggaagtactttgtgaggtttagttttgggaaggtgagaagccatggcaggtgagtgtgtggtaagtagaagcccagcaggagatgggcattaagcaatgagcacaccacaagtttgagactgtcttttagaaggggatgctgggctaggtttggaaactaaacagcttccttgtcttagttaattttctattgctgtgataagatgctgttattgaagcaacttagagaacagtttatttggggcttacagcttcagaggcttagagtctgtcttagttaggcagcaatgtggcagtataccggcaggcatggtgcagaaggagctgagagatctacatcttcatatgaaggctaatagcagaatactggcttctgggcagctaggatgagggtcttcaattccatgcccatggtgacatacctattccaacaaggccacgtcttctaatagtgccactccctgggccaagcatatataaaccatgacagagtccttgatcattatggtggggagcatggcagcaggcaggtaggcatggtgctggagcagtagctgggagagttgagacatgaccatgaggcagagagagagagagagagagagagagagagagagagagagagagagagagagagagcacacgtgcatgggagagtgagatatcaaagcccacacccactgacatacctctttcaacaaggacacaccccctaatccttcccaaacagcgctatcatctggggaccaaatagtcattgagccccttgctttctcctttgagccagcacaggtcctaaatgaaaggccacacgtgccacatttaggaatttaagcctattatccttgatcccaggtccaggaacttagcaaaactgagtgattttttttttttttcatctaaggcagtccccatgtcgtcctctttctggagaggctacccttgacccccaggccaatagaaagcagcccatggagcaactgggatagtttcatttgtgtgttgttgtagttgttgttcagggaaggtttacatatccctgcctctgcatgcacccacactgccactctgacacagtccctgttgtgctggtctgtgccagccccttccatgaaaacatccaaacagacgaaactgtgatcatcttagttactgattctgatgacagttctcaagctgccaggcgcatggctgagataaagcttacagattgcacccacccgaagctgtagaagcaagactggacagatccctccacccacactgccttgcatgagggggtctcctctgaatagcccttcaactgggggaaagcctcttttgtttcacatagcagtttattctgtgtggagcccagttgtgttttgtgtttgctgcagatagggaagggtgacagtcccctgtcgctcatcctgttaggtggagagtctgtagcttattttaaagtagtttctgttcagaatgtcttctcttcagtggccgtgtgaagcaatccatacctttgtcaacagaggaattttatcagaagaaaacatggaaagtttttgtgtgacagtattggactctttcccttctggtgagtcagggcatgatcctgatggaagtggatgaggaagtggggacgtgcaggcccttgttggggacgtgcgggtccttgtggagagcagaggcagcttccctctggaagtctcattttatggccggacctcagaacccacctttgctctgatgtgagcagacagtgctgtttatgacggactcttcccaaaggtcgattgatacatgatcagtgcaattttgacatctgtgttcatctctaagttggccctgacacactaagtctttcagaggcaggtctcagtttggataagggagacatttcggtgtctgtgaggcacggaagatagtccagtccctactggtgtggttctgggagtcagtggttacctacatgactaaattgttgttaaaaatgtctttcttttttttttccccttttctaccttgctttttctatgtgcctttaaacctctttggagaaggaggcagaccagctttcagaagctatggtttcatccttttattgcttagatattttaagagaccctgaatggggtggttcatgtcccattgtggtattcaaggccaaaggttaaaactgttctctttttacttttaaacacagggtctcatgtcagctaagcgagctctctcccaccgagctgtgttcccagccttctttttacctttttggacataaggtctggctaaactgcctctgctggccttgaactccttctactgctcaggcaggccttgaacttttgctcattataacagattgagaggacacaaaaccataaaatttagttctgacctgcaagacattaaaaaaaaaatctttaagaacaaaaggcacacaaaatacacaggcagctgaatgtgtgcaagagtttgaggggggggggcatggttgcctgccccagcagccctaggaacccttggggttcaaggaggtctgtgccaccaaatttgactaaaacaaggttcttaaagggagcagagctaaagcaagatggaattatctcttaattattttagaacccacccctccagttttacaggagtttccagttagtctgggggattgatggaaacacagaaagccatattccttgtgggtcacatgaagccgctcctattttcttgttcagtacaaatactagactgaaggcaagcgtgagggccaggaagagcaccgtcgtctctgtgtccttgcatcgggtaactctgtttacattaagtctgtaagctttgagtgacagctcagataggagcttggagaaccgagtcaactctgtttctcacggcacatggtagctgtttgtaaatgcttgacattcagagggcccgagttcctctgttgtttttgatctctgtcatcaaagatgaagttgaatattttttcaaggcagtctgtacaatagcttagtgcctccttccagaacaaaggcaagtggtcacacccagagttgctccttgcagagcctctggggtcctggaatgtgtgtcccctggactctgccacagttgactagctacagtgacagttgctacagtcagggctatgtccgttaattaggaacttgataatgaggctaacaagattcatccgaaagaggccaggaaaatgaaaaggctgtgcttgtgtgctggaactatgaatagagaaagaatcggtgtcatttggattattttttaagacattgaaatgttacatcttatgctgtgctttcttgtttaatgagaagttttataaaaaaaaaccaacaaccttattctatatattttggctcaaataatcttatatttgtgggaatttaaaactcagtataggttttattgcttcctttccatgcataaacgaagagtagacacactctcttacttttctgctacctttacgttcagtctgtgtgtcttagccaggcagtattcagttgaattctatggaaccaatgtaatgacatatttcttctctcaataggaaaaaaaaaacccactagattctttaagaaaaaaaaaaagttcccacggaagttattgttcaaatgaaagagaactgcttctttagatttgaatagacatttttgtctgatgaagaactactaaatacatgctcaatgtgcctaggaattagggaagtactaattaagaacatgctatgacagtgccataacacaagacgatgacgatactcacaacaccaaatcttcctgagactgggacgtgctagactttttcacagcgaggttgcaataaaacaaaaacaaaaacaaaaacaaaacaaaacaaatcaaaaaaaccggtacagccatggtttctccaggagcaagcagagatctgccccatgaactggcaattcttgtcttagaggaatgaaagcaaatctccttgaattagaaactgccaagccgtggtgcgcttcggaactagaatgagtgtgagctcagcatccgtagcatcttcttcagggagttccaggtgggcgctgagacagtactcggcccttctcttctcagaccctctgcactaaacactatttacatgataagcaaatgttgtcccctgctatgcaataaatacagataccataccaatatattcttctggtgaaaccggcctgtttccattatgcggtcacatctggtccatcgtagtagtattttcaggtattcaggtgctctgcatttcttgtgcttagtgttttgctttgaattagatcaagaatcttcctaccagtatattttactaattccattccccttgtctctgctggtttgtagaagagaagctctctgtgaaaggttatgcatggaatcctgacatgtctgcaatgaattctaaggttcagtactgcaggccccacttagagcagtggaatgggcttagttagtctgcctctttctcctgacttatatgcaagtgtttggttgtaaatttttgtcttttgaagtcttgttagctatcattgctacctttctctatctttgtttatatctacctacatatttatcattttagatcaccatttttaaggcacatggatctctgaggaccttcttcctcattttgaagtgtttacagagtaaaggtcatcttgacttcaccctcattctttgaagctagtttcgctagttacaaagactcttaggaatgaggaaaaaaaagaacaccaaccccccccccccaatcacttagctcagccttttctgtttctagggaactctagtggtaactcagctcagaggcaacaagtaactggtatagggttccttatgcccacaagatagcttcgtccagagtattgcctctgttcaacgttgtaacttcataccaggactctcaacgtttgtccttttatccaatgggattagggtttctcttgctatgataaaacaccatgaccaaaagcaacttggggaggaaaggattatttcatccagggaagtcagggcaggaactcaaagcagtaacccagagacggactgaagcagaggccatggaggagtgttgcttactggcttggtcctcaaggcttgtccagcctgctttcttatactatcctgtacagccttcccaaggctagctctgctgccagtgagttgggcccacccacactaatctcttcttacacttgtaagtggtcctgagctttgagcatgtaaggtgcttcatgtctcttgcatagtttgtttttccaaataggaagtagtatatccctgctctgctctggggtcaatgacctctccagccttgggtagctggctaggttgaggactagacatgagttcccttggaccttacttaagttcaatttagacagctgttgcttgcgtccaaggtgctactattgcacctccgggcctatcttgctgcactgtcataggctttacaggtaagtaggactactgactgcttttctcctttgtcagcttgtgcagccccttcagatgccacgagagctgaagttctcaaagctcctactcagtgccatagattaagttaaggtaataatagagaaagacccttttcaattaactttagttggatccatttctggtagcactgaataaagaacactgggtcacagaggagggagtttcatccaaacacctattttcattagaagttaaaagcccccatcaaacctttatttataccacaaacccaagatacaagcatgcttaattcttaaaatcttttaaacttaatctggttattgtttcattcaaggaataatctaattgttaagcgacagcaaaagccccagttcggcaaccaagatgtatgcttttaatttttttagcctctcagagggagtgaccaaataatataaatgacattggattaaaggaagcatctatttgcctgttcttttttttttaatgatgatgatgatgataaagaagaagaagaagaagaagaagaagaagaagaagaagaagaagaagaagaagaagaagaagaagaagaagaaaagtaactcatgtttaaatctctcacgagtgttgcagggagttgactgtgatctccctactttcaatgtaaggctttgcatcagtttgactccagtgaacagggtaggttgttttttttgtttttttgtttttgtttgtttttttttgtttttttagtcatggtgggtcagccatgggaggcagtgaagttggagaagtggaatttccagcagtggaactggagaaggaagtgacttggcagctgtctccatggctcatgcccagtagggttctctaaatcctctgcccagaacttaggagctcggaaaggactttaggaagccaccagtggaaaaggagaggggtggggggcggggggggggggaatgaaagggaaatggaataagccaaacgaaggggcaggaaacacatgtttatctggaaaagatttgggttggatactttgtttgtgtaagaatcttttttgtgtgtgaggaaggaagaccaacctggggttggaggctgaggtgggggtggaacgagtccctaagcttcaagtaaaagagagaaacagattctaggcaagagaagcctagcttccacgggagggctgtgctcagactctcgagtcatgtctgttgcgatatgtacttgttggataagagatgatgggtccctggtagcttcagtattaatactagccattaaagaaaaatgtggagagactggggtgagggctaaaaagcagttagggcagcacttcagggcgtgtgtgacaccattaatttaagactgtgtctatgtcatgtatgtacttggcatgtttgcgaaggcatttggtggctatttgtatagtaaggattaggatgactttatttttttttaattttatatctttatctgttttcattttatgtttgcctacacatgtgtctgtttgtctagtgtgtgcctgatctctgtttaggcagaggaggacatcagatcccttgtaacagggcttacaggaggctggaagctactgtgtgggtgctgggaatctccaaccgtataggtgttgtttagacaacctcctcctctcccccttttaagacagtatctcactatgtagctctggctgtcctggaattcactatgtagatcaggctggcctgcctctgcctccctagtgctgggattaaagatgtgtgccaccaaacctggctttagggtaattttttttaatagtctttgaatcgtgtgcatttcccatagtgatatctttctaaacaagaacgacaacaatgaacaaagtgtgattcacttctatacaatgtttaaaaagttgtcaggacaggagtttgtgaagggtcatcctctctcagtgaagttttgtaacaaaagacaagaaaaatacccagataattgaaaaatgtttacattttgagcaaataaaaccagcatagggtaatctaacttgagcccaagatgacgtactatgctattttgagaactttctagataaaataatactgagagtaacagtgagatgtgcccctaaatgagccattccagacttgatggaagagaaactttcccatgtcattctgaaacctagtggtaatccagtgaagaattttctttttcaaataggaaggccagagaaggggtaatggcacatttacttatgggtgagataaattcagggaaaatgaagtatttatagaatcacaataagaaggtaggaaattttaatatttttttatgacaagaaccgtaggattcttacacttggtaataaaagacagaaggtaatgtatatggttcaatcatttgtgcagaagcagtgtgtatcatagtcattgaaagttatctttgggaaaatattctagttaaagtccatttcacaaagagtttaaagaagcatatagaatatgcacataaattatatataatatatgcacatataccatatgtatatataatataccacatatatgtgtgtgaatatatgactatatatcacatacctgtgatatatataatatatgtaatagaaaaatataaagaaatcaggagtaagctagcaatttgttcctggattttctggatatattcccttttaccagaaagaaactggaactgctggttagttagtgaacttccagtggcatgtgccagccagagagcagaaacctaatttcttcatctctcctcattacattgtgattccccacaacgtgtggagcctcagatgcccagcatggaaacctgttagtagtgcatactttgtgggctccctttccctctgtatcttgttcctgcagtcttctcttgttctgggaattctttcccaagtgacctccagttgcctcttgatacttgcaagaggttattggctttaggattcctcacagatatcaaagtcgaggtaacaactaagtctctgtatatgaaatgcatagtatttgcatatcatgtatattttaaataacctctatattactcataatattaaatacaatgcaaatatgatgtacttgctatgctatgatgcaagagtgtgtgcttgttcaatagtgatgcatttaagaaagtcttcttgatctgaggttgcttgaatttgagtatttggaaagtacagggctgatggcacttgccatttaagtcctggtctcgagctctgtgcctatgatggtagatactgacagaacaaagcaagaacaagcaaacagccagcaaaggctctgaagacatcaccgggaatctttggatgactccaaggataaaggaactgttactgctgaggacagtgacagtgttgagggaagttcagtctgataaatgtcaagttttacgaaacttagagatatagtgaggggagggatgctaagtagccacagagaagatgtagctagagtgtacatttgggggtcgtcagtctctaagcaactgtgagaagccaagggaacggagcaagtatgagttgctacagagatgaatgggcatccagagagcccagaagtctgatctcccatgaaggagactgagacctgtacaatgagagcaactgggggtgagggtggagcagagcttcttctacaaggcctgagaggcacgggcttgtactttggagttgtgttagatccctgaagtgaggaaggaaaggagatgaggaggaggaggggttaggaggtgagggtgtcttctcaaccctggcgagaggttttcctcatggctcttaatagaactttggtgccgttccggattgccacagttagttaagttctgacctgcttcctgctaccaaggaatgcttcgatgacagcgagtcccctcgccagtgcagctcaggagagacagtcccgtaacaagctagctgcttctccatcctccctttgcactggtagccggcctgtctggctctcagcctgctgagtctttgtcgttctcggagggaggcgggtcctttggagacctggatgcagcttcctgagagccagcgttagacaaggagtccaatggcatcatctgaatctggaagttgctgtgggtcgtacagttaaactcctttggatgacttagaagactctgtgcttttcaatacctctgctggggctttgctgccatttaaaaaggcatagacttccgtgccatgttgggcattggcagtgatggaagttcctggaacttggacactaccttaattcagcaaattcgcatccctctcctctaagcaattgttagactcagcagcacctttatgcagcacaccggaggacaacatatgcatctcccatgattccttcttcgcttacctcctaccgaaggctcccacccagggtggtatatacttgtaaagactcacttaaatgtgtgctttgtacacatctagcctgtctctgttcataccagcattgcttcaagcaaggatcacccatcttcatgtgcatcgtgtttcctgtaaagagccctgtgatcagacagtggcttattctgtgagtgtagtaacatggtggaaagtgctcctgttttgtcccattcccttccagagatgtgtcgtgggagcatccgggacatttggttaattggccaaccctaaggtttcctggtttgttttactcatgattgttttctcccatctactacaaatgataaaaaacaactttctcaatagaataaaaaaagagagatagagcgagagaaagacatgggttcatgggttggtgtcactctgtagtttgacggcagaaaccagaatctggcctcttctctgatgtcactgactgcctgaccccacttaaccttcctgttagtttctgagtttccagaaaatgtattacttcccagagatatcaggaaactccgagaacgaagagcacacagagaaagaaagttaggaaacgtgagcgagcattgctctcgccccttggcagaacgcacccaaagcatttttcaaataaaacctcacatcagcttagtgagacaaacaacttctgagggcgccgacgttaccttttttgaggtaaagttaaagctgatttaaagagagatcagagctccatgttgcctcggtggagcctcacgtgatgtaaattttagtgcacaacagctttttgcaaatgagccctaactgtggggattacatggtagttcctaggcgtaagaagcctacagttctcaaaaccgtatgcagattagcagtcaggtttgcgacacttgaaatcttgtcaaggttcctttttatgacattgacagacttgccctgcaccctatccaggtaatggctgctcatggtcagcccctggagggacatatcagggctgcaaggctgctgacccctggagactggaatgtgcatttcctagccagggctcggagccaacttcctatttatttaggaggccctgggcacttgggagccaagcagagcttgtgatgcaagttttagctgcaaagcatgttggggttgcccaacgtgtctgactgaaatatgatttgaaagatttctcaaagcccaggtggcgtgagccgcagtcacgattaggtagtcttttatagccctttaaattctgacctaagtaaacagaaaaccaggccaagcaatgaggaagctctgcaggtctgcagtgggagagttccctctccccttcctgttcatagcatcagtcaagaggatgtcactgggggtaacacaaaccccaaagttttgtgtccagatgtcttgcggattcccgggtgtgtatgtggggcgtgcatgtgtgtgttcacaggcacatttgcttttgaaacagaaaggtacacataggaaaggatacaggaaagggtgagtggcctgcaggcagagtccctgtgtgctcaggacctgcagagaagcctggctcagggggctgatgcttagatgagagtgggatccgctctcaggctgctgtgatgcaactggagagcattttacctgcctgaggatttggtgaaggctgctgagttctgaagcaggtaggataaagatgagtctagttggaaaacacagaggtattctggggaggatggaagaccggagcagcatagaggacagaaacagattcggcttagattccctggttagaaggaatctagaaagttcagagttcatgctactgctctgcagactgccgccgagcaagcaaaaaggatttaattcatgaaatattaaaaatgcaggcaagctgaccttttagcccatctttgtagtattaaaggagtaaatgaataggttctcggtaattagactcctacagagaatttaatttgtgtgtaggtatggtaagtgtttagcaattcaatgcacatcctgctttggccaccactgagcggtgtctcaggctgatgatcacacaagtggcagtgcctaagcctcacagttatcatctgccacccggggaaccttggagcctgttcactaggggttcctgagagacttttggtagcataatgggaaagggaagggcagtggggtgacttctgtcctcgtgtagccgttgcccaacattgtagatggagatgcagaacctggcagaaatattgattctataacgcattatcctccgcgggcacaggacagcgctctgttttatcttcttgagacagaagacatgagagagaagtgaattaggtagtacaacagagactgcaaactccttcccaaaaacagctgtaagttttacctgtgtctgggcctctgagttcaatggccttttatccagattcactttggctcttcttgcatattcttcgggcttcctaatatagactctaattccccctctgtcttttattagtggatgttagcgtatgaaacagggtttccttatgccatttccatgcgtgaatataagaaacttggatgaactgatcccttctgtgacccatgctcatcgatagtagtgtcccctttgcttccaagtgcgtctagattattgtcaatgtaagaacttttaaaattgagggtctcgctttgttacccagatggtcctcagtgctctgggctcaagcagccctcctgcttcagcctcctgcatactggggctataggtgtaccatagcacctagctgacccaggttctcctggagcagattgcagtacgtatacctggatagactgtatgttcttgcttactggcatatttttatataaaaccaaagatccttcaagtggtttcctgaatgtaagaaaatacacatttacactttgaaagatattagtcctcaccgccaaatatctctgaaatagcttccgtctttagtgctatggattgatgcttcgtgctgagtgttttgaatgtgctctttgttgccccttcctggacagagctaggaaggcagtgctgcctgcttggtacatgggagtgctgaggctttgtaccgagaacataccataagtcctggacattcaggatcccagtttatccttccaccaaccactgtcaggtgcacacacaagtctcttcatatttatgaatttaggaagtagagcaaaatttagttttgttcttaagtgactgtcttacataggattcgataccttgacatgtttactggctagctgcgaagtttttaaattgtcttttataatctcagccttatttttatgagattgttcacttgttttccttattgggtccttcgagttcctccctccttccctcctcccctccctcccgcctcttcattccctagggtctagggtgttctagccaggtgctttcccatcaagttgtagctctagtcctcttttaaactttttatctggaaacaggatctcactaaacagcccagattaggtttgaattcaccaaataccctaggctggtcttgaacttgtgaccttcctggctcaagctcccagttagctagatttcaggcctgttccactatgacaggctgatttctacatgtcttatgtagtaaccctctcccttgtatggcaaaccccttttctcttcagtttgtttctatcaactctttgtgtgctttgccaaacagaactttatatatctaattgtgaatccgttcatcttttaaggcctgagtggttggctacccttcttccatcataggagtataatattttctatgctttcttatgtttctataattcctcaataacatttatttgtgattgactccattgggttttgtcactttgacacaaacctagacatatcgaggaagagggaatcataattgaaaaaaacaatgcctccgtaaggcaagtttctagagcatttttttttttgattaatggttgatgtgggagggcccagtccactgtgggtggggccattcctagacaagtggttttagatggtataagaaagcagactgagcaagtcatgagaagcaagccagtaagcatcattcctccatggcctccgcttcaactcctgcctccaggttcttctagtgtttgagttcccgccctggcttccctcagggatagagcgtgccctgagagttattagctgaagtaaaccattttcttcccaagttgctttctttgtcatggtgttttatcacactaatagacaccctaagtaaaatcattttagatactgagaacagttacagccagattgcaaacccttgtgttttgctacacagagggtgatgtagttaataatcttgtattatattaatcacattgctgtaagaaagggtttggaatgttcccatcatgaagaaatgataaccgttcgagatgatgggtaatctgctcatgctgtgttgagcagctcctcaggaatagacagatatattgaagcatggttctgcactctatacagcctgtcagtcctctagcctagattataaaattattaatttattttcacataggttcttacatgttctttatagcagtgatttatttcagaagcatcctgggaacgtaagctggctttaatcgtcacgtttctgcacgtgttggggaaagcctagtataatggcatgcaaaacatccactatccttagatgctgcacagtgtgcaaggaattcagttaggagccactatttttatatatcagtttagaaaaaatcgaacccacccacttttacctaatccagattaacatcggagggtctgtgccgactgtgtttggacaaccccatcatttgggttctaaggttggcagaagtgaagactaaattggtttgccaaggaaccctaaagttcctcctgtctctacacaagttcctccagagctcagattacagacctgtgttaccatccaagctatttaaggggatttgaactctggtcctgatgattgtgtggtgagtactttttgagtcatatcctcagcccatgtcttcctttcttgtaacacacagccactctccagagagaccgcatcttcaagcattttaccaggaagcgccaaagggctatgcgaagacgagtccatcaagtgaacggacataagttcatggccacgtacctgaggcagcccacctactgctctcattgccgagagttcatctggtgagacagcctgcttacccccaccccaccccactttcacctccatccctgggcttgctgctggaggcttctttggcttatgtgtggtttcaggagaaaacataatggatactattcttcagatctgacttttgcctcctattcgatacattgatcctcttttaacaggtttaaactcctactaaaataatagcaaaactaagtaatttacggacccaaatgttagatattatttcgtatactagttactctattgaagatgctaatagatgaaagagcatgaatcagagagagaggagagtcaatcaattgataaattagaaaacctggctgaggagaaaggaaaattatttttgaggaagttattaatgctttgaggaaggcatggatcgtgtgatcagttatgaggaataatcgtggtgagaaagcctcgttctcagtggtgtccagacatatggcatccggaggaaggccatggcgtccagtggtcctctaccaccatctcatctccagcagttaggaactaatgtaattaaaggttgagaaattctaaagacttggggcactgtcttacaagaagtaagcctgaacaagccgtggcaagtctatagcagaaaataaatgtaagcaataattactttcaaagagagtcaaggttaagcatacttatggcatttgtaaacagaattacaactcccgaccccaacacacacacacacacacacacacacacacacacacactaccatagaacacatcagggtgagtcataaatcaatatgaacagaaaggagatgatggcaccacgtctgcccccctgtggatttcagcgggagatgtagagataagacaagggagagtgctggagccaggtagctgcagtgtgtgtgtgtgtgtgtgtgtgtgtgtgtgtgtgtgtgtgtgtgtgagtgaatggaggagctgagttgcttttcactaaggatttaggagacagctgaagggaggagaaacgggaaccctcacnnnnnnnnnnnnnnnnnnnnnnnnnnnnnnnnnnnnnnnnnnnagatgtttttcataaggggccagggaacacacttcttctagagaagtataattatagatgttattactgaaccatttgactgacagtaatttttctcccttttgtcttgaacaggggagtatttgggaaacagggttatcaatgccaaggtaagaaaaacatgtttacaaccgtgtttaattgtgcttctttgtgaaaatatgataacaccaacagaagacaggccaggctgcctcctatcaataccatgataactctccgtaagacacatggtgcccgtatggcagactctagttcgtaccagaccctggacgtttttgacagtatagagggaatctgttcatttctaaaatcaacacccagaagagctttgcagcttaaagttcgctcttcagtaacttgagagagctaagaaggagtccaaggcatacaagggtgagtgtgcccttgagtcttgaagataaaagtcttggtttttacattgcacttttaacaagatgagatgtcgcatgctgtgttcatgtcacctgcatagggaatggatgctcgtctccaaattagctttatctttttagctttctggtttcagaaacaaaacagaacaaaacaaaaaaccgagggtctggagaggtggttccctggtgaagagcccttgttgttcttgcatagtttgtgagggttcagtcgtgagcacccccacatggctgcttacactgtgcaagtttagaggatatgatgccctcttctggcctccaggggtactacatgcttatggcaaaaaatacacacaggccaagcaccataaacataaaataaatggctcagcggttaagagcactgactgctcttccagaggtcctgagttcaattcccagcaaccacatggtggctcacaaccatctgtaatggcatctgatgccctcttctggtgtgtctgaagacagctacaatgtactcatatacattggataaataatattttaaaaaataaagtaaaaagtcctcagttttttttaattaacttcatttttaaaatgagatattagcatgtaccaggccatggtcttgatctgtaactcaatgaatgaacgaatgtgagaaaaaaatccacaattaaatacattttcagaattctaaggtaaaatcaacttagtatcattcttgaagacttaaaattaaataaattcaaagtgtgaaagcagcctccttctatgtaggggtgtgggctgggtccccatggccttccgtggggctcccttcctgttgccctgagtttggtcagtctgtatctgtagtactgggcatcttgactttcactctgcaggtgactggtagccgtgccatgtattctacagagccggtccacatgtaaataaggaaaatcctctttctgttttggaggaagcaatgcaatgtgggtcgtgtnnnnnnnnnnnnnnnnnnnnnnnnnnnnnnnnnnnnnnnnnnnnnnnnnnnnnnnnnnnnnnnnnnnnnnnnnnnnnnnnnnnnnnnnnnnnnnaatcccagcattagggaggccccccccccccccccccacttaggagaactgactgagacataagcttgaatctaagttatgtatgaaaatttccactgaattctcaaagttagagagagcaagcatagcaattgtaagggacctataaatgtgaattcagtcctaagtgagaaaatagctcacaaggtaggacgataacagttttcagcctggacctgtctaatataggggtatgctctctagtgatatatatatccatatatatatatctccatcatatacattcttatatagattgagaagctctagatacacaagggtaccattgacagattaaaatgtatgacttaagggtacatctgttgtgttgtttttcctctcagcatgtcgctgagacatctgatggctgacttctggtggggcacctgctctttaaagaacaggaaagaacactagttaggaggcatgagaaagttttgtttacatttcaccgaagaacgtaaaaccaaacgtgtggtaggagagaagtatgcgggcccaccctcatcagaagcacagggtggtgtttccgactaatcaggcttgaggcagaggaaacggccagagctaagaaggccactgtgtgtgtagtagtaaccgggccggttcttcagacagacatgaatgtggttggcgtgtacatacctaacagtgggcagggaagcacgtgagaacaaggcccttggaccacaagggaggtagacaggcctactgtcatagctgctctgtcgatcattgctggcctcggccaggccaggcagaggagcagtaaggctttggttgatctaaacagagctgtcacagtgtgatcaaactgacgttgatgggaagcaccagcctgcagcgtcagacaacacattcctcctaagctcacgtggaacattcaccagcagagaacacccgctggaccttaaacctactgtaacaaacaagaaacatacagaaagcacaagactcatgctgtctggccagccagtggctcagcaggcaggaggccgttcctgtgcagcccgagaacctgaggttgaatcctggatcccactaggtggcagggtagattcagagttgtcctgtgcgcgcacgcacacacgcacgcgcgcgcgcgcgcacacacacacacacacacacacacacacacacacacacacaccacacacaccttgaactcacatatctccacctgcctctgcctcccaagtgctgggattaaattcatgtgccaccatatccagcttcttgctcattccatatacactacgacacccttatagggctgcaaacgggaaagcatattgtcagagttctaaatattcacacagctggttgaaccgttctgcaagtgtttattcaactgcccattcagcccccagcatcattcagggaattccgggcaggccccagccacatgtggaagatttgaagtaggagtcagtctgaggggctgtaggaaatcagaggaggagaggcagtttggggtgagatattctttgggttttatcttgtcataagcattagatgcagttaccaggtgagtaggctatgttggagaggcagagaaaggccatacgtttggaaccgtgctgggtttgaacactgttgatggacatgagaaacccactggaagtgttcaggcatggacagaaatgaccagggttatactgtgaaaagatttctctgaaggatggggcgcagtcaggaaggcgaggacagcttaggacaagatggcagacagcttggatgtaaacaaaggtcttgttaggatggtgtcagtagatgcaggaaggatgagggcactggctgccaggatgtggccagacatccaagccaagtttctggcatgggcagctttcgttgactgctgcaactggctgtcctaggaggctctgataaatgtgtaattgctggatttaatttcccagtgtgcacctgcgtcgtccataaacgctgccatcatctaattgttacagcctgcacttgccaaaacaatattaacaaagtggatgccaaggtaagtgagtgctagtttgctgactaagcacaattccctctgtgtgtgctctctctctctctctctctctctctctctctctctctctctctctctctctctactcttccctactcacctctccccacagccctcccatagtccttaggacccacaacagtgctgctggaatttgtatttctgttctttggcagtctgacctcactttgcctagtggtaactttgcctcacttccacagaatgcctccccataactacccatactaacatagtatatggatagtaacccataactacccatagtaacccataactatccacagtaacctgtactaacaggagaaaagggttactttgtcttgtggttttagatacttcagactgaagaatggggagagctgtacagagcagaacagttcccggcagggtggagaagaaactgattctgagacttagggtggggtattacctgcaaaattctgccactaagaatggacttttaaaaagctagatcccacctctcagtgactctgtagccatgctcagtggcactactgactggggacccctgaattttgaacacaagcttgtgagacttatttagcattcagagcataacaccttgcaaggacacagtcagtgttcagctgatcaaagatgtagacaccacttacactgttctagagagaggactctagttgggggaaagaggcctgggcctattatatagcatctggcttttccaatgctgaggcctgcctccactagtgatccttgtcagcccaggcctgatccacagcctctgtgtatcagtctgaaatatctgggcctcactcgtgtgtattagcagcagttaaattgaattgacaagtatgtcaactgtacataatgcttgctaagcaaagagacactgggcctccttcagcctcgtagggactccaggggaaatgtgtttaagcttccgttgcgtttccctgggatgggcagatgttctaaattcaagagggagaaagcaaggggagtgttgttgaaacttagtggacttgcagatgcttgggaaagcccaacttggggactcatgacatgaacatgcatgatagtgaaacacacagagagatatgaactagagctcgtaaaggaaagaggccaggaaagtccagagaggaacagtcattgtcttaccctttctcatgctgcacctgtagtttttgcttcaatttgtaaggctgaccagagagcatatggcaagggggtacaagagatatgacacataagagaccattaagttggcactcactttgtctataagcaaatgccagaggctagaggggctgagtgaggtggccactgcagggtcactgtggcatgacgcagagagcgttttgatccgaatataaaagatgaaggaaatgataacttctccttctttctccaaatggtgaatggttcatcatatacctatatcctgtatcttagtcctgtcttattcatcaacaaagtgtgctaagatccaaatagcaggacagttctgcatggtataataatatacccagcacgggtgtcaccataatcctcgtcatttcccactccggtcatcacaaaagacattgctgagagagttgacctatcctcctcttcccccagattgcagaacagcggtttggcatcaacatcccacacaagttcaacgttcacaattacaaggtgcccacgttctgtgaccactgtggctccctgctctgggggataatgcgacaaggacttcagtgtaaaagtaaggagtgctggcttcctccttctctctgtgacagcattgtactataagcctttgaagttctgtgggcttataatctgacctggggctgatggtttacatattaatacctgagttgtgttatttaagcatcactggttgggctggagtacatgtaaagagaagtgtgtcagatccctataataatatagattaaattagaagttacatctaaagatctactgtgctagttgttggctacttgttgctgagtatgcttttaagaggcatttgaaagagggctttgaaaatgggttctctgagagagagagagagagagagagagagagagagagagagagagaaagagagagagagagcacaggtgggaggaggtatagctgaatgaccagaagagaaggtttgggttctaagtgagaactggctctcatcagaagtagggagcagttgagctgtcacattagcaggagctgcgtgggttgtctgcaagagtcctgtggtgtgactgaagaagctggtagggcaaagagcgagagctgaagctttgatggtggctggcacctcaccaactgcacacggtgctgtttggagctcttgccttttcaaaggctctgagtggggtaaaggccagcacctgttttgttaggggttgtggagctattggcccggagtcattttccatgagtatgtgattatctggggtgcacctgaagccttatgagacacacactaggatgacaactttcgttggctgtctgggacagtcaaactgtctgtcagcaaaagggaccaaattctagcaaggcgtagtaactcatgcctctaattccagcaccaagggtcgatctacatagtgaggcccagagcagcctggggtaagaagaaaaccagcacaaacagcccatctctctggccctgtggcaccgtttttcattcacctgaagcagcagcaagcttaagtgaagcagcagctttgcctgaggtgttgcttgctactggtctcaggctctcacggggagtgagccacttccgttttcctgtatttccggctagggtacagatccacacatagggatcacctgtagccctctgttcccgggtgccccagagcagcagacctgcagtgacttgactccttcaacttttggttttattgccacagggcttttctaaaaggcctttgtcgtttgcatctctctataccagtcgatttcccatgaagctaatggagcttaagcatcagggcctctctctgcttcacgcggtgtccgttttcataaagaaagcttcccaaaggacaaacgcaatccccataacgtctaggttgttctgtgtctccaaagacggagtggctccatcgaagagacatttattgcacaaggcttcagccgggccttctgtcagcaggacccacttcaagaaacatgatagtaatttatgtctgccgattaaacctgggagctgtcattgtcccgggagcttcacagataacaagaaatgtagcttgctttgctcccttctccaaatgtcattaaccctgaccttcaaacacttcaaagtttgctattttttttcttccctataaaacagttagaaccacagccctaccggatgttctttgtgggctaggagtaccacccaaccacagcagtacccggaaagaaggtgcataaacccttcagaaacccatttccaccttgtttgaacagtgaccaagctgcagcctggagactgctgcctttatttaatggcaagagggagtgcagtcagttagcatgatcctttgttatctaaccgccccgtgatggtctctgtgatgagcatcttcatctctgtatcgtgtcttgctgccaaggcaactgttacgtgtgatttagatgagtctatcctctcgagccacggtgaagagagtcaaaatctattattcgaagcctgctattctttcatgctctagcatttctgcctctgcactaatcagaagcagggaaaatgccaggacttgttctaaatgcgagtttaatcttgtgagatcacactgccagctgcccgtatcgttcttctgtcacagtcgttaggctaccgatgttccctgcaagcacgtttgtgaacctggattctcttctcttccctccagtatgtaagatgaatgtacatattcggtgtcaggcgaacgtggccccaaactgcggggtgaatgccgtggagcttgccaagaccctggcagggatgggtctccaacccggaaatatttctccaacctcggtgagccctttgcctctggctgtgtattgtaggttgcaagttattccggtgcaatgagctcaaatgagagtctagggggacataatctcagcaaatccagtgaacaagtctgctgtgctttaaaaaaggcattttatctccccaactagagtctacacagttagggctcaaaacagtgagcatgcatgtatatcatgaagcaagagaacggactcaccccccacctccccttaaaatcagcttcctatcaatctggtctggcaagaatctcagaatccagatgcctagggtacgcccctggctggtgtccaatcgggacagctggtcagaagccaccggcctctgcttccttatctctaaatggggttgaaggtgccagtgcctggggttctccacttccctagactgcagcacgtgtccagggttgtgagttcatctcctgctttctgcagcagacagctccttcctcgggacgcttgggaatgggtggagtggttttcttgccctggctgtgttttgtcctgcaacctccccaagtgacatccagctgatgctgtccatcagagccttagctgctgcttcctagttcttagtgttgtctttctggcccacatccttggttggaggctgggaagcagccatgtctggatggctgtgagatctggagccaggctatgtgacagtcccagaatgggcagtgcctccttctctgtaacatcaagtgtctttagtgttatggtattcaatactgggggaaacatctacctgctgacagcacatcattaaaaagatagaattataagtaatcaaagagaaaagtgggttaaaaaaaagattaggggactctagctttgaggttttagctctaaccaagagtgcaggttaaggaagtaagattcaagctgggaccacttttctgtctttgaaaagtctacagtagatttggaaggagagctataaaaactgctgtgtttttaaatataagccattttattgtattgttaatgcctgttttgtggggttaaatatataagatccttggaggttcaggctgtggagtagttggcttgttttcagcattgcttgtaagtctctctagggcctaaagtctagacacatcctttttaaccagatacatcaagaactccagaattcatcttcttagagttggggagcagcttggtggtacagtgcttgtctggcatgagtggagcatggggtccagtcacagcacctcaaaggcaaacacagttaaacaataacagcctcctgggggctggaaaggtggctcagcagttaggagggcattctgcccttgagagtccagttttttagcatctatgtcaggcaggtcacagccacctaccttcaactccagggggatctaaaaccctcttctggcctccatgactctggcacacatctgcagatgcacatacaaagatgcacacacacacacacacacacacacacacacacacacacttaaaaataataaaaacaaatattttttagaagtagcctcacattctcaaaaaaaatttaaagatgtaaaaagtcattgtgaccatttaaaaataatactgtgtacaataagacaataatttagtcatattttaaaatttagtatgaaaatgttttatctttgtacattgttttaaatatatgtactaagagaaggctgctgggattttaggtacttaacatttatttatatttactgtctttcctatttcacattgaattttatttgtataatttaaatttttatattaaaaaacatattctggtcctgctgccgagactctgagcaagcatgaaaaccaccctttgcgggaagtggtcactaggtgactcccctagaattgacttctctgtggtgaagccattgcagcagaaaccacagtgacaagcctaaggccttggcatcttcatttatgcacaagcttgggcatattctccacacggcagtgcatacagaccagaagtggatggcaagatagttttcagttaaagaagctggacatctgcccaggactgggtggagacaggctgcttgcatagggaggtctccccatccatacccaccttgagctcacagcgtcatttctactttcctcctccttgcagaaactcatttccaggtcgacactaagacggcagggaaaggagggctccaaagaaggaaatgggatcggtgttaactcttccagcagattcggcatcgacaactttgagttcatccgggtgttggggaaggggagcttcgggaaggtgagtctgggctttggccggctggattgaagtaacaagcatgctgtgtatgtgtgctgttggcgtacatgtatgtggggggacaccggaccttctcacatgtacccacactctcaagcctcgggtctccctcatgctccctcctgctttgctctaggtgatgcttgccaggataaaggagacaggagaactgtacgccgtgaaggtgctgaagaaggacgtgattctgcaggatgatgatgtagagtgcaccatgactgagaagaggatcctgtccttggcccgcaaccaccccttcctcacccagctcttctgctgctttcagactccagtgagtatggctgggtactccccactatgagtatgacaggtgctcccccttctatcctagtgactatgatggtgctccccacctcacagcctcctgtctcacagaaagaggagatattagtgaggtgttgaagatgtcacggagttgcctggaatcggccctcaaggcattgccatgtctgacaacctgggcacaagtgataggggctaatacattaaccccttccttcatgctgtcccatgaaaggctcaccttgagggctgtggtccctgattttgaaaaggtcttcatatataagtttcctgcagtagagcggttacagaagtctgagggtagagtcaatgtcatgagttatcttggcgaatttggctatggttcttgtcctaagttctgaacagccttgaacccgaatgaaggagtcgagaagtggatctagaaggacccagaaagagcaccttggtttgattcatcccaagatcttgttcctgtccataaagttcctctgcctggtgccttcactagtcttgggattcgatgggttaagagtagcaatctaggatgccttttgttgcagtccgtagaatgctgagctaatgagagtttaaacaaaaatcatggtgcccttggttcaataggatgagtgtaaagtctggtggtgatcactaggattggatctgtggcccagggccattagacatgtcttctacttggtagctcacagtatttgatgaacctttacacatcacactttcacaggacagcatccaaaacagaggtcatggggtagcatgggccactcttcttccgtggtctattgggtcatctttttttagcagcaggagctgggagaggagatagctcaccaagatggagccaatgaatcaaaaccatcttgcactaactctggtccattctctgggccaggtcatgctgccgcctttctagaattgggtccatacttgggcttctctaatcagcaagaaggtgacctctaagaaagcatccatccaagttccaacaggtcttccagtcagatttcctgtcagataggtcaggttttcctattgtttgggagactgaacctggttgtgcccttggggaaacacacagcggcaccccaccttactggtgatggaaattaacagctaagctgaggcgaaggtgagacttcgatattgctggcaaagagaatgcttcccacagtgggtaaacagctccacagagctaggctgaggcggagcatccattgtgaacgaagctcagtgaggctctaaagctgaggtggtcttgactgtgactgcacaggactgtaacttcaaagaccaggctgtggaatgcagcagaaaacctgggaagaaactaatgtagaggaatgaagggccaggtttaatcacagaaagccagcttctttaattgacggcatgtgcatcctccacatgtctgttctctctgtcacaggaagccttttaaggagtttttgatgcataaaagatgcacaccaccctttaaaaaaacacaaaatctggaaagtcctgcagagattgctcagcagttgagagcactggttgctctcccagaggactcaggttcaattctcagtagccacacggtgcctaacatggtctataactccactcccaggaatgctaatgccctcttgtggcctctgccaggtaccagacatgcatgtaatgcacagatataaatggaagtagaacacccatacacacaaaataattagaaaaattaaaacgcaaacaagactgaacttcgactatgactgcactaatttttaaaaacacagtaacagttaaatcttggaggttttatcatattggcatacatctagctgcttcatttttaatagctgtagagtattctgtattaagaacatattgtgccaagcacagtggattatgctgttaatctcagttcttgggcttcaggggcaggcaagcaaacctctgtggtttcaaggccaatcaggcagccaaggctgtatatttagactttatctatctatctatctatctatctatctatctatctatctatctatctatctatccatccattcatccatccatctatcccttgtctctgcgtgtacgtacgtacgtgtgtgtgtgtgtgtgtgtgtgtgtgtgtggttaattacctatctggttttttatttcaacccatcttgccacaagtccccgtgtactttcatttttgcatgtttatagagcatttctacgtggcatattattggaggtagtattgctcaggaaactcgagcatttaagatttggacggagtccagtggtgcttacctctatggtagttaacatggcggctgacattttatggtctgccttctaggcactgttctgacagctttgtgtgtactgtcgtatttaatctgtgcagtgaccctgtgcagtaataaagtttcagtgggcatagagattcctaggacttacagctgaagtcttcattagcatccctggtggttgttttttgtttttgtttttttcccccctcttctattaaaggtctgatgtttggccacagggtggcagtcgtgactgtaaagtggccttgatttctcaccacctgagcagtgacagtctggagcatttttaaaggttgtgggttacaggtgctggctcccaaacaaagaaggaggggagaggaatgctctgaccttcaggttagagggtgaaaggagtgatgggaaccaagaagcaaatgagttcttcacatggccaggtagagacagggtcttcatttcactctgggaaattatgggactcaagtgttattcttccatctggaaatatcctccatgtctacccctatctcctgtaaagctggctataaaggactggaaatgctagtcactacgaggaacggtaaacttggatggctctagctacttgactctgcaagccatggcccctcaagtgaggagtcgggtgctaactgtggccttctgtcctctgagtagctcatctagttagggcactggagttttccccaaatggcctggcaaatgacatttcattgggagagtccatgttcagtaacgtgaactccctcatgtctggccctgtggaatctctattgctgaagcccagagatgggaggagctcactaaggtcctcttggcttggtagtgttggagacagggttcaggtataggccaggctgactctgacccatgggtcatgtgcagtctcacatcagctactgaagcatctgcctggagagatggaaaagcattgcccttgggactgtccactcaagttctcttcggtgaccctaggtcgaaatgctgagtctgttgtcaaagtcttttctgcgtttctccaagtcctggtctcagaagtgagacctctgtgaggatccagtgggaaggtaaagagactgactactcacaggtcggggccgcagctagctgcccgagcctcggtggatgacgccacagccatgtccatatgggcacactgctggagttaatggattattggggagggagatttgaagctagaagaaaaatatattgaggggcctggtgagagggaatgggaaacagatatggttaaaatgcattgcacacgtctatggaattttcaaggaataacaattctttttaaaagctaaggctgttccgtgatgaacccacttccccacaccaagcaagggcaacgtcccagagctcccccctctaaaccataaagtgggagtttaggagctccttctgttcctaccaaaaataaaacaaaaagcaattttcaaacactagatactttatcaagctttctgcataggttaaaaatccctaaactctttggctcatatctctccttaaatgttactgttagaaataagtgagaaatcgcagaccttctgatagcgtcaggaattccaacactttgtgagtaattgtctttatcttcacctgtaaaagctgttaggtctgctggttttattttcattgtgtagccaacagacacaatacaataatacgatagatgttgtatgtaaagatgcttgatttgggttggtgaggggtggtgggtaaaggcacttgccttgagcctgatggcctgatgaatttgatccctgggacctacagagtggaagaaaagaaccaagtctctaaagttgtcctctaattgccttgcatctgctgtggcatacatgcattcacatataaagacacacacacacaaacaaatgaataaatgaatgtttttaaaaatgcttaaaccttaaagatggttaatatatattattagtccattgctgatagtctttgattgacagctccctagctcctaccctcagccctggcatccatcctttgctcctgggagttctttagatttgattttctatgcctggtttatttcacttaatcttctccagatccatctgtgttgccacacatgccagggtttcctcccgtcttaaggttgaacgatggctcattgtgtatccaccccacattttctgggtccatccatccatatctctgtccatccagccatacgatgataatgttgccgtgaacagggcgtgcagttctcttttcaatcatcttgcttctgacttcagacttcttggatataaaccgagcttgtggaactgttggttggatcatacgcatattccattttaacttttgaggcgtctccatttggatttgggcggtggttgacggactcacaggcccagtgtctgtgcacacggatggatgggccttctttccttcctgtgttgctggagctcaattcctttcatccttttaatagcagctccagcagggaaaagccaccttggggtggcttcagtttgcatttctctgatggttagtggccatcatttctcttaaatgtatctattggccacttatacttcttgttttgagaaatatctatttagatctttttctttgttttagattttggagttatttattttcttatcatctgagttaagttgaaatgacctgagctttcagcaaagggaaaacacttaatgtactaattgaagtgggtgttcttccagatgtgatggctcagacctggagtctcagacaggctatgagaggtagagtccaggagttccagatccactaggtcacttaaaaaaattcaaaagtattggatatcagacattgtcatcagcacctagcatgcatgactaatggcatgttgtcgctccataagatagactcggttattatctttgctttgtctgtagttcagagaaacatggaaataataaaacactccctcacacccagcacttttaagaaaccgtagaactagaaggttccaggaaaggatacagtacttacaaagatgagtggtttgtatccatatcaagttctggccaagacagcaaagtggctctccattccctacaaaggcaccagccagaaatgatgataaaaatctcatcaggacagtagctgagtggcggagttgctgggttggtacacagttttcaaatgcatgttttgttttgttgttttaaacaacagagctagtgagaataaggcattttttagccaaggaacacttggttacaagggacccgtgtcacaaatctagcacatgctgttgtcctcggtgctttgaagctgactttgcttccgggtcctttcatcttcattggggctgtcagcctattggcatttatggcctggaatggaggcccaccgcctttcttccacaggcttcccgcttgagtaagaagagctttcagctgaggccaggcagagaaaactgagcttcagagaggcagataggtggggtaagaggccagccagagggagaggctggaggagggagaaaggagcaaagacagaaagcagcctcccaggaaggggttgggggaagcagcaaagtcaatattggtcagatgccccagtctttgttcagagacccagtttatctgagcaggccttctgcttcaaaaatacaggacatcctgtgtccaaaacctagaagagggctgtaccgaggtccctcctcactccttaggaattcaactctgtttacctctgcttctctaatggctgtagaccacagaggctcccagggacaggaaggacaggaccggccccttgctgtaggtttcctcagagcctgggctgctagacttcctgggtcagtcctgaagatggagctcgagacaggccagagggatctgctgctcctagctggcggaggagtagcagcaaagcccagccccaattgcagaaggcgagattgttcagaatctgtgcacacaggcacaggacgctctcagcagacgctaaggatgtcagggaagtgacttggtaacacaagggcaagagagcgttgcttcctctgtattttcctctccattgttgtcatattagttattagtaaagcagaatatgtagaggtgagaaaggggttattattccacccccctttggggcaggtaataacaagggaaccttgagttaaagtttgggctctggctttcctagcacttggtgtctttaagaagttctttatttcctagtttgcctagttaggcatctccagtccaaaaagaaagaaagaaagagagagagagagagagagagagagagagagagagagagagagagagagagagagagagagaagaaagaaagaaagagaaagaggaaaggaaaaggaaaggaaagaaaagaaaagaaaagaaaagaaaagaaaagaaaagaaaagaagagaaaagaaaagactgcctttctccctagtgagtaaagagcctctagaaggagtcccttgtggggagggagctgcatacacagggcaggggcagattagccacagcccacagtccacaatttactgagccagtcccaagtgcatcctgaggtgctaccatcagctggattgggaaggaggcacactcagctcccatcatgccatcatctccctgtgctctgatactctgccatcctggtcaaggagaagagaccccccaaggctacaggctaggagagaagaggagaagacaaaggagatgatggtctgtctgcagaggcctctgctagcatcagtgtgcctggttgatcattgttggagtctgaatgtgtccgttctgcaggatgggcaggtgcagaagctggaagttcactgaagtgcactctggatgctttactcgttcttgctgccccagaaagtgcacactgctatctgataaatacctgttgggcaaaatgtcttgcagtactccaaacaatcccagaaggtgaagatgtttgcatcctccttggaacagtttgcacagctgagctccagagaggttaaacaatctatcctggatcacacagcaaggggctacctgaaagtatgtggcttcttgcctgggttatgccgttctatgccatgcctgttacactgtagcaagcaatctcccctctgtgcagtatatacatctgaaaagaaaggggttgttagaaagaattgttcttgtgtaccatatgtgttttctggccttttctgaaacacccaaggatattttcctctgctctctctggaactaggtttcttcctttccttgagcaatgactacttctcatgccatgtggtctgcttctgggtcatttgttctcgtttgcctttggctcagatggaaatagaaaacaaactagaacatggcattggtgttctccagctctgtttgcttccaacctgtcagcatgctccatctttctctcaggctggtagctatggacataggtccacgggtgaaattcagatgtctggaccaagttgtgtgagcttacttcctcaaccgacaatccctggggatggtgttcagaggaccatctccaggcacaggatttgggtttctgatctcttgggctactgggtcacatggtcttgattatgaatggggttgggtgggtgggggagtcagaaggtgaaactgtttctcttcccccgtgtctcgattggtccacaggctactaggtgtgtctagagttaaaaccgttgtcctcgaggttgtttaactataattggcttgtttacagctgtcaccacccctgacattctggagggtaagcagcccctatacttttacatctggacagatgttttgtggcaccgggtgtcatttcctttgaagtccccagtcttcaccagggttagccttagtcatgtgtgctcacagtgactggtagtgttggagctggtgattgcatagttacaggttgttcactacagtaggtcaagttgccaatcctctgccctttcaagttcaagtaccaagacttctgctgttttagctgaaaaggggggagtctggtgaaatccctgtccttcttcttgttctaaaggaagactggcactcatgaagtgacagtgagaaattgaactcatgtactaagttccggatcctgtggaagctccaatccatgtgctgggctttctgcagaacttcagtccccaaccaactaacactgtagtttttgcagtgcctgcaggtagtacctgggaggttgggtaagcactcaccttgacagacatggttatccagggaggatctgaggctgtaagtctgtaggtggagtgagtcgaccccaccctgtagacagttatgcagttgtaaaaaccagactttcttgggtagcaaccatgggttctcatgtgttctagttttgaaatacttgagtttcttgttaatacttcatcactggttagaactgggttatgactgtttctcatgggccccagaaatagccagtgccggtcataagtagaaacagccttgttgcaaggcttagcttacggtagaaggcaggaaagcattcattcactcagcccttgtaacatggagtgtctgtgatatgaagcccaccctgagaagacagtaggggacaaagaagaacaggctctgccctgtgtagctgctctaggaatctgtaggcctgaagctgtcctatgtgggtagactcagcaagtgaccagtcattcctcggaggttgttcttggatttctactttggtcaggctcagaaaagccacatgtttgggaaggcgtatagggagctggccttgaagctatatttgtgtgtccaatgcactcttatttatgtggggtagaatgaatttggtatctgctgattattattaagaaggcatgatccaaaccccacatcactcccagctggtgattggtgctgtattaattgagtaattgacaggcctaagtcaggaggcagcataggaggagtcgcagccctagctagcttgtctgctcacctccatgtttgtgtgttcccctcgcactggcatctcctgttccaggccacagggagggacatttgtctacctccctgcccactcccaagtaacctcctgagccaccaagaccccgttgtactgctcttttgtaagactccttttcctgctttctgctgtcagtcagtaccgccctggtccctggagggccacccagggtgtttctgcctctgatctgtgggaggcttcctgcttgcaggactcttcctgctcttcagcagaagagcccgctatattgtgagctcacccctccccagctctgccctgtcgtggatctctcaggacctgggaagggggtgttggaactcttcccagcgtctcttcatttcatcctcaaggtttatgacatcttaaatgttaaaatgatgtagaatataattccccgtcaaaacaggagtgccaatcagccgccctcccttccctttctttgcagcgctccttggaaagctactgtggcattttgctgctctgtcaactctctccctccctggggaacacagaaccatgctctctttggttttctctgaggagacacggggtagggatgagccactgtccacaccgtctaagccaacatccatctactgctggtgaaagctgcttagggttaggtcaggaaatgcaggcagcgcataaggcagagttggtctacatttctcttctggaagcctataaaatgtgggcctgccattcacccgactaactcctctttattagggctttaggacagatctgcagagaaagttcctttccacacggctcagaacatcacccctaatgcatgacccatctcagggccggtgagctattatggttgtagtgaaccataaataaaatgctcgcacagcgccatgtcatgggccctcttttaacacacggtgggatacgcctctcttggagggctgccctgtgcattgtagcagcatcctaggtatagactcattcagtatcagttgtgcccttgagttagtaccatgtattccctgaggaatctgccttggctggacgctgtggccctgcgtgactgtccagtgatgtcctcagtgtctggcctcacagcctagaggactgtttctcacagggaaagtgaagtgggcccttgtaagagtgtatatgaaccagcaagatggctcagtgggtaaaggtactgaccactaagcccagctacctgagtcctggaacccacatggtagaaggggagagctgattccaaagttgccctttgacctccacatgtgctccgcggcatgagcctgcccacacacatgtgaacacatgcaaaaatatataaaatgttttataaaatataaaaagcatgtgtatgattggaaaggccgtcattactgtcagtgtctgctctgtggcacttcctgggacttacatggctcctgaactgggtgacagcaagggtttgttcagtgtgggtgaggacctggctcataccccgctggctctctttagcctagagttctgctgcacaacaaggcagaggtctccaaggagccaagtatgagttcactaaatgtattttaagtggattgtgtcaaacacagagtgggaggcgtgtatagcttctcttgttttgatatttaatgatcatcttttcactttatcaacaaaacatcgaactggtgctttttttttttttttttttttttttttttttttttttttatgaaagccactgcctccactgttggaaagcctcagggaggcccgctgtgagtcggaaccccaactttcttgtccagggtatacaaggttagatttcagaaatggatgatcaaacctttggaagcatttcccaactggtatggaaatatctgcgagtgataacatgagtgtgctttgagaaaacttgtagtttttctttttgttttccatatatgggaacatcatctcacttgaaaacagccatacatggaggctgagcatacaggctttaggcaaaggcaggtggatctttgtgctgtccgttcaaagccagctaggtctacacaataagaccctgccttttaacaaatcatggtattgttaaaccatatcttcaagaccaagtggtctctgactgtgagagcagatctcatcagcccggacagacatgttgcttcaagacagaatgatatttttgagctcgctctgtgttttcagtttagtgtatgggggctaattaacgactaggaactaaaaatctatacaaaaagaaaatagcgggcccacatcttaactacctgaagttaaaggtatcgcagtgtggtaggaaaaggcaggagatgatcttgaaggggcttgaacagtcttcgcagaggaaggggctgtctccaccctgacctgcggggctaaaaggaggcctttggttatgagagaggccatggtctaagacacaagacggcagtgccagagcacagaacaaatcactgggacactgaaaacctagacggccagatgcagcaggagataggagaggaaacgcagaggctgaagaagcagtctcacacctttgctaaggagtttagccataaccgtggacgtccaaggtgtcagtaaaagccctccaactggagaacagcctaagacattcactcaggttcaggttgctgtctggagaggaaggaggcagatgagtaggtgagaaggctgagccagtgacttttgacctcctggcccagggctgtgatcccaggagtggattggcatggactgtaaaggccttcactgggggcaatccagaaagcaggtcaggtaggagagtggggctccatggccttttgatctggtagaagctggaatacaaaatccttcgctgcctgtctgtggagacagagaagaggagggctacaaagggaggtccgcaggagggcagagatgggtggcgagcaggtagacaagagacatagaagcgcattcacaagaggagactcaactagtagggagtcgggtcaccaaagaacttggaggtatgtcttggattgggcagaaagtggtgggggtttttggcagcgactacagagccaatctctctgttccaaccaccctctggagttttactacagaattaacagtgtcctctcccagaacagcttttctagtatatttctaccaactttccttcctcacctgagggacattattgtctccctcacttgctgtgatgaacaacctgatgaaggtgacttacggaagggtttgttttggaactagaagcagctggttaggtcacaaccataatcaggagacagagttgaacactaggactcagcttgctccctccctttttatacagctggggaaccccagcccacaggatggcagcacccatgttgtagggtctttccatgccaattaacttattctagaaatttgctcacaaatttgtcatctaggtgatcttagatcctgtcaagttgtttcccttgtctggtacataggctggtcagggttcattgtaagacaaggctgttacaagttctggccgccaggacacacttgccttgggggttgtgaattcctccaggttcagagtccaagttcccaaacctttgcttgcaacgttggagacctaagaaccttacccacgatgagtctgtccacacaaggtatgccttgaccccaggcttgacccaagggttgctaggtgtttgaatgaacatcttatgtggtgtgcagaatgatgaaaaacaaaaccattagactccatttcactgtttctgctgtgaagcctttgcaatcgttcttaatgtggttaaattcaagtggtttccagttcaggcatggtgcaatcaaatttcctcacaagggtgctttccaccatgacctctttgacgtcagtaactgcttcctgttgatgcgaactctctgtctgttaacccagctgacaacgtggtcagcgaaaagtaacgaaacagcgaggcctaggagaccgttcagcgctgtgctgtctgtttccagaggctcttaatagcactctgcagctttcaatatggggctcgttattcacacagaaacacttccctgcagctcttggagtctgatgagcgtagataggccttccagttcaacagcgcctcgagtcactatctaaattattcataaccgtaaatgtaattgctgttctttgattttgtttttctccatcttcgctgtggccaatgtgccgtgactgtttcttattcaaaacgtttcattcccaaaacaacatgtctgccaatgaaacattatttgtaaatcaaaatgatgatgtagtctagttttaaacaaagaagactccttcttagtgtggctgtaagggtgagtaagtgctacagagggaaagggactaccacgctggcgtgttgcagtctgccaggcagcccgtttgttttgcgagaataatgtttaaaaatccagaaggctgagaatcagactctttattcagtgctagagaactgggaagctgactggaactgagggctggcttggtataattttggttatcaacacaattttgtgactcttaaaaaatacttcctagaatgaaaagtccttacctggtcaaggtcattgccatgtggcattaggaaatgcttctgctcaacagctgggtgtggagctagggggactctcatttccttggacctgctagactttgggttgcctttaaactggctatgtatcagggctgtctgtctgtgtgtctgtacatatatgtgtgtctatctgtctacgtctgtctgtctctccctatgtatgcatgtgtatatgtgtgtgtcagtgtgtgtgtgtgtctctctccttgtcctcctccccgtgtcctgtgtgtgtgtgtgtgtgtgtgtgtgtgtgtgtgtgtgtgtgtgtgtctgccggcccttgtgtgttgtatataatgggttactgttggatgggctgcagttctagtcctggggccatgttggctgaagctgtagtggagaattatgcaaaaggggtgataatagtgatagttggtatcacgttttgagcactttctgtaggccaaatactggtcaaagctcttggcttaacagagttagtactcgaatttagtcattttgacacctccattttgcaaggtgagttgaaagaagggaagggaagagatggagggaaaaagagaaaggaagagagagaaaatttgaataaagttcagcagaagctgcctgtacctattgagaattttgggtccacagctcaggcattatcacagagataccaaggacttggtactgggcacaatgtcttctttatcgtctcctaataagttctgtttgttaggattctgttgaaagggcctggcactctgcggccccttgcttctgtctatgatcccacaatcactgttgctgtaggcattttgccctagattttaaatcaggaagctcctccctccttaaaaaattgtatgtattttacttaaaattttcctggaagtaacagaaaacttacctgaggctatacaagaaaggacctaatgataaagattcacaaatatgagaggcatggtggtacccgaagctaggaattgacacaaggtaccctggtgaggtcttctaatcccactccctggtcttatttctgctccactctatatttcctgcttcattcttaaccttgcatttacctatctgtctgtccatctatccatccatccatccatccatgcaccattctgttacactaaagaatttcatgtattcctgccagagacagcttcagctctcggagtcatgttctaactcacagctcagactggattaaaattctttatctcagtttgaatgttctgggaaagagactcaggaagcgtagccttgttccaatcagtcgtgtgctggagacacaacagttgtctgcgtggccctgaacagatacctccgaaggtggtcttcctgcagtcatagaatcattttgtcacttgtcccatcttagtggagctctgctacatagccaggccttgcctcatctagttgggtgtcagtttcaactcccaggagcgacctagaatgagaatgttgagaagtgtctcccgctcaggggctatgtgttgccagagagccagggcagaaagctgacacaggcagtgggtgacaggaaccgaggcatgtgacgacaggaattgtattattgccatgcaccagctccttgaactctgtgcctgtaactaatacagggcgtggggaccgagggatttctgagttgcttttattccctcaggtgttcatgattccttgctgaaggctggcatttgtggttagttgaatcagagaccagagagaggcacaccagacagacaaagggcttggctttgaaactgaagcccaaccagtctcctggacattgggtttcctactacacaggccagggcaaatctgccttcaaagagccaaagccacaggtgacgctcagcagatacttgggctcagcttctaggaaactgggtgctaggagtcctgacatggctgtgcatacagattttaagtacagagagaatcccctggctgactctgccaaggtaggattagcggagccctccctgccctaaaagtggatcacagccaccttaatccattatacagtccctccctaataacacaggattcccctaaagggtttcatcttatttcacagtagtgtggattgggcaggtaaccatcagaagggggcctttgaggtactcctcctagctgccaagatgtagcactctcagctccttctccagcaccgtgtctgcctgcctagacattgccatgcttcacgccataatgataacggactgaccctctgaaactgtaagccagacccaattaaatattgccctttataagagttgccttggtcatagtgtctcttcacagcaataaaacccaaactaagacaccttttttagccaacattttagaacagggtcaataaaagttcaggtctctagaagtttctttgcaattaaaaaaataaaaacatgttgctgattgataaacataattttagcttgtaccttgtcacatggctttcataaactagatcttgtcttcatttcatcccggttgcctctcctctatcttgactttcctttttccttgacttaagtgctggtagcagctgaggggctgtgaatggtacccagtattctagtttggtgccaggcccatagtagaagtgagactctggatggaaagaaggaagaacattgaacaaaacatccttagttttaagtctgaatatcccatttctctccagatagagcagaggagaaagtgctagattctgtaggtcgaggatctcccccccccccacccccccacacacaccagggctatagcaagagccaagatggaggggaaagagaagacctgaaggcagcatattctagcttctcacacctgcagtttagaccagggtctggcctttcagaatttgggatatgaaaaagatattgtatgtgaaagagaattccttctaaatgtccttatcctctcatgaccactgctgccgtggaaactcttgccaaggacgctgacaacagcttcagaatggccacttacctatgggctgacttccagtaaggggtgttcactaaaatggggatttgagtggctgactgcttccatgaaggtgacagtctggtgctacttattcagggatgctgtagggtggcttttccatcacaccttcctcacaccctggggctacccctccaaatgagttctacattagcataacaacttcccaagcctgtattgctttgctagctgtctctggagtgctcacctgccattggagccatttgctaatgtgccccacccaccagactccagcccattgaatataggtcagccattgctcatgtgaacccattcacccaattctgcccctccctttgccagttgaactcaaatgagggccttttgcttagtcacaaagcctgctatatttgtattgttttcccttgggctatggggtgacctgaaaagttgagttggtgaaagtcttttgttattatgaactttgccattatgttttctctctcaaataaattcatgcttctagcatatatatatatatatatatatatatatatatatatatatatatatatatataatttcaaactccaagaaaaggtgggttcttgtttacatacatcctttgataaaatgtcagtttgcccacatagtgaccacccacattcccatccccagaaagaacagcatcgactctgaaggagagatatatacacatacatacatacagggttgattccctccccttctgttgaggttttacttaatacaggaagtaggaggggttatgggttgcactgccctgatagagatcaactttataatgcagcagtggtgcacctgaaagtgagtcaaagccagactccccaacatagttcagtctatctgcgcccccactccccctagcaaaactggtaacctttcaaactctaaggtgggttcttgcttgtatgcatcctttgacaaaacaccagttggcccacacagtgaccacacacattcccacccccaggaagggcagcgctgacagtgaagtcctcacctgcaggccttgagatcaggcacctccctaaacctcatgcaggtgtcagatgtcccatttcctctactgcttccttcattgctttaccagaatgtttagacttgctgtttatattttaagaacccacgtttcttgtgccagcctttctaggatggaactgatctgctctgtgtgtgtgtgggggggcgctctttgttgggtccccagtaccccattagtgctcagggaaggaagtgaggaaatccattgatgctagatgtctgtaagcagaagcctttaccctgtgtgtctcagggcagtggcttgctgaatgggcttttctgtcattaaatagtctgaccatccgtgagttcttgatgcactgttctcatggtccctaggtttctgcagagggagcttgttaggagtccatttccctgcctggtgagagtcactgcaggtggaagccaccggtgtggtgtgttttacatccacttctaactcatggtcttttgatggaccagaggactttctaccagacactgtcagttggacttccatttgtctgagttgtctaaagtggtttacctgttctatgttttctgctcatttgggaggaatggagagccctcccaagtgtcctctcctctgggattaaccctgtgtgctccactgaagacatttgcctaggacttaatgcccatgctctcctcccttaacatgtcgggctggaatgagaaccaaggtctcttaatggttagtgacgtagaaagtcaaggttgtatggaactaccttaaagagagtccatgccacccctccctaagagatcacagacctgaccccacacggggctaacctctgttcccacacagcactctgcatgcttcttggactacgtctcttcgaggagaatgatgctggtgagcaatgagagtctaatccattcccacacgttttgtttaggaccgtctgttctttgtcatggagtttgtgaacggaggcgacctgatgttccacatccaaaagtcccgtcgtttcgatgaagcccgtgctcgtttctacgccgcggagatcatttctgcactcatgttcctacatgagaaaggtatcatctataggtgagtttgcatcccgggcgcctcttttgagtcacccccctgcctggctcctcacttagcccagcctttcaatttctcgtgatcattgactcaagtgtttagcaatgaaattcacagaaggcccaagtattcattagagttatcacagagatgaactcttgtctccaaactaaaatgtacagtctggattccagagagattaatatttatggattggttcagccagcatttgctgcagtagccaagccctggaaagtgctggattcattactgttctcctcttcccagtctaacattctaagtgagttggctaatgtgacggactcattctattttaagagctggcaactgagccaaggtctgtgtcttaactgttgctgatagtagctgtaatggcactaaggtcagatgaggtgggtttgccaggccacagctacgcctaggaatggggcagacaatgtttctcatgtgtagcctcaacagtatttgattacatgtcacaacacaatcctttgatcttaataggctgtaatttgagtggactcaaaatccgattggtgttctcaagggatatccggtgaagcattaatcagagagatggtggaccgcgtgtgaatggaatggctagcaagtgtcctggtgtgctcgtgttgacattttctgttcacctgtagctagagtcttcccactctgtaaattacgttaataccctagttgccacatgtgatggctagtttttatgatcagcctgacacaatcacaagagccaccttagaagggactgtcaatgaaacattgtgtagatcaggtttgcgttgggcatgtctgtgggggaattgtctcagtcacattaattgatgtgggaaggcctggcttgaatgtgtgtggcactattctctgaagttgggtcccagatgatacaaaagaggagaaggtgagctgagcacagtttagcctgtatgcatccatttcccttgctcttgactgtgcgtgtgagggattagatgtttcaagttcctgctacctcttctcccctgctctggtgagcctgtggtgctttgaaggagaatagcccctgtgagctcaggtatttgaatggttcctggttggttgatggaattgcttaggtgtggcctttggagaatgtgtgtctgtgtggataggctttgaccatttagaaacacactcctggccactctctctctctctctctctgtcactttgtctctctgtctctgtctctctgtctctctctccttcctgtctggatcaggatgtaaactctcagctactgctctagcaacatgcctaccgggctccctgctgtgaattcaccctctgaaactgtaagaaagtccccagttgaatgctttctaccgagtctcttcacagcaacagaacagtaagagaggaactgaaacccagcgttgtgtgctaaaataatcctttctccactaaaaaggatttaagggagaaatgtgtttgttcattttatcacagcaacagaggtgaacccagcaatgcactcgttcttctctggtaatacagttcttgctgaattaccctacactgtaaaacataaatctgttttatggtacaatcctaaatactaaaacaaagaattttctgtcagaaatttactatctgtgagttgcccgtctctaccctgagtgccccaaagagagactcttaccacattaacttttaaagaacaatgacctcactacttggaatgacttccattgtaaatcaagctaattattatcagccccacaataactgaattgtatacacgttccaagatcaacactttacctacatttgccccccgaaatctccttaacatcatggttatcgccattgattagataaataattcttagggagatgtactaaccaggctgctaatggctagagaactgagagctcaaaccctgtctaacgaatggttctgctgccttctctgttcaggagaaacttgaaaactggagagccggtatcttattctccttatggtgttgaggtaactcttaatcgtgaaaatgaaggcagagggggatgaggagtgaggcttaaaggttcacgtggcctgactccttcgggcctctctctcctcagaaccctgcactgatgcaagggcaagcttgctcctctaggttgaacgccatacttccgtctgctctgtgaatgttgttctagagaacattgtcattgcagtcgacggtgtttccggtgaggcggcatcgatccacttcctgaagcttcctttcagtttcttctatctgtggctcaattctaattttcaattcaattctgattttcacctatttcacttactcttgaactcaggcccccatgttcatagtctaactgatatatatctgactttgaagggagaactcttaatcaggatagattaaagtgctatttttgttctgcggatttgtttaatgggacacttttaattccatcaggctcctgactgggaccagagtcttaagggtgaggctctgaaagccaagtgcttggaattcatccagagtcaagggcatatactgagtcacagagagtgtgaattagatgcatgcaggaatctaataatcaactgaggaacttgagacagctctgtttatcatgtgtgtcccaagatggcctttataagaactgaaatgctctctcttgaagattcctctgagctgtctaaataaaattgttggttggatagttggttggtttgggaggctttacctcctgggtgtgtgtggcttcttgttcagcaagtcataaagatgataccattggcaagtcctcaccaagtaggatctcagagaaaaggggaagaactctctccaacatgaatttctctctttccattgactaaatccatggggtagatcagaagacaggctggctatgtgttttatagcttttgtgcagagggaacaaagcctatgtcctgggagactcagctgcagaaggctctgctcttgtgcttttggtgtagagactgttgctggccagagcccttacatcaaaaccaaggtgagctagagagcaggcagtcatggaatcagcaggcagtcatggaatcagcaggcagtcatggagtcagcagacagtcatggagtcagctttgacagaggagaaaaacattctggttaccagggacccagatggtgcattaatactttctatgtaacatggatgttcttccaaaatcaaacagaaaagccagaaaaataaaaaggcatacagggcacatatagcaagcagcacaggaacctttttctatcatgctccataaactgtattaaaggagaattcagccatctcttaacatttcaactgcaaaccactcagccctatgttacacacttgctttgatgtctctaaccaagtatggaatgtatttgtgatttattgggtaaagaggaattacagcaatttagatcctgatgcctgctgaccaagtttcactcaaacaccgagtatatctcaacacccattctaccatgtgagagcctgattgtatcaagtcttttgcagcccttggcagactgcaatcagtgttcactcctaaagggctgttacttcactgccccattttccagatgtgaaccagcctacagaggccaacagtcagacctggcatgctgacttctcttacactcacagagtatggtattaaattttgacctttcctgaaaatcacctttgatatctcttcagaaaaacttgcttctgccttgtttgtcttttttttttttttttttagctcataagactgtggacatctgtcccaggacaagcactctaacagagcttgctattcccaactcgttcttaaacttacagttcagtgaggttaactctatccctatagggacggttctgttaaactagaccctgaatacagcagctgactctctgtgaagataaacttctcacacattgcttacctcttttctcaagagcaggatcaggggtattggggcctggttggttcagatacttatgtggtctgaacttagttgggtgtggctttgcttagcaaacccttggtgagatcactctgaggaacgttgcttccttggctagagattcactaggaatttgcttgcaaatcagttctgtgttggatctatggcagatgtttcatgcctgagtcattctgctctgcagttctccccttctggaaaactgggtcaatgtctctggttcccatctccccggcctccctttctcctcgccatcttttatgagccaacttgcgaactccccagataatctctcatttgagcccggagttttgtagtcttacctcacctgttttaggctgcatttccatatttgcatttttcctctgtgttcaatcagaagaatctctttgaagaaaggtgagagtcaaactcagtagccctgttaattaacactttctcttccaatggcatcattctttccactgagaagcagtttcgttccttcttcacttgctacacagcaaggatggccacctgttgccatctgtcattcagaaaggaccagacacagaggtgctcagagtgtgagtaacttccatgggaaattttggctctgagctctccccagaactttttagtcataagcctgactcccttcttgcccgactttgctcattcagagactactcctccattgtcaccagacagtgaccaacgttccgtattctttttccaaaaatgtatggagaactcacggtttccagctaagtggacttacctgacatactgcctctactcagtctcccctttcccacaagaaaacacttggccttttcacttcccctgagcaacccttagagaccactttgtgttcagtaaccatcgtctcatagccaaggacagacgtaaggttgaacaaaaccaataatattccctggtggaggacacagtacagtgatggaggcagttgtcaatcaagtctgtccaatgccgggatgcagggaaatgcagtgtcctggttgagaatttccccagggcgaagggtctggctagggagagatggaagatcttcttaggaagtaactcttaggctcacgtcactagtgaggaagaagaaaagtatcttttaggctgaaagaacagcaactgtagatgcccagtatcaggaagagtggtgagttctaaggcttttaagggatgtgtagttggaaccagtgaggcatattttctcacagttagcactccattatcccagagtcatctgatgactttaaaattttattagacgtacctcataaatagtttatttaagagttaggtaagctggtcatgttgccaatccctggaggaaccaaccagtcactgtgtgtttcttgcatccaggacacccaacaataggatttttacaccccaaagattacctaaggccagctttgtttttacaggtgaggaaactcaggtctcaaacatgcaaccagcaaattgcttcacacagcagaggctctgtcaggatgggttgtctgcagtttgtagtcccatgtccagaaactgaaaataggattaatttttaacttcctgctcattgatgagttaatcaggtgttctgaggcatccattggggctccatttcatcaagggaaaatctagtcacagcaagagcaggtcaggaacacagtgtgccacgcaccgtgtgagaagggttagctctgcaatgagtgtggtagggtcctctccttggtggctttgtctgtaggatgagatagacaatccacagaccactaatagcaggtagagcccaaaactggagcatgcccagtatgtcagttccatttcatattacactctcaaaatacctcacaaaaagaactcagagaggggaagaatttgtctagttcatggttagcttttgaccgtcatggtggaggaggcacgatggaattcatggcagcttcatctgggtggtggtagcttgccccatggcttgttcatattgttccaggcagattagggagcagagagctgtggccatcaatactcacctctggtgagccacttttataagctaggccattttcccaaaggtcccacagtccctcaagataatgctaccagctagagaccaagtggtccatgcactggcatgtgtctgttggggggcagttgcaattgcctttacagaatacccaaggtatcttgagaatacagggaatgccattcaacgtgagacattcaggcagacttcatggaggaagcgacatctgaggtgagtgtggaccgttacaactgaacaaggataaggatagctttgtggctgtggaaagggaccacaagagagccaagcagagaagcaaaaagatagatggtgaccagataggtagaaactaacgtacaggaattgtggtagtaccaaagcctaaaggttgagatacaggggaagagggtcccctggagacagcaggaatgaaactgtaaacggcttgaaatgtttggcttctgcatcttttaggattcggcaccattaccagtcacaggaagcctaaaaatgccaattacttaagccatatagaaacatgattgtcttgtaaaactcagggtcagcccagctcggccccagaagctccacagactcctgtgggacccggaggtctgagtatccagttctgacaccttcatggccatcttagtctacaatactagctaagagtcctgggactgctttgacttcaaatccaggtagtcagaagggctgaagggcgctgttccaaactgggtatgctcccttcttgaaggtatacataatgtatatcatggggtttgctggaagttggctatatgactgccccagctgcaataaagactgagaaatacagtgtaatgtttcaagaaatcatctccagctaaagtccagcctcttgttgttaagaagggagaccatagttatgaggtgagaaaaagtatggacactgtctttcccagggggtttagactgagcagtctgtgtgacaggagtacattttcgtcttgcatgtgtcaggaggtagtggtccatgtggacatgtgcatggtgggtggcaacccacggggtttctgtctgagccagttacagtcttgtgacctaagtaggtttctatctgaggcagttacactcttcctgctgagaacttaatgctgacctaacttttattgtaatgttgagacagtccatgtattctttttccccattaattaatttattcactttatatccctactgcagtcccctcaccttccaacctctcccccccaccccccagctcacagctccctgtcccctctactcctccccttctcctctgagaggagattaggcacccagctaggaaaacaggatccataagcatgcaatagagtcagggaccacacatgaacatcaaactgcacttttgctacatatgtgcagagggcctaggtccagcctacgtatgctctttggttggttgttcagactctgagagaccccaagggtccaggttagttgattcttggtctttcttcagagttcttatcccctctgggtccttcaatccttcttcccccaactcctccacaagactccttgagctctgtccaatgtctaactgtgggtgtctgcacctgtgtctgttagcagttgggtggatcctctctcagaggacacgtatgctgggctcctgtatgaaagcacaacaaagcaccaacaatagtgtcagggattggtttgtgctcatagaataggtctcaagttgggccagctattagctggctactccctcagactcttctccattcctgtctctgaacctcctttaggcaggacaaattccaatttccctgaacctcctttaggcaggacaaattccaattggaaggtttttgtgggccttctttctgtattctttctgctaataatttgagtgattttctgtgaacctggccagcggatccaatcctggttctggatacctgggcaaattgctgaaggctccaagccttttttaacccactatccacacacgtagagccagtgtctctgtaggatgaaatggaagcctgtagtctggcagcttcaagcctgctatgtcacgaggacattctttttcacattccagtcaatcatcaggtgatctcgattccttccacttaggaggttgaaattatgcttaggacaatgcagctgagatgagattcttcggacagatggggtcttatcttattcagccctttgaagagcaggtttggtgtttgtttttttttttgtttttgttttgttttctttctccagaattatttgtatttcagttctcctttggagcgatgattatttctcgtcttatcctatatttgttacaaacctttgaggtgatttttctggcaaggctgttgggtctcgggacaggttgtgaaagaccctgactctctaatcttgtctcagaaagaacagttggactcttggtttgtttctttgtttaccccctctagtgaagtgaaacaaaatttgaggtggttaatttgaggggaaatgcaggggtctttcaagaccttcggtagactgagaaccctgaatcccagtaatgccttttctcaaagatccagcttagtgtcagagcaaaacccaagccccaggatacctaattgttttgtgtacttcattcattcagtcattacatcagagtggccgtcctgacatgccatgtctgtgcctggctttagtgtcaacgaaagctgtggttatttgtaactcattgataaatgtgctaatcggtttccctggctaatgaaatcagaccaccagtttggctcttttttcctaccaaattgaccacaaaacctgtttttcattgtagttagcgacaacttggatttatctgctgagcaataaaaatgcagcaggttgacctttctgtactggctgaatgccaccatttgtcaaaggcaattgaactggacagctcaacaaatgtctgaactgccccctctactcagctttgtgtctgattcctggggatcaaaggaggatatagatgagccctggcctcaagctgggggcttgctcatgcccttagcctgatgcttatgaagtatctcccgtgttccacataaggctctaagccctggagaaatataagaaataaaataaacaagtccctcttcctctcagggaggttacactctagcccaagcagacaagccaaaagtatggaatgataaattctatgaagaagatgttggataactgagggtaaaatcgatggcgttgatttcacagggagaatcaagaaaaaacttctccaaataggggcctttgagcaaaaaagaagagccggtctaagaaggaggatttatgtgaatgtctcttgggagcacattcaggataaagccagggaaggaggagctgggcatggcttgggcgtgtccagggaaggcagacattgccctcacattgcttctcactgtctagatgattgaaggctgcatcctagcctgtttcttacctgctcattttcattcagtctcatgtatcctttagttgttggcacgggacatagtgacatttcttcatttatgttttacctctgtctgtatttgtccatcagaactcagtgtgtgtgtgtgtgtgtgtgtgtgtgtgtgtgtgtgtgtgtgtgtaagattgatagcaccacggtgtctctattgatcagagagccagagagagtggcttcagccaggcctagaggtgcaggctggtaaacccagctgcccaggaggctgaaacgggaaggatgcaaatgtgaggctagcccctggctacatggtgagttcaaagctagcatagataacggaaggaggccctgccttacaattaaaagaggttttttgtttttttttttttttttttttttttttttttttttaaggattaggagtctgtctcaaaggtaaaacccttgccaagcatgtgtcagtcctgtccccacccttaaaaaattaactgtttacgtataacgttaaaagtacattatgcacagacatggccaaaaagagcaattgttagctgctgcactgggaataccatgagagctaatgctccttcgttcgtattcctgtcgggctcctcagtcccttttcctcgtgcctgcgagtgctcccagtagtgttctgtgcatgtacaggctgtgtctgaatgttgttgaaaagcaaacagtggcctgtcctacgtgtacagaattgttcctctgtctctatagagatacaacctaaacctttacaaaaatgtgaggcgagcccgcctgcttctctccgaagggtctcacagtatcggagccctggaagaattttgctgtttgtgttggagaaactgcaggggttttcagattctgcagcaggcttataaaaaatcttatcttagcagcatagcaacaaagctgtcttccacgtggggaggagacgcatcgatcgctgtcactaactgggcttcagaatagtatgcacttccccatggtgggcagtggcgtgcagcagtggaatacctctgttgaggagacaacaaaaccaaatcctgtcaagggaggaaaatgaagagctagctcctgttttctgagaaaaggtgggggcagtctggaggcccagccctaccccagagttttcagtgaagcaaggaaggggataacaattccacatgattccaggagtaagatatttgcccctcccaagtcacccggtgaagattttagcactcccttgacaaagaaatgggagggaggagtggaggaggccaggtaacactggattacaaaattctttctttagagagtcaggtcctgctatggagtccttcccaagggacccatagctcttatattgattaaaagaagagagacagacagagacagtcagaaatcaggaaaggagacaacgcacaaggcagaaaagcaggcctttatttaaagaaaaagtcctagccagctggggttgagatagacactggcatggagtcagcttccaaagctaggaaaatgttgacaagcatgaattgtaactgagagtgctgtggggtccttcacttccttgagatactgagtctcgggaacacagggttggcctaaggaacactgagggtttactgtctcctctgtgaacaggttcaaacctgccaaaggctatccgagttcccttctgactgatttacgtgtgtgttcacagctcttctttcccctctgcgagaatcaggttgtgtaattcagaaggctaaaaaataacagagcagaaataagtcagagacgttagctgaggtcctccacctctgccaggaaggtgcccacaggctggagacctctgtgaggtctttgtttctccctctgcagatccccggccactccaagaagcctgcgtgtgctgttgggttccagcagcatttaagaagtaaaaccctgttctccacagcttattcctgtaaactaggaagtttgtcctcacaggccaggttcccagcatttcctggcatctcagccttggcagcaggcttgggaaaactgggatgttttatggccgggaggctgaggcatgatggctgtgtgtttgccgcccagtgtgtctgagggctgcccagcttccttcagtctgccacggtgactgtgttcatattctggttttataacaagaaagagggaaagttgggctcagcgtcagggatgttgtcagagtcatcggccaggaggggtgccccgtgctagacgttgtggctttatctctgtagttcaggtgctgggattcaaacctgagacctcaggagcactaagagtgtgctcccacactgaactataccttagcctacgaccttggttttcttaattctgaaacataagacttactgttagaagctcacagtactgtgttttgtaaggatgaaaatgtgtcggagatgaagatgaggcatagctaacgcaccagtctatgcaatagaagaattgagcagtgcttctagttttggaagagtgtggctgagcttatccaggcaagggacagctcagaccctgtgctgtcgtttatcccggacagtccccagttcactctcagaggctcggtttagatagaacatttgccaccacctatgaagaggtgcctgtcttctactctcctccccaagatacaaagccaaagggaaaaggattctttcagatgtggggtgggggatcccctgagtgggggagactcccctccgtatctctctcttagactgttcttccccagtccatgagtagtaggttcagcccctttctgggggatatcggtattaagtcccatgcatagagtatttgcatgtcacccatacaaatcctcccatttactttaaatccatctctacgtggtatttcaaagcgaaatagcaggggaaaagtctatccatgttcattccagagagaactcttgttcctgagtgttgtgacccatggctacaaatccacaggtgcagaggcttgactttatttgcacgaggtatacatttatctgtgcttgcaactttgaattcattatttatctattcatccacccattcattcaacagtattcactgaaacctactgtggacttgggaatgcacctgtgaccaagataggtcatctctccagggatctagatccttgtataaaaccataaagaagtaaaagtaatgactagagtagaaagaaatggttcttgtttgcaactttgtttcctcgagctaaaggaggagaagtgacagacaaaaaaccctccatgcttttcattatttatcgtctaaagtatttcttagccggttcagactgctataataaaataccacggtctgatgtatacacaacagacgcgtccttctcacaagtctaaagtgcgggaagtttaagatcaagatgcgggtctattgatgtcttgtgggagtttttttttttttttttctggtgtataggaatgaagcagccagtgagcactccctctgcagtccccttgataaggacactgtctccgagggggcatgcccagtgcacatgggtatatgcataggcacacacaataaataaataaataaataaataaataaataaatgtaataattttttaatttcagtagatctcggttggggggggggtgtctcagaaactagggcagtgctagaattttccagtgtactgagtgttttccacctggttggaaacattgaactctctatgtctgggcagaaagactgctcaaggagaaccagtgggtaatctaagcacttggggaaacagtaggatcctgtctttcctcgtggcatttctatgcgtgggagtggcttcctataccccagcctaggccaaggggagcactgtccccattcacttggtttgctagcccgaagtgctacccctgctccagctaagtttgcaattcctaggtgagccttctccaggagagctcttcttccatgtctccctagccagtctgtgcctcccaccctcccaggaagcttattttcactgtcagcaaactcagagatgtggagtccatcttcttcacagcccctacgaaggagagaaggctttgttaactggctgacatcccctattcccagactaagaggaaagaagatataaggggaatccttccatccttcacacagtggctcttcctcaataggcatttgatgaaatagtagtaacagttcctactggtggaggccttcggagaggcctcttacaaatcactggtgtttaagtgaaactactgcctctgttctttttggagatcacacacatcctcaccccctcctctcccnnnnnnnnnnnnnnnnnnnnnnnccccctccccctctccctctccctcttcctctcctgtgcactgcctacatttccctgctaaggtcttctttcctgttacaccagaaacaaacaaacaaatagagaaaagactacaaccgactagtgggctctgcacagcataggaaacagtcaccctcctgctatgtggatgtaatttgtcccctccaaaacctgtcttggagttcagcgtctgatgtaacagtgttgaaagactctaagaaatgattaggctggtgcggcgcacacaccttgaatgctggcactcaggagacagaggtgaatgacttctaaggtggctgatctacacagtgagcgctggtctggccagggttgcacagtaagaccttgtctcaaagacacaggggaggcccttaggacataaagagaggttgatagagttcttaacagactgaatttgttgttgcagggacacacagtggccccttgttctctgtgtcttctgcacctggcatctgccttggcctttctgctgtgccctggtagcacagggaccttgccacatgtgtctgtccagtcttagactttcagcttcataatcacaagctgaataaacgcttttcttttatacattgtcctagcctcgggtgttctgttataacagcaaaggacagactaaaacatctggacccttatgtgtatcatagcagtattcatgtcaaccaaaatattgaaataacctaaatgtccatcaaccaatggatgaagggaatttgccttggaacacgacttagctttttaagaggaggagggaaacgctgtcctttatagcggtgaagatggtcctaagggatatggcactaattcaggcaagccggacaaaggaggacaaacagcatgatttcatttaactgtgtgatcccaaagagtcaggcccatagaagcagagtagccttgtgggtgccagcatctagagggaggtgctgaacaaagtgttcagagtttcggtaatgagagagaaataaattccagaagtccgtcctacagcacggggattgataacaaacaacgtgtgatggtttctcagtttgcttacgagggctcatcttgtgttgtgttgagtactctgagcacagaaggaggggaagtgcagcaattttggagataatgggtgtttaatgcatcagttgtagtgatgactacatggatgggtacttaaccaaacataccaaattgtatgtgctaagtatttgcatcttttggggtcaatcatacctcaataacttaaaaaaaaaagaagtctcctctttggtccttcatcttttaacacagttattgaaaagaggaatgtgttgaaagaccagtgtctctggttccaagaatcgccagtgctgatggtttttaacttattccgtataacagcactggcagctgacacaaccttttgaacttccctatttctgaggcactaaaagagagggatgaagcagaagggcgagagcagctcaggttggagtcatgtttcctaggtagcaatacaagtctacctaggtagcaatgtctcctcttgggatacagtgatggagggtagactggccactgatatcatcaagacccaagcaacagtggaagagaaagagaaggtagactctagtcagtaacatgtctgactggtggaggtgcacacttttcctttctgtgagacatcagtcttgtgtgtgcaggaggaagctggaagctgctagctgtgtctagcagcctctgttgctgcctctggggaagccactctgcctgagtcccctaccccgctccttctgcttggtgggcttgttttgtattcagggtcatttccttcccaggaactggggaatctgatctaagattaaagcaggcttagtttttcccatgttacagaggtaaagatgaaaatactggtagcagttaacttgtcttgcttaagggttaccatatggatatattattacaaatgaggaccttcttagcatgggaggtagactgtgccaatgcacggtttgcagagccatgtagagacagaagagactccggaaagatgccccctgactggtcctcttccgagggaccaggacatagagtttccacttactgtatttggggtgggctgtgagttatggaataaatacactgtttgtggtttaagtgtacgcttggtttggacccgtcaccccaggctgtgcacacgacactgtactcatttgcccctgcttggctgatgcctcacacagatgcagactaggctatggtctagtcagtcatggtctagtttaaccatgaaggaaatttctccaccattccattatgaggatgaataagccctgagcacctgctgtctactgtgtttgcttttgaaactcaagacaaatgagataagagacactttcacaagaatttgtctgttggggctttgaaccatgtgtgtatgtgtgtgtgtgtgtgagtgcacacacatgtgcacacatacacgatgtcttaaaggcttaatgtaggcaatacaacaagagcacagaaaaggcagtcattttgatgggaaggccttgaggaaggaacacctcttgaacctgtgtcaatgtagggcgcacctgccagataggttagagcaggaaggatagaggcatggaaactaagaaattgtgaagattccatgtgatcaggatgggagcccgggaaatggctgggatgaagtcacatctgaggaaagctgaggtcggggcaagggcagttttgagatgaagctacaaggtttcagttttccttgtctgtcagtggcagccatcagatgtttggggaacagaccaacagtggccagcccagaaaccaagatttcagaatttttggtcataggccaggcaggaaacaattctccaagcaagccagtggggagagaagagggatggaattggtagcgcagtaaagcgaaagtggacagaacgaacatggatggtagagcccgtagacatgaaagatggcccaagatttccagtgatgagcttttaactttccccacccccaagtcaccacagccaaggggtgactttttacttccagtctttttacttccagtctttcaaagtctgagaagtcaagacagccctagtagctatgcccagaatgcagttagaaatacagactggcatctcccaagagaggagccagggtagaggtttacattcaagagccaactgtccaagtgatgtttaaactcatgggattgaattccacaggtagagggcaaaggcgagtatgcgtgggagggaggatcctgaacaggacagcctggggtctgtcacctcagcatgctcaacttatatgtgcaaaatggcttccagtcttccagcaggcgactgctgcatgacttgagagagacagaggtacctttctcagattttcacaaaggcgccgtgtgatctagcagggatgatggaagttgatgtaggcaagaatcaagaacagagcctcctagggaaccgcccacccttccagggagggcagggaggaggacctgcctaaaagacacttagaagtggttagagacttacataggattattgtgcttggttgcttccttagtcaccacagggatctctcatctgcccttggtttcgtgactcaggcggacctatacccccagtcccaccaggtcatagcatcacccccttccccagaccagctgggtttgctggtgatctatctctgttgggttaagattcggaactgtcacacttgtggctgccatgtgctcctgaaagccaatgctaggcaggtgaccatcatccttacgaatagctgtctttgtttagtgaccatcgttgtgcctgctggtggagcagagaaagcggtgctctctgccctgtggttcatccaatcacaaccaggttctaggcagccaagattcaagcaggaacaagccacagcagcccagagcaggaggaaccttggctaccctcaggtccttccttctttgggccgggcagggttggggaaacttcttgccctggtgactgcatagagaagaaaggatctccccagaacaatggcttggaagctggcctggattcctcatggcttagctacagaggctcactgcctcccctgtctgtgttggttgagacactagaaatgtttcttgcagaaaagaaggcatgtccctgtcctggcacgtgatcatctgcccatacagacctggcccggcttcatctggcatttctgaccttcttcgcatgggtggaaagttacaggggtgaggacgggtgacagcaacacctttctggccaggaatgtgccatctgacccagatcaccttgtgtcagcaggatccaggccaatccagggacatcagaatgacagcgcacctcagtgaaacacagcaagctgtgtgggtggggcaccaccatgttagtttcctaagccagccaggcagtgctctttgcctgtgaaatagttcagaatgagagattcagagttggcttgagtaagaaactgagtctctttccttttttggggggtggggtggggtgggttttagggtttttgtttgtttgtttgttttggtttgtttttggtcttgactatctgtgaagtgtaagtcttctgaccttcctgactttgggcaggaagccttgcaagagctctgagagaggatctcctagaatttattctgtatgtgggctggtgatctggtgccgtgtgttttttgtgatgtgtgtgtgtgtagatgccagaagttaacaggtagctggggggaaggggcgagtgtagcttcctaaataactctctatcttattttttaaattaaaaaatattattatgtgtgagcatgaccttatttttaaaatcaaaagtatcattgtgtatgaacatggagtgtgcatatgtaggcacgcgtgccatagagtatgtgtggaggtcagagggcaaacttaggaagctgtgctctccttccatctttacatgggttcggggactgggctcctatcattaggcttgagcacgcttatccactgaacaatcttgctagccctttattttatattttattattttattttatttgagataagatctcactcccttatctgaaccggaagctctctgattctgcgtagctgtacggccagtgagcaccagagattcacctatctatctctgctccagcctgacagcactggggtcacagatatctgcccagcttttataaactgggcactaaggatccaagctcaggggcgtatgcttacccacagacccttgaccgatgaccgagccatctcctcagacccccatggcctcttcttaaagacagaattctaaagcataagttgttttcctgtcatctcgtaggggaaatctagagaggaatccaaggccaaccttctggagttttgttccccagaggccttctctggaaaagttaggaaactagctgattcccaaaggaattaatttattaactttgaacaagaaattaattccatatgctgggaatcgtgttctttggtttgggcttaaaggattttctgtgcttctaaatggttttcgatgtactgttccatcactctggagttttccatgaaatgcaatagcgaatttcatcaaatgagcctttcatcttgatgaaggacccagggctctcattactccttttcttcctgaactgaccttttaattttatgcaggatgcacaggggcaatttgtcttgtctggtcctaatagcacattgccgagaggatggttaatcaccgggcacacacattcgtcactggtggttgtatgtacaagctcaatttttcttacattaactggagaaccagactgagccagagagagaacggtgcatctggatgggtgcggaagggatatttgccagcagatacagagagtgctcagaccatttcttcccctcaggaccactgtgcagagaacactagtgggatgctagggaaagtatctaggctgtaaggacttcacacttaaggggcatggaaagggagtgcaaacaaatttgggaataagaaaaattaacacctgttcagcttgcctaaaccagtgccttgtttggggaccagagagctgaaaagtaagcttgagaaaggagaagaaatgcagcagaaatgttagcgctaagaggagaggcttgtactatgaagggtacaagaggcctcagaaacaggagcaactgtgaagacagaatttgtcatccaggagaaaaacggaagggaggctaagccagaacccttctacggtaggccttttttccctgcaagccatttagcattagtactttttgtaagatataagtaaattcctaggaaaatgaaacctcaaaatgatgaattaaacagaagccaagggctggagagatgacttgacagttaagagcacagactgctcttccagaagatgtaagtttgattcccagaacccatgtcagaaggctcacagttgtctgtaattccatctccgggggaatctgactcatctggtttctgtgggtgcctgccctcctatgcacacagccacacacacacacacacacagagacacacacacacacaaacacacacagccacacacacacacacacacaaacacacacacacacaaacacaaacacacacacacacacaaacacaaacacaaacacaaacacacacacacaaacacacacacacacagccacacacacacacacagacacagccacacacacacaaacacacacacacacagccacagacacacacacaaacacacacacacaaacacacacacacacacacacacacacaaacacaaacacatacggcagggggaaaagagagagagagagttaaagtaataaaataataacatatcttaaaaataataagtccaaatcttattagatcaaatagctatctatcactggcaaatagttgcaaaagtccctatactctccttgttgcccttatctcaccactggccagaaagcttgcagacaatccatggcccacacgtttgagtaaggctccttgtcgaggacaacacatgataggacagagggctcccaggaggctgggtgtgctcctcttcaaggtcactgagatcagaccatagagccttagcgataaagacaaggccagagtgactgctgtggctggtggtaggggactgtgaactccaaagccatctgggagctgcttttagtctcagatgtttgaggagaaggtcagaactatattttaaacaaacaaacagctggcagagcataaagaaggagtaaagcagaagagacatgatggggctaaataggggcatggagactcagtggagagagagtatctgattctaagtgtagctgaggataactcaatccttaatgattggctggagatgagaagtgggaggggagaccatccttcatttcccaggtgaagaactggcccagagatatggcagagctgtggccagatcctctgatttctgccttaggacaaatgttttgtcccttggctatcatgaaactttacactacataaaacccacccactctgattggtctcccctggtcccaccctctacagcctgtctggcttctctctgccctctgccatggtccatgtctcagtaatagaagccactccaagagttcactgcatccagcaagaaccagttaaattcacattaatcctgtttaggcagtgtgatggaattttaatacccttcttttgaaagaaccaagatctggtctcttgatactgagttggctgtagacactggtcatgaagtattgatgtctggagtgagaaaggcttgaggatatcgccttagaagattcctggggagctgtccgtctcgtagaccaccaccaaaggaagagaccccagaaagcaatggcagcttgacaatatgcttgctgtcaggtgacttaacagcgtgagtccacccagctttctaacagtttccacacctcccctaatccagcctcacctggcgtcttaagttaaatcattcctgagagagaagaatggctactggagcctacatgtattaggcaccagagggacccccaaatgaaaaaagacagagataagagagagaggcaggctcattagggagattaaaaaaagaaatctcataagaacagcctaagatggaattttggaacttctgccccctcttcagacccccatgccttcttttggcttttcctggtaaagaaacacaaacatcagttgtgtgagaacacacaattgaaaacactaacatgttaggacgtacctgggtgtctaaacagcaaagaccaagcgacacatatcaaaggaggtagcctttgaaaggcctggggttcattgctcctttgagtctgtccaggtggtatctgctgtcctaaagtgatttgtgtcctaaatcaattaggcacagcgggcaggtgataaggattaggtgttggaggttaacttgatttggtcactttgggatgtgcaaatactagacgtgtcgtgaagtccactccctggaaagtgtgtgcttgagctttggagactattatttctgcagagtgggaataaagctctccagtctcagtcagagaagccggcgatgtcctgccttgtcctttagccgcttactccacctaaaaggagaggtcacctggtggtaaccaggtgacatccaacagctcaggatgagccaagtgcaatctgggcaccacaccaaccggaatggagactttaattcctttcttaatacttcacaattctgtctcagtgttcatgtggacaaaggtattgtggctggctaatggcgttcaaccatttctgaaatacgctgacattgggactttgtctccttaatgcactgcacacaaaaacaaaacaaaactttctttttaaaaacaaagcattcacacagagccaagaatgtcctgggtcaacagtcctcagcctccctccctggactgaagagatctttgggctcagatggagaagcagagatctgctacttagagatcactctccaggtccagccatctggcctgggccaagcacctactgtgtgtgtcaggaactcaggggacacctgcagtagcagagcataggaagtcactcaccgtgtttgcagacagacaaggcccatgtagcaagcagttcccggtgtcatgaagagaaacagtgtgaagctggggtgagtgggcagttcccacgcagtcagtaatctcctctgcgttaagagtgatgccactgagtttggtcattttggaagtctttcaagaggagatagatttgagtttataggaaaacgaaaacttgaatttgcaagaggaaccgagctaagagcagctgggaccacaatgagtcgacatgtaaagagagggatctccaggcatgtcggaggagctgtggttcaggatgtacacattgtgtgaggacgatgcaaatccccttatagcacctctgtgtataataaacaacccacatctggatgatgagaccaagttctcttcttcaggctagactcagcactgcttcgatactcccatgagcacagttgctttattcctgcagaatgcccactcgcttccctccaaaccttacaactcccagctgtgagattttgcccttgtcctgtgtgcctggcacaggattccatctttagtaagatacacacatcatcaacttggaccctgcttcccagggaatgtaaaatatatccctgctcaattaggttgagaaataattataagaattgacaagtgggatcccgtgaaattaaaaacttttgtacagaaagaaactgtcaggagaacaagaaacatcttacaaagtggaagattatctttgcctgtaacatggtaagagattaatgtctgggatctacaaaacactctaaaaaattaagcacaccaagccttcatatcattcagtcaataagagagttaatgagttgagtgaggtagctcagttgatagagtgcttgtctagtatgcaagaagctctgggctgcaaagtcattctcagctgtgtatagtggatttgaggctagcctgggtcacatgagnnnnnnnnnnnnnnnnnnnnnnnnnnnnnnnnnnnnnnnnnnnnnnnnnnnnnnnnnnnnnnnnnnnnnnnnnnnnnnnnnnnnnnnnnnnnnnnnnnnnnnnnnnnnnnnnnnnnnnnnnnnnnnnnnggaggaagggaagttagtagagaggaagggagggtcggggaaagagaaaagggaaaataaaatattacttgaaaaaatctttgtcatcagggaaatgcaaataacacgacattgagctgatcccatcatatagcagtcagaacagccaccatcaagaaaataaatgtcaacaaatggtggtgagaacacagggatagaggagccatagctggtagaaaaatgggctggtatagccacgatggcaatcagaaaatgtttcagctaaacttaaaatagagctgccatgtgacccagctgtacctctcctggcaaacatctgcgggaccctaagtcagtatgtgactcacatggcccagacaacgagccagcctgggtagtcatagatggatgagcagttgaagaaaacacagcccgtccacacagtagagtatcactcaggtgtggtgggcggggagtgaaatgctgacatttacagaagaatcagtgaagccggaaatggacacattaacctaaataagcctgactcagaaaaataagtgtcatggttcctctcatgtgcagaatctagatttaaatataaatattaatatgtgagagtataagaggggttattggtgagagagacatcttgtgggaagaaggaagaaaagaaggtaacagggtagaagagacaactgccacattttctcttacatgtggaatctagacttaagcatgtgtatatatgtttggcctatgtatgtatggtatacaaggaggggagactatttcagggggtggaagggaactgctgggaagggagaggacagaaggagcaaggccaaagatttaagtgtgaaaatatgataaagcccattgtgtcatgcagtaaaacatgaagtggggtgaaaacaaccaaaactcactgcatacatggagaagctgtcaaagagtaatgctccctgtggtaatgttcgattgaaccttatgttgtgcaaaggtgtcgccttcctcattatacacatggaccagtagtgtctctgtataggtgacttgctggcactctgggtattgactatttagattacagcctcgcagccttggtatttttaaaagaaattgaactattggggagactgaccagactcaaatacctgttattgctgggtgaagatttttttcaacgtgcaggaaagaaagacattacttcttttttcaaaagatctctttgcccacatagaggcaggcaatgtactctgcaccaaagctaagatgtaagctaagaagtaaaacttctcctggtctctgatttttgtgtgcttctgagatcggggaaattaggacagctcaagtgtcggcattgaccgcattgttttgacagagtgtttttgacagaactggacacattctttgagtagtatccccacatataaaaactcagatatttaaagaactaactggctcttttgggataactgggctctttgcaaaaaagcaagtgctggaaacagagtgactcagaaaatgtttcctggagggaatttcttgggggaaaattcaatgtcttctatgcattttgcttttgatgggggaaccacagttagtcaacgtcttaaatatgtctctcccccaccccctgcccccgtgtgtatccttattctacagatgacctgagaaaaagagacactccaaggtgcccttggagtgtataatctactcagagtaaggaaggctttttatttttaggcaaaacacagaggacaaaggaatgctgactataatccagaattaaactgtgaggtgtttaattcccaggatgtgggaatggccctgaacgacatatttcctcttgggtgtttcagacttctgtttggatgctgcaggcttagtttgttgggggataacctagaaccagaagagacctgttgaagccgagttaagtgtggtacaggttggaaggatgcccttccttcctttcctctgttatataagccagtactgatgctgacaaagggcaatgtttaacccattgccagtagcagccagtatattcccccaaggactagccctgtagactttcctctcttctcacaggacatacatcccttttcgcaccataaaaggcaacatgactagacagaaaaaggctgtgctttctctgcttgctttttcttagctgaagagacattcttaccctggccattcccatcagctgaatgccctctaggacaagccccatgtgtctgttggaaggaacgagttggggttggggagcaggccaagatatcacctcacccttcacttatctatttttaaataaatttgtgtgtgtttgatacttaacaacaggctgttataggatgccgatagacagtaaaatacttgcaatgggtcatattatcatacagtaaccagaaattaactttttaaaaataagagcagctagcatctagttctttttttttttaaagatttttttattttatttatatgagtacactgtagctgtcttcagacataccagaagaggacattggatcccatgacagatggttgtgagccaccatgtggttgctgggaattgaactcaggacctctggaagaacagtcagtgctcttaaccactgagccatctctccagcaacatctggttcttgaacaatgccctacccagtccaatacattttcattagctgtagatctcacgctgtacatcctacgtatatatctatgttcttttatcagcagcccaattatgtggctccttccaactgccaggaaaggcacagagtctgtcccctgggtaataacattggtagaactgctaatgctagcatttgcctatagagctggtatactctccaacacttgtagtttttgttaggcctgagttcagttggtaatgggtctgctgtgcaagcatgtgtgcctgggatcgattcctcccattcccacagaaatagccagatgtgttgttggcttgtgcttgtaatatctgttcagggagaggtagagtcaggaggcaccagtgagagaccttgtctcaataggacaaagctcctggagagaggttgacattgaggttgacaacggctggcctccacacatatctacccatgtgaacaggagcacacgcacgtacacacattatcttgtcttgttttcagtactgggaatggaatcccttagggtcctgcacatgctaggtaagcactctaccactgagctgcatctctgaccttcttctgcttttctattggaggcagggtcttattagggtccctaggctgaccttgaacttgctttgtagtgctgacaagctttgaacttacgatcctctggcttcagtctcccaaccatgcctagccatagagttcactctatggatgcttttctcagtatagatgctgggtttccagtgtgaactggacaggccccgtatccctgcccctgcccatccctatgctaaaggctttgattagaattaggagnnnnnnnnnnnnnnnnnnnnnnnnnnnnnnnnnnnnnnnnnnnnnnnnnnnnnnnnnnnnnnnnnnnnnnnnnnnnnnnnnnnnnnnnnnnnnnnnnnnnntctttcagccatctttgtgtaccagccttgcaagcagccgtccatactctcctggtaacaggtcctccccatactgtcctctccttagactctcagaatccctgcaccccaggtttttcattgtttgtgtcctgtcttttgggaaattcactgtaagagtttttctttctttcttgaatttctgtggccaggaggtagagccatacaaatgtgggtttctgtgaatcagctgcacttggctttccatgcaaggagagcgtgaggaattggggcttgggagcctctggatcctccctagactagcaagcccaagcacaataacagtcctgctcttctatgttgttagagctaggcccagcagccaggaggcccattgccattcgtggtgagttaccttccagatctgcctgagcccccgacctgccactctgcatctccctgagcatatctacaacttaaacactgcaggtgtcatgtaagaggcatcttggcaaagagagtcaaaaaggaggttttcctggcaagtacagaatattagtactgtaaagagctactaaataaatttgtgttggttcagccctaggggaattgggggtggaggaatgtcgaatgctaaaaacattttataagtcttaagtgtctgcctgacggctcctttattatctatcctaagaaaatctgtggctgtagatgttcgtaaagctcatgtccttttgtatttgtttttatgattgccttttcctactctgagacatgctgtgggggaaacttccccatgttatgatcaagcttaagtcggttccctgtgtacccagtggtaaatgtggtgacacgttgcctgcctgtcagcaatgtcagactctcaggactgaacggagaccaacactggatctgtaggaattcatttctgtttaaaagaaggtgtagaaaccggactcacagaggtgtcattttcatacgttcccatcccgtgcagctgttagaaagaggtcggaaggggcaggaggaagagaaccagggctggtgtgagtgtctattgtcatccactagagaaggagctgtgtgctcatggtgatgcttgtccaggtctcaggttctcgctctcaggagacgttcccatagacggaggctaaaaacaccaggatgagcatgggaccttgtgaataggactgtagatcctggggggcctcagtcatgacattgtatttggttcaggctgcaggacacattgtggagttattgaaagtcagcacccaatgaggttgtgtactgtgggcaccaggcaatgccggtggtaaaagaatgagtgtatgataagaggtttggaattccatgaaccacaaaacttcatgtcctctaaagaaataacagttttcttaatattcctttgcagtcttttcgcagagaggcctttaacatccctgatggtagttgtatttcctttactcctgtactagaaacacaaagctcaatagctcagaagggagagaagaagatgaaggacaggatgtgctgtggcagttacacagagccctgtaagaagcttagaataaaggaaaacacaccttcttgagtgtagggaataggtcttaacccttctctctcattgtcccctgcctctcaggtcctttcttccttcctttgacgcccacatcctaatataattaagagattgttgaaagtgtaattttatatcctgttctcacacttacatcaggctgtaaatattttacacagcccagaagctacgaatgagatgctcatagagctacataaaaatgggaaagttatcatgcacaaaacttaaagacaaattagacagaagtataaggctgtgtaaccatgtatcgctctccacaacatgtaaagaacaataaataaataaacaataaataaaataaaataatcccaaaggttaaacagctcaagttctaaaatgagtaaaatgtggataagcaaggaaactacaagcagcccttaggtacacatttaaacttttctacttgaacatatgtctgagagtattatttagaatactctgcaagtgtttaaatggtgtccttggcaccaccgtttttaagaagcaaagataaataaaataaaaattgaatagttgaaatgcctagagaaaagagacattttccactgtggtttctctgtagaacaggttagctaacccatcctggatcatgaggcagacccagggctgtgtgaatccctcccagacatttgatgatgggaaaaccagaccactttatggtaccacattaaggaagcctgagagggaagagactgcaggaataggacgccatcagcctttccccaggacttttcagcaatagaactatttcataatcacaaacattattttcaaagggcataaaaattccactgtaagtatttctctacattttaagtcttgtaacactttgttactttttcacaaaattatgtaaaaaaaatactacacaataaattagcttgtttccaagcattgtgaagtcaagtctgttggtttggggtgactctgagcaggaacagcgtgcagtgagtttgagagcctagctggagaccaactgagtgcctgtgaatgtagatctgtaaatctgtttgttgttttggattagtttgttcatttgtgtgtgtgtgtgtgtgttttgttgttgttttttgaggctggcctcaaattccagacattcttcctgtaacagcattccaagtgagaggattatcgatgtgtgccaccatcactggtggcatcctaatgtgccctccaaggccctcctcctgctagctctaacctctcactatcagtgatctcagtgtgaaaactcaggcacccccccccccccaataagagtgcattctgtagctctcctagattctcttacttcatgcctctctctagctgagttcatccgctccatcgtagatagtggcaaactctttcctccagctattatccatgtacattcggatgccattaaacatttctactttggggtctaaaacaaacaaacaaacaaacaaacaaacaaacaaacacatttccaaaaacaaattctgtgagtcagaaccttatgccatctctctgcatttaactcttatatttctctggtccaaaagccatttctcatctgtgtacacagggttcgaagcttactcagctctctgtgcctaccaccccaaccgtaaccctcaccatcattacttcctttccttttgacaccccaaactctttcttactgatctcttcaggtttgctccccctaccctgctcccctctcccaacccaagcttgagactaatccaaatatgagattataaaatcaccaatgccatgccccccaagttctgtgtcaggctttgtatagtctctcttctcccttgggcaagaattcaactcttctctggaccctacctcatctggtttctggatctcttagttccttctcgcccagtcccttcccaagacccaaggcacatgagtctttatttgattatatgaagcagctgagcacttccctgatggctggccgtgtgtctctcctcacttggttaataaccttcgcagctcagcagagtccctcgtcccactcctcctctcccacactcctgggtttccagctcacatcacactttgcaattagagccttagctactggttatctgattgtctgcctctcatcagacttggagagagtcaggctctttgcttgttcttgtcgtcagagccccttgcatattgcttggctactggtcagtgctcagagatttgttgagtggctgaaggaaccagcatctgatattggatgagacatgacaggccctcctatctaatacaggatgaaacttaagtttttctcttttgatatttcagtgatgttttaaaaagcactcaccaagttaacacgataatctaactttaattttttttcaaatataaagccagacactcaaaactcagccaaccctaactagctttgttttgaaattaagataataatgcaaaatcatgttcttggcaacgccagctgttaacatctgcatgtcagcctctcctcctcagaagagggcaccagatcgtcctctgaatattgaacagtaagagaatactgctgtgtgtcttcgagcttgggtgacctgaaatccattgaactctttcccagtgcacaagccaaagacagaggtgtgtctgcagaatgttaatggcacattttacactggtgtaaataaaacagcctctttgttatctcaggatattgatctagtctctcagaaggctcataatttcaataagcgaagtcttctcgaggatcattacctgggaggaggccagcaaccccattgcatagaaggaagtgatcctgaggtccagtcctgttcttgcccctagcaatctggcttcaaaaggtagtattgagtataaaattagtcagcatgtataaaacacatagcatttaatttgtgttgttacggacaacacttttattttgattatccacaaaacaccttttcaggaccaagatttctctctctctctctctctctctctctctctctctctctctctctctcacacacacacacacacacacacacacacacagaggcaacaaaaggcagagcgttgatggataattgactatcaactattttaagataactggcccaatgttttttttttttttaattaaatgatcgtcttttggattcagataatagagcacagataagttgcattcctgtgttggatttgtttccaaataatatggaaatagatgggtcagcaggggagtgggaagatgtgtagccaggacaagatgggtctactggtaagtgaggagcctgggcttgtgcaatcaccaatacttctgactgtatttgacaatttcatcaataaatggagacagcacactgtagacagtgaatacaccctgcctgtgactagcctcctggatcctttctaattcactgagcccgttcccatctcactccctttatttcttttggaggaacagctgagtttgttgtactaaagcaggactccactccattctgttttatttcttagggggcagctcagggtggaaacaaaataaatccaatttctgaatcttctttgtcctcaaccacttgggaattctctctgaaactactgtgggcattttaagtaaccctgcttacccagcaagaacaatgtacctttcaggcaagctgagaggataaaataactctgcctctctgcctttgcatgccagacaaaggccttagctattaaataccagtgctcagtgagctaatgactggtgagctggcattgtgtttggcatcttaggatctcagcctctgtcctgtgtgaacttgtaatcttcatcaggtagccgtgttgtgtttggctgttgtgttataggccggcttatgaagcagaggaaaaactccagagccaaaacctggcctctgcagtttgtaatcgcaagtcagagagcataggatggtagcttttacatttggtcctctcatggtttaccctcccctggtgtggatactggccatggtggtttgtttgtctgctttcttatgctcaactcttccttctcgatgggagccagcggagagacaatggctttgcttggccctcctggccctgagattccccttccagatcaatttcctttctctggtttcaaagagaagaatttgaacttgcgtttcaggtttcttattttccctctggactttgtgtcaaggtgtgtgatacacggccgtgtagctggttcacgtcagaacaagggtctcagtgaattctgtggaacatctttccttcttctaaaaataagtcagactctgagttgttcaggaccgccagcattaggcatctgaagtctccgtttctctcttgggtacctgctgtcaagactgaactaaacctggaaaggaataaggtgcaggccttgcaaaagaaaaggaaggtgcatgccagagccttctagaagccagtgtaggggtgctaccatgaaagtctgaactgagtattctaaaggcagagtcaacatgagtgtgcctgctttagggtaccaaggcagacttcctagtggaggcatgagatgtttaagctcaaggcagagctgatagcctgattttatattatgctactaattgaatggtcttggaatcccagtgtgagatttttttttttgagttattagcatatagaaagccactccagccttttttttttttttccaggacacacactgtcctgagaaggcctaaaattagactgaaaaatcaagttcaagctgtgtaacgtgcctctgtggcctcaggcatcgtatgaccagaatgagtcatgtcccctgtgctgctcaggtgtgccgcccaagagctgtcccaagactctgccgtgcagaggagattgccatagagggctggcaaactgatgacctagcacttttctctccttaaacaatcctgctgcccatgacagctgctgagtaatgagcaagaagcctcctacctggggtattagtcacttgcccttttgagcaatcagcgagactggaaagaccgttgcggggctctgtcagcacttgttgctgttgcccaagatcctttctgagacttgggcaggcataacggcttcaccaaagttcagaaacccaataaccttgtttggaaatgtaagagtgttctgagctcaggcccacacaggcccgcactgctgggatgtggcatggtatggataaggccggccctgcaggccagttcctgtagtcttgctgactcctgtactgacaccctctcagatctcttgtcagccagtagatgctttccctagaatttcatcatggatcccacaggagccaggtgacaggtattagaggggcctcctgtgccagaaaccactgtggaccatggccttcttgtgtgacaaaattacatcagccctcactccccatagcccatagtgctcctgggagtccagtatgcagtttttgtgctcatgtctcaggaattgggggaccaggaggaggtggcattcataatcacaacccactaaaaacagtggcttctgtggaaggagattgctaggtggaacaggcttagagacagaggaagctcatctttctaagtggcacaaggtactccgcatacctgggtctcatgcccctgaccttggagacagccgtcaagaacccaggagcagaaggaaggcctgtgccaagaaagttctactacactgcccacaaagcattcttggaaaatgggccttcatttttcatttctgggcaatatccagtaaccactgttgtaagacataacagcttcgttgtaaggtgtaacaacgggttgtgccaactcacagggaacaaaccacaggtggctgtggcagttctgtattctcctccctcctcaaccacaacacgatctgagctggacagaaaccagcctttcccttggtcctcacagcccagtggacttttgtactcagaccaaggatagggaaacagagccatgcattttgactagcgattagcgttatatacttacagacactaccataaggggagcttctaggctcccaaccaagtggcccaaagctagagaagttgctctaattggcagttagctacctatctccagctgttgggaatctccaggtcacccagcatccccacgtaatatgctaccttcttcctatgatggaactgtggtttgcctctgagcacatcattcccttaaaaactgaagtagacatctcctgcatgctctcggctatgcctgggtgggtggagcctgtgatgattgataggactccttcccaccctgagctcatttcagccttccttggtaacagtgtccaggctgtggctagtgattggcagctggatgttagagcccataccagaagttgtgttagaacactattgcctttggcgtgctgataaccgttgtcaatcagcaggtgagatgcagatgagatatgtgtgtctgactatactaaagtggtttttttttttgtttgtttgtttggtttggtttggttttgccaaacaatccacttccttccagtaacttctctaagatgttgggggaggggtggaaagagcctttgtctgagatgcccagtacctagaccttcagtggcatggagtgtactcacacagaccttgttcccactcctgtctcattttcctgacccactggctctgacagaacctgggaggtgtcttcctgctgtgtccccaggtcacctcatctcaggcccttgctgtttgccccttgctgatcgcacttcacaacgcctctgcttactctgcccttcctccaccgacccccaatggctgctcctccactgccacccagttaaggtgccagcctctcccagacattgcagtgcccctcgctgatatccctgttctgcagggaaccttgtgtatcttgctaggctgcggctttcctctgagataggaattaaatatcaaaatccctttgaaagtggtgccatagcttcagagccctgtggtgttttttttcacagctctgttttcctgtgtgggctccactccggcgtatggtctgagaccacttgcacatccatacctccttgcctgccactgggcacctgtttgattcaatccatcctttcctgccaccacaaccttctcacatcctcctcttggccagggatactctgggtccgtgccttccaccacaaagctttccctccctcccgttggaagaaatttattttatgacttgtttctctcacaatactgagttttgaattccgctgtgtccctgatattacagagcaatggacatgctctctctgtccctccctccctcccctactctggtatgtgcattaaggactcagtgctaggcatactagtgaaccaagataagcagattcctgtctgcgtggagctgagggtcgatcacattatccgtgctccggttacagtgtgagttccttgaggagaaccctttgagacacacatgctctaactctgtagcccaggctgcagtgaattcgctgtctcacctagtctggcttccagctcagaaccgttctgccttttccttccgagaatgggcattgcaggtgtgcaccacacctggctatgatccggcaaactctgaatggttgtcacagtccctgacacacagctgccgcttgttcctggagtgctctctgaatgaactctgatgggcagaaatgggtactaacgtggaaaatggagtgttggtaggtggatttcctatgcgtacaaagtacctggaaagcctagaaaactcagtttcccctcgaactgaggacctctttcttctatgtggttagactattcatggagactcatcttctagggtcccttgaagcaagttctgagagctggtgtacactttttgtgttttaatcccaatagcccaaagaagtttgcgctgaaacatttgatttaggaagcccacgtgaccactgtggtctgactgcctatcacatgctgtacctggtttctttcagagacttgaaactggacaatgtgctattggaccacgaaggtcactgtaaactggccgactttggaatgtgcaaggaggggatttgtaatggggtcaccacagccaccttctgcggtacacccgactacattgccccggaggtgagtgtacctgctaggtgtggctagctctgcttagccctgaatggaaatatggccaggggttatcatgtgccatagctccatgggccgcacctacactactacttccaggctcacatacagctcattgaatgaatggcaactgaaaatgtcaagaattggtctaaatcagagtttgagagatagtgtaaatcacacaaattgtgtgattggttcgctcacggctcagtgtcctttaatctctacttggtaatttaattctagcccctgtagcaaatctaaagaaagtagttgtatctcttccctacggatgaataggcctactgtgctctcccctccacatcagatatttccaaggcattgctgtttcaatatatatgtgtccttgtattggcctacgcaaatcacaaatgctgggcacttagcagagaagtcacctagcacacacactgtagagatgaacgaaacacgcatgtcagcaagcgggacttgtgctttggcacctctcacaccgccctctctatatagatccttcaggagatgctgtatggacctgcagtagactggtgggccatgggtgtgttgctttatgagatgctgtgcggacatgcgccctttgaggctgaaaatgaagatgacctttttgaggccatactgaatgatgaagtcgtctaccccacctggctccacgaagatgccacagggatcctcaagtctgtgagtctgacctgcccaacccgcttccgcttccagcctgttacagatgagcttgcctcgtaggcctcctgtgtctttcttaaatgtcttctgttagtatggtgggccaccaccaactaaaatttgtctgaagaatcaagaatttctcctaggctgttttcctcttacaccgttgttatttctgggaatgtctgcagcatcaactggcaaaaagggagtcgttgggaaatgtcaagtatttctagcacttatagattgagtctaagtgagatgagacaccctcatcatgtagtcaggccacatacgggtcaagggagagtcagtcaccgcttgcgatatcagttttgcttctgttgacaatgtccaagagagaggacttcctctcagtgctgaaagaggagagggctcatcaaaacctccctaggccaccatgtcagctttttatgcaagaccaaatgtcaagcttatgtttttggtataactcaataaggtgtcactgtgagaaagtcgtcttctgttgttaatacagtcaagttaccatgttccatgccttactttgaagtaagaaagggcatggatttaatgcccttagattgaaaataaaacagtcggtatggttctgtaaccacattggttgagttcaaaattcacattggtatctactgtatgcagaggagatataaaaatgaatttaaagtatatgctttagtgaaaattaggacatgtcaccctctgttgaataacatctatgaggtgtatgtgaacttctaataggtgagcataatcctcaacttctattcctttcattttctttctttgttttttagggttccacgactttattttctccattactttccgctcatctttaggatactgatcaattacacagttgtgcaagaaattacactccagcatgcaaatgcttaatgaaaagacagaagaatgaggttgtagcttagtattaaataatggatgggaattccccccaggctgcaggattgaacagagcgatgaccgaggaagggatgatgaggaagggacgacaatcagtgtggagaggtggcttactgctgctatgccaggctgaacacatcacctgcttacgctctgcacacaggacacagacgtagattcacagtgagctgcaggaagggacgtcattagtgcgtgaagcaacaacaggagaaggagaaagcaggacctatgctgttaagttcagtctggtcctctggtcttcctcttccatatcagaaaagtcaccactgctcccgttaagcagagctcctggaaccagaccagtagcgattggcacgacagggatgctgggctgaggaggctcccgtctcaggttgaggggctcaggtagccccttgtggcacctgacatgtgtatgtctgctcttcccagaaggcaccattgtagtcacccacttttggaactttccatctcctgaaggcctggtgtccactgaatcctgcgtctggttgctgcaatccctctgcccttttcttttgtgacatagatgccctttatatgggtttggtaaatattatctgccataggaaagtctcgacccctccaagactctccagacttataagcattactatgcagggcctccatactggtcctgaagatatgattgtccttgagaatctgctgcaccacccctagcagacgcctcctagaaagcttctcacttctcacccaatcacatattgtcgatgtgcatcacagctcctgcgtctaggagctcaggagtcagtagtcaccaaaatcgagaaaacactaacgtcacagagaagtaaaaataaaatgctttgaatttctaccaggtgtctccaggccagcttaattttcataacaacaagttgtttaaataattagaaaatttagagtgagggaagaaagaatgtggcttttgtaattttatcagtaaaatgtgagcgagaagagcttatgtctgcaatctatgccatgaagctccttccttccttcctccctccctccctccctctctctctctctctctttcttgcttccttccttccttccttccttcattccttctttccttgttatttagataccttattgtcactcattttcagcttctttttttaaaaatttatttacttattcactttacatcttgctcactgtccccctccttgtcatcccctcccatagttcttctctccttcccctccccttctcctctgagcagatggggtccccctgggtatccccccacctggcattgccatggagttccttaacttcctggatggaaatggacgcacggaggcaggcggcagctaaccttgataacaagctgtggggagacagccttgctttgctctcacagctaagcctgctttgcattgttactttcccaatgccgtgacccagaatccttgtgattcccaaggcattctgggccgggtgacctacagcagccaccatccacatactaatggctttttgtggagtaggtgtcatgtctgattactacagctgctttgacatttttattacttaataaaagaaatacctcagcatttttagtgcaacaaattgctagttcaagctataaagaccactatgctaccaccaaaggcaggagacaaaagtcacatgatcggggagcatctggacacacacacacacacacacacacacacacacacacacacacacacactgagcgaggcagacagtctcatggaattattaagacagtttctccttcagaagaaaaactcagtataagtagactgcaagtgttttcagtaaacagcctttgtcatgcagggacatctccacagactccttctgatagaaaagagaccccagtgatcttgtgaccagcttcagtgcagactgggctgtcccttctccatgcagatccatggcctgcagaagacccgtgcatcccatcactgtcacttcctctctggcttctctctaacaccagctcctcctttggctgtaggaagcaccttagattaaatctattccctccttgggatgtcatctctataggaagaagcaggggaccaggcctgcttccctgctgttcctttgtatgaggtggccttggggaatctctttccctttgtgagtctctgatcccacaagtgtaaaacagagccagtgaaacggagcccacagggttcctgctggggctgaattcagtaccatatggaaaccttccaggcacacagcaagcgtactcctagtcacaccttcaaagaatctgatgtcaaagtaactgcaaaagcacttgaaagttgccagacaaaaattactataaaaaaaaattcaccgggagaatttctggggcaattttgcatattttagtcttcatgcctgaaagtgagaaatgtaaatgctacaattgagaatacttggtgtcttagttagggtgttactgctgtgaacagacaccgtgaccaaggcaactcttataaggacaacttttaattggggctggcttaaaggttcagaggttcagtccattgtcatcaagatgggagcgtggcagcatccaggcagacatgatgcaggaagagctgagagttctacatcttcgtccaaaggaagccaggagcagactgtccttaggcagcaaggaggggcatctcaaagcccaccctaacagtaacatacttcttccaccaaggccacacctcctccaacaaggccatatctcctaatagtgccactccctaggccaagcacatccaaaccaccacactgggctagactttacagagggctgaagtgtttgcatggggaaggtatcaaaaacagaaacaaaaaacaaaaactgtgaagaattaggaaataataatcaggaaggctgggaatggtgtccatacctgtaatcctagcattctagcattctggaggcagaggcaggaggaccactgtaaggtcaaggccaggctgatttatatgagttctaggctagccagggcttcatagagtgatcctgttgagaaataaacacagaagttcagggatgaaaatccttaagagcacgtttctctagatctctggtttgtagaagaatagtgaggctgaccaaggatgtcatgtgttagaaggatgtgagtgcactctagccttagagtcttaggtcctgttctgtttctgtgactggtttcctatcataaccctcaaactatttagagggtcaagaacctctaaatagtcccagctcaaggtatggtcctgcggaccactgacccaccactgtactggcttcattctctaaggtggtctgacaagcaattacaaccctgctctggctggtgccctttctttctcccagcatgagattgctggggaaattcccatttctttgggagtgcattgtttctatagtctgatagtcagattgtgagacagacagacacacacacacacacacacacacacacacacaagtaaatgtaataaattaaaaacatatctgttaaatacacatgcatacccctaacatcttcttccacctcctccctcaacaaatagattattaaaactgatggtagcttacaaagttaacaggagatgtccaacaatactcatttttataaaaacaaaacaaaccaaaccagatagaggctttccagagtgctgctgttgttgaagtttgtccttgcttttgaaacaaatattgtcttccatggtcaccgcgttacttacgcttgctctgatctgtgctaaaatgccaataatcatgatgtatatggaaaaacgcatagtttgcattgaactttgaaggtgtacctgcgatttgcttatttacctccacaaaggaaggctggaggatgtcctcaaggagccccagaacttagaagggaggttgcccagctcagaggtacagagtcagcagctgtgagggatctcctggctgcatgctaactaactccgatgaggtcagcatcttgccgctgagctcacacaggtgttagctaagtgctgaaaggacttagcttctcctgagtcacctcttgccagttctggaagcattatagtcttggcatcggcaggagcttatcaagagcttttgttcccgagctttgtagaaatgacagcgtatgtacacatgtgggtttatctgtcactgaaaatgatcagatttcaccacccgtgctttgtgtgctgaatccctgctggcccctgctacaaagaggagaaccactgtgaattctggtgccctccccagccatgactgaggccctgtctgtggacaggaagctgtctggggcgcagggacagttaccatctccctttcccacgcctctcttgatggaggttggacagctcaagggggtggctaaaaggagatcagccaggagaggagaaggagggaaggtggggctaacagcttacagggactccagtcccaggccaccagggtgagttttcatatactgttaaggggaacagaacatcctaaaaatggctgccccaaaagagaggtggttagcgtgccgacagacaagcccttcttcaggactggagtttctaaaggaggaaatgatctgtctgcagcctctcatggcagcttctggcgggatcttccttcttcttcatagaacgttcatttcctgagaacagggcttcttggattgtatttgcaggaagttgtgtgaacgacttcctgtctccctcttgttgtttccagctggatttttcacaccacaggtctctttaatctccccctccagctctccacctaggaaaataaacctatcaaaggttccggggcgtgagagtgcggactctgggtgactttcctaaaccagcctccccactcagaagcactttctaagatgggaaaatcctgaaggaagcaggaatcgtctcctgtacacattctttgccagctaccagagatctgattttttttttttttttttttttttttttttgcagttgattgttagctgtggtttggataccaaagattttacacacacacacacacacacacacacacacacacacaatcaagggagagtactgacagaaaagcctcctcaaacactgtcttctttacagtagccactcttaaggatgacacccaaacagaaaacgtttgtgtgacttgggatagcagcagcagggagcctcctttttcttgcacacttgaaagataaagaacctaaaagtgagtgggtagggagatggggaggtggctgagaagagttgggggaggagaagaatatgatcaaatatgttgaatgaaaaaaatctaataaaaatataagaaagttacccgggagtggtagagtctgcctcaggggtcaccatgtttgaccctggctcctggagcattggccaacatggatagtacgcgtaagtacaaacacatgacttggggttccacctgagacacctctgacctatatttgtcccaccctacacatggcctgagtgaagttcccaaggtggtctggggttcaggaaaagctgtgtatatgaaacacaggccaggcagagtgctggccaccccgagggatcagcagcgtgcatgcagaggctgctgggttctgatggccatcgcaggctgggggcacagccaacattctgctgcagatcgagcacagttcctgccctgtggtggggacaggaaggacacggggcactgattgtactggattttgataacagaaaaatgaaacagagtgcactgtgcctctggggattgttctccgaaaatcctggtaggccagtcagttgtaaccagccaggcaaggcgttacctcgggggccattccttcagccacaaggttgggaattttgctgtatcagagtacttgctctttctttctctttcttccttccttccttccttccttccttccttccttcctttctttctttctttctttctttcttttttctttctttcttccttccttccttcctctctctccctccctctctctctttatctctatctcctgctctctctctctctctctttctttctttctttcttgataaaataaaggtctcacccaaagagaaaacagcatttgcatagagaaaatagcatttgcagctgaggatatatactcaggttcacagtgccagctcctttcttccagaatgccaatgacaagtgtaggaagaaaggtgaaggttatggactttaatattgacaccaaccataggatgcaagccttgcctcccatccatttctgcttcagacatctccaatgaaagttccgttcccagcaaaagctcttccatcatttaatggcaaagaaggaagggaaggagaggaagaaaagagaaaaggagggggtatctgtctttaagaacttattttgcctttccttatgataagttccctcctccatccccctgagtgtgcttacgtctcccacctaagctgcctgactgggcaacagccttcagcgtttgaaagcatgagcacaaactttttcacttctaacacatcagccttgcgtggcttgcaataaaatcaggtgttcagactcaaagatgcgtcaggttcatagaaaagcagtggctttgctttcctctctcatcgtacctgctcatggtacacacctcagctacttcatcggtagcagtgagagggtgccatgtggacccagagaggttacataccaagtcctgtcaattgccatttgtgatgttcaagggttaggccgtgattcctaccaatccgcacactcctctccaatccggaatccacgggcgacctctggttgcctccagaagaggtgcaacagtgatccagagcaaaggtttccggtgtcacgtgtgcctggttatgaattccccactctaccacttccagaccatatggacagattacacatgggcctcttcctcggttttacaactgtaaaagtgagagttttccttcccattcccaagctcccaaaataatgactttaagactcaagttatatttacaaataccttggtcataagctttggctgttcctcaatgggctcacaaattgatcatcctgttattctattctaagttctgccacgtggctggttaccttcgctcagtcccctgcttctgtccttcaccgtgtaccctgataactcctcccaggcctgactctatcccagaatccttctgcccaccagatgtcccaccttctattctaccctttcctatagaccacaagcttgttgtttgtttgtttttaattgacaagtgatgcagccattcggtatataagagatttcctctacaataatccataagatagggataataactacaggtgttctaggggttatggtgttatgaacttgaagcatttaactcatttccaggtgtagtaaaaatgctagtacgcctgtataaaagtctctgccactctctaagcaatagcaatgcagcaactctgctttcttttctccatgctctcccctcctgcagctgccctttcctaaacaagtatggacacctggcagggctgtccttcaccatatatctgtgaattgctagtcccagtcttgctagtaaaacccgtggaggtccaatgtgagcaagccagagtgactcccttctggctcacccggtattctatagcagcatctgcagccagcgtgaaagtctactctttaagcactggagccggcttccccagagacattctgagagtccattctgtggcctctccatccttctgcctctcatccttctctgtggattgtcatcagcgtcatctcaggcagacatctgcctctgccttgtcctgtgcaaaactaacatcaacaccaggtcaccttagtgtctatcctctctcctgcctcctcgtctgcaaactcgcacacacagcctgttcctctgtgaccacagctctggggtggagagtggtttgggcacaggtcattccacattgtatgtccccatgctgcttcaccaccatgaagggaagtgaaatgacaaagttggcagtcatacttcccaactgggtcagactcttctagggccagaagcagaaggcatgtgcctgtagtgtacacacacagggcacattttgtcagcctctgggtggccttcaggctatgcgaccataatgaggttggccgtcgcagcagagagccagcctctgttttgaatcctgtgttctttctctgtcttccttccctagaactctctctagagccatgagatgccttcgtcccattttggagtggctccctggaatactgataggagagtcttgtggctcgatttccttcctttctggcctggcagcaagagctgccaagtctgtctgccttttgtttaaagtctgaaatgaaatgaaaggagaaggtcattctgtttgcccaacagccagatccaactattaaccagaaggcacagtgttttctgactcctgggagaaaaccttattgtctaattgctccgtttatataactagtcttcttcctaagaagtccggcattttgaaagaggatgaataattcttgacactgcttagatttcaaagtggatcctgttgtctcgggactcgtcatcatacaggggagtttaagctctgtcgtgtagaagagctgcacactcacacctccacatacgtgtatgtattcagcctgctgccagtacccttcctgccctgtgggtgttctctcgggacatgccttatcaaacctggccagcatcatccagtacacctcactatggtgccaccctccctgtggatttgtcgatggcctgggagcctcccagtctcagagccaggtgggcttctggttccttcagctttcctctacatnnnnnnnnnnnnnnnnnnnnggtgggtctgagcccccacctctctccttcctgctctccctctgtagtgagactcacatttgggatgcaaccaggtctcctaggcccctcccttcctctccccagcttgtcaagtgcttttgttggccctatgaaccatctacttccttcagtagatgtgcctgatcagagagtctcccgcagccacatgctttgccttcttggcaagctttcccgttcggaccttcgtcagagaggtcagtggaggtaaggtatattttaagaatgaccttagatgtggactgttcacttgagttaacatttgagtccattagagacatggacaaattgaggacatattctgcaaaaagcattcgggctgtcgcagcagaggaccagggtttccagtgacaactgtttgcaggccaggatagcaacccctccagcctccagctctgcctcctgcagaatgtgtgctgtgacccatggtagacccaggactgatagcatcttcttaactctccagctctgcgtgtttggagagagtagttacataggggctgtgatccactcccccccccccaaagtcttatcccatagtgcgaccccattacctcctccttacagtggttcctgtcttcacagtcagccctctagagcttctggcttctttgtgtctagtttccgtctcctgtccttagattccacacacacacatacatataccttccccccactctctctctctcagagccttattggtatttggtagcccaggttagcctcaaacttgggactgtcctcctgcctaggcctcctgagtgctaggaattattggcacgagtcatcatgcccaggtagaaatttcttcttcctctattccagaagccatgaaagttgacaagtaatgccggccccacatgagacaatagggggtagccatatatataaaatcacccggggatgccatggccacatgggaatcccatgtccatcattgatcaaacccaggccactcctctgaaggagtaaaaacttagtgttgaaggtatcccatatccaaacgtggccttcaggtaattctgcatttaaatgaataagttaaatgaattatttattatttctaaatgataaataattaaaaattattttcttgcctgccttcccagcttccaccctttacccccacatatcactgagagatctgaccccagcctgcaccccatggaaacaggcttagttgtctctgtgtgggtgctttatatctcagatacaaaactgagcatgtcaatcatccagatttggcaagatgttaaaacccttaattaaaccaaacaataaacagaggttctccaaagattcatatgcttagtcaggatctggcatggcagtgatgttatgcatgccaatatgtaaaccatgaacatattgtgggagggtgacactaagggggaattcttgaaggccaaatgaggagcattacataaaccgcaaccccaggctttataatcaatagcaaagatgttaacaaaactagaagcacttgttgggcagacagccttgcagaagtgttttctgtgtaaggctgtgtggcctgtgtgcaaagagatgtgcttctagcagagtcttctgtcacagttcttgtcatcagatgtccatgcatgcctcccctccttcacaatctcccagctttgttaaggtttgacacaagtgactccattttgattctgactttttgcataatcttaaggaatacttgtttttgtatttgttgccctggctactactgttgatgctgccgttcatgctggaagacctgactctggtactcccttgcacagctccatcagacagcctgggaagatgctctgatcttagactctaccagttcacttagccctagacttgtttattctttaaaaccttctggcacttgtttccaactctcccttcctcttcattacagcactgtagtttctgaacttgcctgtcatttcagctgtctcagcctctgaccgtgctccccactcccatctgactgtgctcccttccccaatttcttacttattcatggtactgtggccactcttcctgcctcctcacacacattgggtaggtcaggctcactgtccacacacttgccctgccatcttcatgtggcagctgtcccgactatatgtccttctgttggtaccccaggtgctcatatgtatccgagtgtgtgtactaacgatgggacaggcatgattgtcttcttcctacatggatcctacttcatttcatcaaacgccagctcctccatggcactcactggcctgccccagtgctgtttactcgatcatcctccaggctctcacagtgatttacatgtttctttccagcgcatcctgttgtgtgttgtagtttgcatcaaagacttaccccttgatgcaatggtaatacctttgttatctgcacactccgaagtttagtacactgccttgcattcactagatcctatatagactttgtaagtggaatagaggcttgtcctcttttaacttaattggaattattttttaatagtttttaagtgtcatgtttgcatcatttaatcccttcctttccacctccaaatcctcccatagcccccacattcccactcacatttatgactttttaaaattaatattgttatacacacacacacacacagagtacctatttggtccatttagttctgtctcatgtacatgtgtattgggctagggttagggttagggttagggttagggttagggttaggttagggttagggttagggttagggttgtataagggattctcatccctggagaataatcattttcctccctgtgtagccattgtctgcctatatctctcatctagaggtgaggccttgtgaatttccatcccctttggcatttccggtggtattgttactatgcatgtcttgtttagacaatgcctgtctagaagaaactgtcttgtagaaggcatcctacttgtctgattcttacactctttctgtctcctcttccatgattgtccctgagccttctgtacagggcttgtattgtggatgcattggggttggatactgggcatggttagtcgatctctatattttgaccagttgtggacctttagaatagtctctatcattgcaaaaaagaaacttcttggattataggtgagagttactcttatcagactgggttgtccagatcttgttatgtggaagatgattgtatctaaaaagctcaaacctaggtgttaaaaaacccaggttctggcgctggagagctggctcagcagttaagagtgtgtacccatgttcacagcacctatgtaggctgcccacaaccacctgcaactgtagctccggggtatctgatgcctctgacctccgctggctcctgaactcatgaacactgagccacgcagagataaacacacatgcacataattagagatgaaatatatctttaaaaacattaaatcaagattactcaaaaagtttgaccagaaccccaagaggaagtgtctaccaatcgtgactcatcctggtccagttctagaagtgtgctcttcagaaaagtcgccactgtgatttgtctgttccacctaaggcaatgcttctgccccgtggatgctcggggcaggggcaggggcaggggcaggggcaggggcaggggcaggggcaggggcaggggcaggggcaggggcaggggcaggggcaggggcaggggcaggggcaggggcaggggcaggggcaggggcaggggcaggggcaggggcaggggcaggggcaggggcaggggcaggggcaggggcaggggcaggggcaggggcaggggcaggggcaggggcaggggcaggggcaggggcaggggcaggggcaggggcaggggcaggggcaggggcaggggcaggggcaggggcaggggcaggggcaggggcaggggcaggggcaggggcaggggcaggggcaggggcaggggcaggggcaggggggcaatgagcagcgtcagacaacaatgtttctgccacacaggcatctggagtccggtgctgtccctctttcctacaggaacaagttacaatcacacattcacaagaaatcctctgctcccatccctggcagatctcggagtttcccacaagccatctgggtctctttctatggtcctttttttttttcctcaagttttcttttcttttgtttttgtttttgtttttccaatttcattattagttgttaatgttcttaaaattgcagatccccatccatcagggattgtaccttacaattaataactggagtatgaacagctgtgattggacctgtgtctgtttgaatgcttattttattctgagtcctactctcaaatccagcatgctagagactctacttgtttgtcacttgtagaaaggagaagccattaaatctcttcagagtcttcattcttactggttcccctttgacattttttaaacgttttgtaaagtagatactgtgggattgctgtttgctgaggcatgtcgctgtcttttcctttagcatgacccttctcggatgacccaaccctgaggccttcatagctctggcttcctggcgtgacccaggtgtcactgtcttctgtgtcttcatcagcaacgagattgactttggaaaaaaaaaatatcattaaaagttcacagtaaattcagctccaaacagtttccataaacacagaattactttggttttatgttcacaagtcaaacatggaaaggatatttggtgactgtcaaaagttgtcattagtctctttacggataacttgattttgagtccggaggtgtggctcagaggtagggtactcatctctgtcacacatggccctgagtttcagtttggaagaagcacaaagaaacttaaagtaacttgatttacttataaccacagtaaccttttgccttgttggtttcccatgattctgggatagaattgggctcctctctgtgctaggtaagcactctcccactaaaccatagccacgatgctgttacctggttttattgctttgttttctgagacaaggccttacattacagcccaggctgacttagcattcaccattctcctgcctcagcctccaaaagggatcacagacaggtgataccaccatgcccaacccaaacacatctctttattcacatttagcttttattttttaatggaaaaatcatttgaaattaaaattattatactggccctaaaaagtgaattatcctgagcccttcattgggaaatgatcaaaacatggagtccgcttataaaatgggaagttagcccaaaatgcctaggagctgagcacaagcagtgtcttccaatctacatgaagatggaatatttggaatatttatgagcagcacttgagtattgggattttgttttagctctggcctctgtaagtcacacgttctcactccagaaacagattccaagctgcaagaggggcatcttgatagcagcaaaggttcatctcaaactctcatagcttagccacagaaggacaagcaaccaactttcatttctcctaaagctgggcacagaagtttctagagtgtttcacccctgctgacattttatagagatgtcaacaacaatggctttcactcttctctgtggtttcaggagcaatggggaaccctggccagctgtgcagccgacagaacaatgtcccagctgttcctaaaagcagccctagtcagactctacctgctgtccacagctgccatgccagggaaaggcgcactggttcacaaggagttgcctttctctagagaggaaagaaaaatactgagtatttacagaaaagaaaattggacccttcagccttcttttagtggccatgcctgaaatggcagtggggaaggccaaaaatccactcaggcagtctcgacattaaggcatgattcatactgcccaggatggaaaatccagctagggaagcaagcgcagccaaaaaacctcccaggaggtcctttgccagggctgctgcctgctgtcctgtgagacggctgcatatgaatgaatgaatgaatgaatgaatgaatgaatgacggtctttctctctctctctttcttgcaccgtcatagttcatgaccaagaaccccaccatgcgcttgggcagcctgactcagggaggagagcatgagatcctgagacaccctttctttaaggaaatcgactgggcccagttgaaccatcgccagttagagccgcctttccgacctagaatcgtgagtgccgctgtaaaagattctctccctttttcttcagatgaccaaagtccaaggaaaagctggtgtcgcctatggaatgacagagtcaaggttggctgtcccttgctgcacagagagatgggctggttgtccctgagacaatgtctctccatgtgttgactattgatcacaaagttttcacctctcacttgtgctagctctaccctccctgaaactaaattaaaatttcccagtagctaatacacgtaagctgctttaaatatccctagaagaatttaactaattgatgtcattcttcctagccagttttctcctgttcttggggcacaatttgtgcctctcccaagccctaagatagtagagaagatgctaggtgctccttcactgagcctggcttcttgacatgcacagcttgtcactgctacagtaatagaggactcaggccagacaggcagagcccctttggagaaatgcagaggacaacaacggtagcaatctaagccaccaagcttgagagtggccacctcacagtcttcaagccaagctgtacttataagcatcaagggttccagagaaggcaggctaaaaatagatcaagactattgggaggagacaaagtctgagacaaggtggaggagaaacgtccttgaatcagataagaggagtgggatctctcacaatggttgaaaagaaagaaacagacctccttagtatgcttataaagatttcatttacccagttctttcaaacagagtgagcttagtctgtgccagcctattaaactttggatgtccagcagccagagggatcccaccagctccagcccagtggggtgtattgtttctgaccagtaacaggttatacacttttgctctaagcctggcagcaccgtcgtaaaacaacccgagaacctcttctcacatgtgcaaaatgtgtgcaaacactaagtgggctgagaatgagtttattcaacctctggccagatgttgagtgggcgtgcccctcagcaaggcctgctgggaaaccacacctcagtgaaatggaggctaatgggcaagagggtaataagcaagtctgggtggccatgttaactctttagccttacagttcaaggctgttccacttccagggcacagtgactagagggcagggcatgggatgagtaacttggcagttggcaaaggccatagtaatacacgtggtggagtggccatgaagcatcgcttaatcatggatatcagagtcagaaatactgcccctgaccaaggatgcaggccagatctccaaactcttgagaatgggctgagtcccatgcaagagagcaaagccccaagcacatgcaagctgaccacagtttccatttttctttaacagaaatcccgagaagatgtcagcaattttgacccagactttataaaagaagagcccgtcttaactccgattgatgagggacatcttcctatgattaaccaggatgagtttagaaacttttcctatgtgtcaccggaattgcaactgtagccttatggggagtcagaaccaaaggggaaggtggatttctccaggaatttcttctgtgggaattccctagcatccgccttagaacaccagcttcaccttcatggagcaaaatgttcacaactctgcaaagggcggagcctcaagagagctgctctctcaagtccccaggagccatggtacatttcagtaatcgatactgagataagatgttacaaagatgtgcactgctcaacccatgagtctccagggctctttcaggcttggaggaaaggacagaagccaaaggaagagatgctgggaaggatacaggagatcctagggattataagccaaacaggcttccttttttttttaacttcaagagacaaatctactttcttgtggagcactctacactcttctttaagccaatatttcagtctacaaaagattaaatgctgatgaagaagtctctctagggaaaagaacggcattctaagtagaaggatgcgctttgaagaaactgcagatgggcgtccttcaagctcccaacctaaacccagtgttgagagctgaggttggacaccacgacaaccgtcagtgtcttgagtctcttcctcttcctttcagtaactagatatttattgagtgtcaaataaaaaggtgccataatcttcagtagcgtacacagtagagtcatgacgcttttacacatcctggggtccacccaatggtgttcacgttttgggaaagtcctctccacattgcataggtctgtcttctttgtctcctgttcatagaagggccaccaccacagttgtgcggtcagcaggcaggcttctgttgcatgccacccgaggactggtggaagcgaatcacccgcacatacttcatctcgggctgactcgttggtgaagaactctgcactgttcccatccatgaacacgtgtgtggcggatcctccagtcagtctatttaagttatgttttcagagacaaagaaggttgtttgatatacacattaataattaacaatgggccttgcaaacaaggctgacgacaaaggtgtaccttttcgtgtgtaaccatatatacagttgaaaagttttatctggctgaaaataaaggcatttttgtagcaaaaggaaattttgtgagaagagtgatttgtcctctccctgactcagaggataggtttctaatcaaagtaaaaagcttttcacagttattagaactcaggactgtaggcaaactcctgagagaaggtactggcagaacattttgtatccctgaggagggtgtggtcagtctcattcattcatgtctgctctgaatcagtgcagtgacttctgggtattgctgtagcaggctgatcctgggaatcttagtagctcttcaaaacatccacttatccttcacatacagtacatgcccatggccctctctatcttctacctgtgccatcaagaaagtagaattcctaaggtccacagagcaagaagaaaagatggaggaggtcctcgtttgcttcttaaccacctcctcagaggaacatttgcaacctctcttgccatttgattggccagattggggcatccctaaagataccagtggcctagaggaattaggagatagctgagcagtaccacagtctccatcatcagttcttttgggcattccagggtgaaaacgatatttctgcattaataggaaagctatcggccttcctgaagatttgtctggcacaggtcagtagcttgtgatgccatgtctgggtagcaggcaggagtaaatacagtacatcttacatcctgcaagaacttgaggttattggtttgcaaaagtcttgatcttgttaaggggtggacctagatatacagcctgaagctttacattctaaccctgcagtctgctgggaaagattggaactctttctgacttggggattcttgatcattatgcttgttttaaaatcagtcgtacaaatttcaagcatatttacttattcaatgctcctatgaattgtgtactcccattttcattatacagatggagaaactggggcgcggagtgttttttttttttttttaaatagcttgtccacacaagtcacacaacaaaagcattagggccaagataggacccaagccattttatttccagaatccttgcttttagcccaaatgcataaggctttccatttaaaatcaatcccatttccctaacctttgtggggttctgagagcagttaaaagggtgtagtctggggttcacaggagcaggaaataagctgccagtctgcaggaaggccttagtcatcctcagccctgtcatccttgcccctgtgcagaactgtagatctgatggggagatggctcaatctgcaatcaagggcggtgcttctcgcctgattcagagaactggggcagacccaggtgacgcaatagtgacttcagtttcctcattgtccagaaaaggagagaaagaggaaatagtctgggtcacactgggtcccataaactccactcgaatcccctgggctaacctctgagccttaggagtttacaatcctctcctcctcccggaggtctgtctgtcttttggtaactccaagcctccttctcactgactggggctggagcaaaagccacagctgcagcgagaagcaggtaggtgtgtacagccaccaggcagctggtggtggcagctgcacatttatagccacaaatcccgtgtgacttgcctgcaaggagaagagcaggaaacactgtgtctgccacgtgttggttttcattgggtgtgcagtgacttcaatattccaggcacacatttatccttcaccatttcccaaggcagcagccaagacctttccccttatttagtcttggctatccggattgcttcatctggcagtgttgacttacagcaaacagaggccgtgatgccctggctttgtgggcacactgggtcatataattcttcctttcatatcatctgaagataagagtctgatccaagtcagacatttcaggaaatgagcctgctcgtcacaggttctcctggaaatgagccctgtggtcacaggttcctctgggctgggttgcaggttggcgggaacaaaccagagcacagctgtgaacagaactccgttgtcttcctttctccctgtattggattcaaaccaaagctgagggtgcccctgggcttcatcctatatccatcccacccctagtcctggtcagttgtctttctcttctcctgtctccccctatcttctcccccacacttggctttcagagccagttttccaatcaaaaatgacttaaaatcatttgtgtgcttattctgaaggttcctctggagctcataaaagtcagccacctttcccatgtatgtctgcctctgttatcgccctatgggctcctgccccaacatagactatctaagagagccacttctctcagccgtgtgaggtaagaggcccccaagttgagagagcatgcttagtggggtacacacatatggggtgagcccacactcacccagtgttcttaagcagaggaaattgttcctcagttttagtgttcttgtcagtgaagtacaaatgacacaaatgacagtggctgcctgccttgtgttactgcctcaggggcagatggaaagcatctagttagtacaaggacactggatgtgctctgtgttagctattgttactaccagctgcactgtggagcttggaatgtccatcagacagtgggcaggacagacccccacatacttcatgcccatctcatacagatgttgagccagcaccaacttaagaggattcaactcttctgcttggccccagagcctcctcagttgactaaaccttctggggagttttgagtcaagcccagatgccaaatatggatgagttttaagtgtaaaatacagctcaatctaaaacaaccaggccaagaattgcccatggtcttcctaattggcttttctctccaacatgataggaattctgtcgtccttttaggtttagctacaagattcatttagttcacttctgaccaattagcatgagggccacacccatcctgggcactgactgggcacatgcagcatgctgtgccaccagaagccaagatacccaagatattcagtaactcctgccatgtccaaggacctgaagccatggcagagcctctaccctcttctctttaaagcaagctctctggagatgtattgtggtaaaaagagcctccacaggcctgtagattcttctgaaaagacagccctagatgtcccctgccacatgtcatagctcttccagatccccacagttgcctgtcttatgccaccaaggcggttattacctgacagaggcttcattcttccagtggcttgagccgcagctagaagaatttgggtgagacaaagggaaggttgtgttaggaccaagtgtggacgtgttcaagtgggttgccagaagtgagaatctttatagagacatttcaaatttagaaaccagggacagtctagcagtcatttgaccggacagtgccaaaaataccctgaatgagctctcaaggttttccagccttgtgctctgctggctaagaataagtgggtggctgtgctcaatgggcctctctacccttactgataacgtccctgtcatccattgaaatcccagtcagatttgctctttgtccacctctgggcaatctttatgccttatctcatctccacatgcaccctgtgctctctcggtctcaagattcttttttagacacactcagatcactcattcccatagccatgtactcaccagcaccccttatccagctgcctttcctatttctcatgcttacccatgcgcaaaagggaagaaggaatggcaggctccctcagtagcagatgcaagcagagctgttgccagaagagaaaggactccagggtgcttgcccttcctctatggctgcagttctcaacttgtgggtcacaacctctttcggggggggggggtgtcaaacagccttttgacagaggtcacatataagatatcctgaagattagatgtttacattacaattcataacagtagcaaaattacaattatgaagttgcaacaaaaataacttcatgattggaggtcaccataacttgaagaactgtggtaaaggttgcagcattaggaaggttgagactcattgctctaagagaaggctcttgacagtgaagaaggtaaggtactcgctgatacgatgaactgtagcccggagacagggtgctaggaggcattcggatgaatgttggtaagaatttgtgagatgagaattatttcggcaatgttagttactgaaacactggaaggatgttgatcagtgggagaaaggctaacaaggcttccaaaagttacatttatgtattttgtcattgtggtgggggggtaggtatgatgcattccatggtgcaagtgtggcagtcatgggatgggtcggggaggttggttctctccttccaccatgtgggtttggaggcttagactcaggccatcaggcctggcaccagacacctgaacccactgggacatgtcactgaccctagctcatttctcctttctttgatgattcctggactggttgatcaaggataggtggtatactttctctagttgaattctaataacttaagtaaccaggtctcaactcatttccttgtggcaaatgtgggttaaaggagcaacggtacgcagggtgtgtcagggtgtgtcagttaacaggtaaagatcagtccgagacggtgatccttcaggcccaagacaaccctgctctccttggattaagacaattttttaattttatttttaattaagtatttatttcatttacatttccaatgctatcccaaaagttccccacacgctcccccacccactgcccccacccacccactcctacttcttggccttggcgttcccctgtactgaggcagataaagtttgcacgaccaatgggcctctctttctactgatggccgactaggccatcttctgatacatatgcagctagagtcacaagctctggggggtactgattagttcataatgttgttccacctatagggttgcagatccctttagctccttggatactttctctagctcttccattgggggccctgtgatccatccaatagctgactgtgagcatccacttctgtgtttgctaggccccggcatagtctcacaagagacagctatatctgggtcctttcagcaaaatcttgctagtgtatgcaatggtgtcagcatttggaagctgattatgggatggatccctggatatcgcagtctctagatggtccatcctttcgtttcagctccaaactgtgtctctgtaactccttccatgggtgttttgttcccacttctaagaaggggcaaagtgtccacactttggtcttcattcttcttgagtttcatgtgtttagcaaattgtatcttatatcttgggtattctaagtttctgggctaatattcacttatcagtgagtacatattgtgtgagttcttttgtgattgggttacctcactcaggatgatgccctgcaggtccttccatttgcctaggaatttcataaattcattctttttaatagctgagtagtannnnnnnnnnnnnnnnnnnncaatagctgactgtgagcatccacttctggtgtttgctaggccccggcatagtctcacaagagacagctaatatctgggtcctttcagcaaaatcttgctagtgtatgcaatggtgtcagcatttggaagctgattatgggatggatccctggatatcgcagtctctagatggtccatcctttcgtttcagctccaaactgtgtctctgtaactccttccatgggtgttttgttcccacttctaagaaggggcaaagtgtccacactttggtcttcattcttcttgagtttcatgtgtttagcaaattgtatcttatatcttgggtattctaagtttctgggctaatattcacttatcagtgagtacatattgtgtgagttcttttgtgattgggttacctcactcaggatgatgccctgcaggtccttccatttgcctaggaatttcataaattcattctttttaatagctgagtagtactccttcctttaatcttacttgtgacttcaagccttcagtatcataactgttagattacaattttctccattctctctctctctctctctctctctctctctctctctttctctctctctctctctctgtcccccaacacagagttaatgccaagaaaacatgttgaactatggtttgcatcctttcccctttcagacaagtttaccgtccaggccctagcagcctgtctgtcactccctcgggaaacctctaagaataagaaacccactttgtcgcagggatttgaaaccctttaccttcaggatgcctgccatgctacattctctccttcaggatgcctgccatgctacactctccttcaggatgcctgccatgctacactctccttcaggatgcctgccatgctacactctctccttcaggattcccatggtgtggaggctcctcttggggatttgaaaaggatgcactctcttatcattgaaggcctgagaatgctgcctgtggcatgatgccctgtgtcttttcatgcttgcccatgtcagtgtcatgtggctctttattctagtaaagcacctcgggagagcaagctcttgccacccccttcccagacacttgccgctttaagttataacaataactaaaaacaaaaaggaagtggcataataaagtactactttgtctccaaactatacatattcttccaggagattctgatacaagagccagtgagcctagagagtcatgcactaaacatattttttaagcttttatgttctttttatttatgggcatgggtctgcatgtatttatgtgcatatgtgtgcagctgtctacagaggccagaagagagcaatgcctttcccaggagctggagttacctgtgagccacccatatggatgatgggaactgagcagtgttctgtaagagcggcaagtgctgttcaccaccaagtcacaccttcagcctccaacttagattctttacccaaaccgannnnnnnnnnnnnnnnnnnncagctcccaaactgtgtctctgtaactcccttcccatgggtgttttgttcccacttctaagaaggggcaaagtgtccacactttggtcttcattcttcttgagtttcatgtgtttagcaaattgtatcttatatcttgggtattctaagtttctgggctaatattcacttatcagtgagtacatattgtgtgagttcttttgtgattgggttacctcactcaggatgatgccctgcaggtccttccatttgcctaggaatttcataaattcattctttttaatagctgagtagtactccttcctttaatcttacttgtgacttcaagccttcagtatcataactgttagattacaattttctccattctctctctctctctctctctctctctctctctctctctctctctctttctctctctctctctctctctctgtcccccaacacagagttaatgccaagaaaacatgttgaactatggtttgcatcctttcccctttcagacaagtttaccgtccaggccctagcagcctgtctgtcactccctcgggaaacctctaagaataagaaacccactttgctatcctaggttttttgttattccagacaaatttgcaaattgctccttccaattcgttgaagaattgagttggaattttgatggggattgcattgaatctgtagattgcttttggcaagatagccatttttacaatgttgatcctgccaatccatgagcatgggagatctttccatcttctgagatcttctttaatttctttcttcagagatttgaagtttttatcatacagatctttcacctccttagttagagtcacgccaagatattttatattatttgtgactattgagaagggtgttgtttccctaatttctttctcagcctgtttattctttgtatagagaaaggccattgacttgtttgagtttattttatatccagctacttcaccgaagctgtttatcaggtttaggagttctctggtagaatttttagggtcacttatatatactatcatatcatctgcaaaaagtgatattttgacttcctccttttccaatttgtatcccccttgatcctccttttgttgttgaatnnnnnnnnnnnnnnnnnnnntcaggatgcctgccatgctacactctccttcaggatgcctgccatgctacactctccttcaggatgcctgccatgctacactctctccttcaggattcccatggtgtggaggctcctcttggggatttgaaaaggatgcactctcttatcattgaaggcctgagaatgctgcctgtggcatgatgccctgtgtcttttcatgcttgcccatgtcagtgtcatgtggctctttattctagtaaagcacctcgggagagcaagctcttgccacccccttcccagacacttgccgctttaagttataacaataactaaaaacaaaaaggaagtggcataataaagtactactttgtctccaaactatacatattcttccaggagattctgatacaagagccagtgagcctagagagtcatgcactaaacatattttttaagcttttatgttctttttatttatgggcatgggtctgcatgtatttatgtgcatatgtgtgcagctgtctacagaggccagaagagagcaatgcctttcccaggagctggagttacctgtgagccacccatatggatgatgggaactgagcagtgttctgtaagagcggcaagtgctgttcaccaccaagtcacaccttcagcctccaacttagattctttacccaaaccgactcgacagcaaggcagcttcgtttacattactgcttccatcttgtcctaacttaattagctttttcagatacaaatgcagattatagtctacactgg

SEQ ID NO: 340 - DNA, 2176 bp, Mus musculus
tccgggttccccagtgccagccagcgcggccccctcggggctccggcagcagcgccggcatgtcgtccggcacgatgaagttcaatggctatctgagggtccgcatcggagaggctgtagggctgcagcccacccgctggtccctgcggcactcgctcttcaaaaagggccaccagctgctggacccctacctgacggtgagcgtagaccaggtacgcgtgggccagaccagcacaaagcagaagaccaacaaacccacctacaacgaggagttctgcgccaatgtcaccgacggcggccacctggagctagccgtcttccacgagacgcccctgggttatgaccactttgtggccaactgcacgctgcagttccaggagctgttgcgcacggctggtacctcggacaccttcgagggctgggtggatctggagcctgaggggaaagtgtttgtggtaataaccctaacagggagtttcactgaagccactctccagagagaccgcatcttcaagcattttaccaggaagcgccaaagggctatgcgaagacgagtccatcaagtgaacggacataagttcatggccacgtacctgaggcagcccacctactgctctcattgccgagagttcatctggggagtatttgggaaacagggttatcaatgccaagtgtgcacctgcgtcgtccataaacgctgccatcatctaattgttacagcctgcacttgccaaaacaatattaacaaagtggatgccaagattgcagaacagcggtttggcatcaacatcccacacaagttcaacgttcacaattacaaggtgcccacgttctgtgaccactgtggctccctgctctgggggataatgcgacaaggacttcagtgtaaaatatgtaagatgaatgtacatattcggtgtcaggcgaacgtggccccaaactgcggggtgaatgccgtggagcttgccaagaccctggcagggatgggtctccaacccggaaatatttctccaacctcgaaactcatttccaggtcgacactaagacggcagggaaaggagggctccaaagaaggaaatgggatcggtgttaactcttccagcagattcggcatcgacaactttgagttcatccgggtgttggggaaggggagcttcgggaaggtgatgcttgccaggataaaggagacaggagaactgtacgccgtgaaggtgctgaagaaggacgtgattctgcaggatgatgatgtagagtgcaccatgactgagaagaggatcctgtccttggcccgcaaccaccccttcctcacccagctcttctgctgctttcagactccagaccgtctgttctttgtcatggagtttgtgaacggaggcgacctgatgttccacatccaaaagtcccgtcgtttcgatgaagcccgtgctcgtttctacgccgcggagatcatttctgcactcatgttcctacatgagaaaggtatcatctatagagacttgaaactggacaatgtgctattggaccacgaaggtcactgtaaactggccgactttggaatgtgcaaggaggggatttgtaatggggtcaccacagccaccttctgcggtacacccgactacattgccccggagatccttcaggagatgctgtatggacctgcagtagactggtgggccatgggtgtgttgctttatgagatgctgtgcggacatgcgccctttgaggctgaaaatgaagatgacctttttgaggccatactgaatgatgaagtcgtctaccccacctggctccacgaagatgccacagggatcctcaagtctttcatgaccaagaaccccaccatgcgcttgggcagcctgactcagggaggagagcatgagatcctgagacaccctttctttaaggaaatcgactgggcccagttgaaccatcgccagttagagccgcctttccgacctagaatcaaatcccgagaagatgtcagcaattttgacccagactttataaaagaagagcccgtcttaactccgattgatgagggacatcttcctatgattaaccaggatgagtttagaaacttttcctatgtgtcaccggaattgcaactgtagccttatggggagtcagaaccaaaggggaaggtggatttctccaggaatttcttctgtgggaattc

SEQ ID NO: 341 - protein, 702 aa, Mus musculus
RVPQCQPARPPRGSGSSAGMSSGTMKFNGYLRVRIGEAVGLQPTRWSLRHSLFKKGHQLLDPYLTVSVDQVRVGQTSTKQKTNKPTYNEEFCANVTDGGHLELAVFHETPLGYDHFVANCTLQFQELLRTAGTSDTFEGWVDLEPEGKVFVVITLTGSFTEATLQRDRIFKHFTRKRQRAMRRRVHQVNGHKFMATYLRQPTYCSHCREFIWGVFGKQGYQCQVCTCVVHKRCHHLIVTACTCQNNINKVDAKIAEQRFGINIPHKFNVHNYKVPTFCDHCGSLLWGIMRQGLQCKICKMNVHIRCQANVAPNCGVNAVELAKTLAGMGLQPGNISPTSKLISRSTLRRQGKEGSKEGNGIGVNSSSRFGIDNFEFIRVLGKGSFGKVMLARIKETGELYAVKVLKKDVILQDDDVECTMTEKRILSLARNHPFLTQLFCCFQTPDRLFFVMEFVNGGDLMFHIQKSRRFDEARARFYAAEIISALMFLHEKGIIYRDLKLDNVLLDHEGHCKLADFGMCKEGICNGVTTATFCGTPDYIAPEILQEMLYGPAVDWWAMGVLLYEMLCGHAPFEAENEDDLFEAILNDEVVYPTWLHEDATGILKSFMTKNPTMRLGSLTQGGEHEILRHPFFKEIDWAQLNHRQLEPPFRPRIKSREDVSNFDPDFIKEEPVLTPIDEGHLPMINQDEFRNFSYVSPELQL

SEQ ID NO: 342 - DNA, 248999 bp, Homo sapiens
acaagaactcactcactatcatgagaacaatgtgagagaaactgcccctatgatccagggtggttgacatgtggggattagaggtcccttgacatgtggggattacaggtccctccctcgacatgtagggattataattcaagatgagatttgagtggggacacagagtcaagccatatcaactacatagtgggattttattaaattagtactgaaaagaagcagtaccttaatttacctactttacttgtccagcgttttgaataaacatttgctaaatttctgtgttcaaaacaaatgattcttgtgcttcagcttcctaagcagctgggattacaggcatgtgccaccatgcctggctcatttttgtatttttaatagagatggagtttcgccatgttggccaggctggccaacatattttacaccaaatagggtcatgatgaattacagtttgatagcctgcttttttcactaacaatatattgagaaagtctacaatggctactctagtaaatagctatggctacatcctggtaaaatagtcaatttaaagtgaagctctccatattggtccattttcatactgctatgaagaaatacccgagaatgggtaattttttttaaaaagaggtttaatggaatctcagttccacatggctggggaggcctctcaatcatggcagaaggtgaaggaggagcaaaggcacgtcttacattatagcaggcaagagagtgtgtacagtggaactgccctttataaaaccatcagatctcatgagattattcaccatcacaagaacagcatgggaaaaccttcccccatgattcgattacctcccactggctccctccacaacatgtggggattatgggagctacaattcaagacgcgatctgggtggcacacagccaaaccatatcactctccccccgcctcccacagctatgaaaaacataactaagaaggcctgagtgacctccttaacattaagatcatttgaattgataataaacattttgtgtattaaattttatcactataaaaactattcagttcaaaggctaaaagagtgtgtagaggttttcataagtgacctaaaggcaattccaaaggattttgaaaaatccaagtatgatgcccaaggacaagaatgaaattactgactggatggtcactgagtataccagagaatgccatcaagacctagagaaaacccagtaaagggtaaagagaatgatgctattaccgcaaaatagtcattttcctttcacaggcttcttacacaagccatacagtttaataatttggttatgacttgtagttaataactacttggcttgttaatggacaagaaccaaatgagaaaagttaatggaacaacctgaccattagctatattaataatagctttagagaaaatgattactattttaaaccatattcacatgcttctatcactaatccttttttaaaatgtcaaaaatattaagttctgcattcagaattaaagaattttaaaccattttattttgagacagggtcttgctctgttgcccaggctggaatacagtagtgtaatcatggtcggtgatcagcctcaacctcctagactcaaccactctgtattagtctgttctcatgctgttgataaagacatacccgagactgggcaatttacaaaaaaaagaaggtttaattggactcatagttccatgtggctggggggtgcctcacaatcatggtggaaggcaaggagaagcaagtcacatcttacatggatggcagcaggtgaagagagcttgtgtagggaaactcccccttatataaacgtcagatcccatgagacccactcactgtcatgagaacagcatgggaaagacctgttcccatgattcagccacctcccactgggtccctcctacaacacgtgggaattcaagatgagatttgggtggggacacagccaaaccacatcacgatccttctgttttagcctcctgagtagctgggaccataggcatgtgccaccatgcccagctaatttttaaaatttcttatagagacaggttctcgccatttgcccaggcttacattattttagtttgaaaagatatttttgcctcatttggtgacatgctagttttacgtgttagaagtggatacaaagaaatgtttgcagtgactaaatgcagttagatttggctcccctaaataatttatctcttcttttttattgtgtatgaagtcttttttttgtgtatgaagttttttttattgtgtatgaatctaaaaaactataattgggctgtcataaatctgtttcttaatagaatggcagcaaggttttccagggttcacactattgctagaaaggcacttagataatataaaggatttcaaaggaaaatattctaatatggatagattcaagtaggtgagatgtcaaaaaataaattagccatagaagagatttgtatttgttttgtttacatacataaaatatttaacctcactcgattttcctgttagaaaacagtggcagaaatgttttatgaagtcgttgctcttgatcaccaggctgtctgggcagttgtcagtacaaagtgttactaacttgactgctttttatgggaggattatttttatttgtgcttttctgttctgatctcaatccctggaatctgtcttacttaagtggacttttgaggcaaatagtcatcgaaggctcttcttttggggaaacctgaggaagggcgagaagctctccctgtctcctggatctgcttgccctcttaggacccttcccctttgggtttccttccctttattctctctctcatcatgagctgtgcatccactgacaccctaacagactggccgtcaggaccctttggctagctgaagtcctcactctctgatctcagccccccatgccaccccgccctgactttgtctctgtttcttcctccaagtcattgaagatctttcctttatccatcatgaagtctggaaacttcccaatgatatttctagttgtgggtcgttctttactcgttctgcccaatatgctgcatcattttcaatatgagaccagtgtttttctttcattctgagaaatattactatatctttgaaatatcttacattttctgttctttttgtcccatgaggaggacagtatggccccacttatttagatgtatctttgcatactcagaaatggatatagacaggcacttctaggacccctgccctgcaaaccactctctcctgcttgctgagagtctcagtcttcccctttgtactcagtgtgtagtagcggtagttttcaatcctactatccgttagaatcatgctgggatggagcttaggcatttatttttccaaaaattcgtcaaatctcagctctaccatgtattagctatgtgatccaattcacttaacgcttcaactctcggtttccttatttgtgaaatagagataataacatttcatttggttgtcatgaggatcaaatgaataatgtttgtcaagtgctttgttggctggtggatgctcaggaaattataatacagaagccaaggtaacagctgaagtgtaccatgtgcctggcaaggtatcaaatgccttatgttaattattttatctccagagtcctttaaaataagtacatttatttgtacaatgctctgaaaattgttttaatttacccgtgttgcattgttttctttatccttttgtatacatattttttgtacttcttagcatatttatatttcttactctagttttcaaatgttatttactggattttttttttttttttgagacggagtcgctctgtcacccaggctggagtgcaatggcgtgatcttggctcactgcagctcttgcctcctgggttccagctactttcctgcctcagcctcctgggtagctgggattacagggacataccaccacgcccagctaatttttgaatttttagtagagatggggtttcatcatgttggtcaggctggtctcgaactcctgacctcaggtgatccacctgcctcggcctcccaaactgctgggattacaggtgtgagccactgcgcccagcctctttactgtttttttctatgttgtttatcatatataattttagtaattacataatattccattaagttgctattctataatatactcagccattccaatatggctgaactggttctttaggcatagaactcattttactttgaaacttctgatgtacactgtcaaactgcccctcaaagcctgtgccattttatagtaacacggggtcacatttgacctggctgtgttattctctaaattctctaattctattaaatggaatgggagttgtgtgaaatgttccttaagaaattagaaaaatgacagtgattcaatcaagcaaccaatcaatttaaaaagcattttgataatgtactaggaattatatacagagaagtctaaagttatagtgtgactaagacaagaaacagtaatagtgatcatggaataaaaccctctagtctataaaaggacctataatacagatatatctatattgcaatagttgctatattgtatcacatacaatccattagtgatcagcgtgggatgtgtagagaaagggaaccccttgctcccctgctttcagggtcagggccagctctggataaaagttgttacataggagaagttggtattggcagacaattccttcttacggagaccttgtactgtgtgctgctccctacctgaccttatgtcacataacataggctggagacaattagagttttcctggagattaattttgagatgctgatagcaaagatcctcattctgctggggctgttaagctgggaatgtaggaagttggggctgttgatgaccatcttccctggctgtatttagggagccagttgcaggaagagaaaatgaggaacagggagaggggagcaaaaccaacaggtgatgagagggggaaggaaggagacaaaaagtgcttgagccagatggtgagagggtagcttgacaattaccacggtagcctgtattttgcctgtagccttttggggtttaaatacttcacgtcaaacgtgtgacttcaatcaggcaattttgggcggcaggctgagagccacaacataggtgtttctttttaactaaggcccatgcttttgccatgtcttgggtgtcattccctcctgcagtctcagaacgctatgatctctctcctcggtgttgcttacccattctaaacaagcccttcttctagtgattccatcttcttcctcagctctcactctccttcccatcccagccaaacttcttgaaagggtgcctacattcactctctcacacacttttcacctcaacctaccctaacaggcttccactcacaactccctactgaaactgttgaaagattactaaggacctgtccatgccaactccacatgccattctttttaaatttatttttatattttgtagagacagggtctcactttgttgcccaggctggtcttgaactcctgggctcaagtgatcctcttgcctcagcctcccaaagtgctgggactacaggcgtgagccatggtgccaagcccatgtggcgttctttagtccttgcctactacatctcttgacatcatttgacctagcagacaattcctccctgcttgaaaactttttggttggtttccataatacctggacaccacatcttcctggctactgcttttctcttacctccctggctactgcttgtcatcccacttgcctgcttctcctccacctataaatgttggagttgctggagggctctgtcctgggtccttctctcaagttgcattctcttcctatcttcccataaagagtctgatccactattctagcttcaattactatctgtataccaatggctcccaaatttgtctttagctaagagactgcccctccgagtgtcacaaccacatagccaattccccacttcagatttctgcttaaatgtatcaagatatatcaaacttgataagttttgaattgagctcttcatcctcccctcccacccccaactctttatccctgccccaatctcctcttgccatgtttctttctttttttgagacaggatctcactctgtcacccaggctggagtgcagtagcatgatcataggtcactacagtctcaacctcccaggctcaagtgatcctcctgcctcagcatccgagtagctgagactacaggaacctgccaccacgcctggctaatttttatatttttttgtagaaacgagtcctcactttgttgcccaggctgctctctaggctcaagtgatcctcctaccttggcttcccctgtgaacacaggcacgtgccctggctagttttaaaaagtttttttttttttttttttgtagagatgagagtctccctatgtcgcgcagggtggtctcaaactcctgggcttaagccatccccccaccttgtcctcccaaagtgctgggattacaggcatgagccaccacaccttgtctcatgccgtttcttaactccctaatagctccctagtccacacagttggctcaagccagattctgcaagtcatccttgataccgtcctcttcctcattcccttcaatctgtcatcaagacttgtcagttctacttctgaaacacttcttgaattcatctatttatcttcatctccatcactaccacctgagtcctggccaccatcttctcacctctggactttggcaacagcttcataaactggtctccccacactcgtgctgcttcttccaatccacccccgagagagatattttattttactaaaaaaataaaatgggactacaggcacatgccaccacatccagctaatttttttagtttttattttttgtagagacagtcttgccatgttgccaaggctggtcttgaactcctgggctcaagcagtactcctgcctcagcctcccaaagtgttgggtttataggtgtgagccaccttgcctgtccccagagaggtattttaaaacacaaatcctcatcttaccctggctctgcttaacagccttcagaggcgtccagtggcccatagataatgtccaaggctttcctgtgatctaccagtctggtcagtgtgaccacctttgcaagctcatttcagccactctcccctcaccttcctcagctccagccacgccttcctcagctccagccacgtagggtgcttttggttcccaaacaggccaacccatctgtctcctcaggagctctcaatgagctgatctctctgctatttgctttttcaaggaacccttccctgaccacccatccagttataatacatcaccccttggcaccgtgggcttttccttcactgcaccctcttctattagttgtttttcctccttgtgggactgtaagccccaggagggcaggcaccatggctgtctgacccactgctctgtcaccattgccaatcctgataggtactgatagggtgaagatggagtgtctggtatcgtcatatcccagtcccaggacagctgtgtggccacctaccatttggggactgttttctttttaaaatttaaaaaaaaatttaaagtctacaccccatgattctgtatggggactgttttcttttagccccaaagtccaacaggagcaaatcctttagtggctcttaaagctagagttcagctgtttggaggaaagggtgacagagctgacccacagggtagatgcgacatcttcccctggagcactaaggccaaacaggagccccctggacgtttgggagcaggctttacaagccctgcctaaagctaagatgtcattagagtgatgcgttgcatccctgccttgttctctaaggaagctttggtgttttcaagacaggccctctcccccctggcccattgtccttacttgttttcattctgtatagtgctgttattacgggtcaggcctccttgcactcatgtgaaatcgttgagaacctactcaattagaaagttctgaacagggccttagaggagtgggggctagaaagatgaacctggggccaggcacgggggctcatgcctgtaatcttaacactttaggaggcaggggctggaagatcacttgaacctgggagctggaggttatggtgagccatgatcacaccgctgtattccagcctggatgacaaagcaaaacccagtctctaaaacataaaagaaagaaaggagggaaggaagaaagaaaggaatgaaagcaagccgaatctgctccgagggaaccagtatagcaagacagaatgtaatcaagtatcttaagagtggcctaggcttggctgggtgctgtggctcacgcctgtaatctcagcactttgggaggccgaggcaggcgaatcacttgaggtcgggagtttgagaccagcctgaccaacatggagaaaccctgtctctactaaaaatacaaaattagccgggcgtggtggcgcatgcctgtaattccagctactcgggaggctggggcaggtgaatcgctcgaacctgggaggcggaggttgcggtgagccgagatggcgccattgcactccagcctgggcaacaaaagcgaaactccgtctcaacaacaacaacaacaacaacaacaacaacaaaaagtggcctaggctttttggggaacaaattggttgtggctggccctcagggagcaagctttgcggcatagcagcgtaggctaaaaggtcctccccggagacaaaatctgcagggaccacggggtgggaagcatcagaaggctgcccactctgactgcaaatacaacaagctggagtgttcctagaagaggcaatttcttccgcgtgtgtgttggggacagcctgtgtgtgtgaacattttctgcccttgccgcgcagggctgggtggaccaggaaccacccgcagaggaagagacttattacctcttggccatgtctgtctccagaagaaccgacctttcctgctctatgtgcaacaagacacaccttccgaggaaggaggcgaacaggatttccatcattactactgccctattaaaacacacacatacacacaactgtgtaattagcctctgcaggaaaggcgcacaaacaggatgcgttcgagctgaccccgggatgagccatccctgtaaatattaggaaaaagaacctccccgccgtgcccccgcctccggccagggcctcttggggatggccctgcagggtcaccagcccaccggggaggttgggagagagggggcgggcgactcctcgccgcgcgggttcctggctggagcgccctcctctgcgtcctcccaaccttccatcgctccccaggtcagtctaccacgcctcaggtgtttgctcgggctgggccacgaaccctttcctttttggcctgcgcccggggtggcccctaacccgcagcgcacggccagacccagcgctacaaggagggcgcgcagggcggcgcaagcgggcactggcctcccgggggcttgcgcggggatccacccaccgcagggccgggccgcggaccgcgggccacgcccctggggtccggaaggcgcgggagcggacgcgggggttctgtgaacttggaacctggcggtgcgaggttctcgccggggatgcggcggcggcagctgcttcctggtttgaagctcgccgagtgggggagagcgtgagccttcggaggcgggggcaggaggagaagcaagaggaggcgggggaagagacgcttggggctggggctcaccggacgggtaggtccggctctccagggagaggagctgcccggccctggagaaggggcgagtcctgcgcgagtccccgggaggcgccgcgcgcttggaagggacggtcgggcttccccggcccgctgagggctcggcggcgggctcccctcctttccacctcgggagggagggaaggaggggagggaaaagtcccacggaggaggcagaatggccagtcgaggggcgcttaggcgctgcctttccccagggctgcctcgactcctgcacctgtcccgagggctggcctgagacgggactcccggttctcccgctgcgaagcagcgcggccccccggggccggggcagcggcgccggcatgtcgtctggcaccatgaagttcaatggctatttgagggtccgcatcggtgaggcagtggggctgcagcccacccgctggtccctgcgccactcgctcttcaagaagggccaccagctgctggacccctatctgacggtgagcgtggaccaggtgcgcgtgggccagaccagcaccaagcagaagaccaacaaacccacgtacaacgaggagttttgcgctaacgtcaccgacggcggccacctcgagttggccgtcttccacgagacgcccctgggctacgaccacttcgtggccaactgcaccctgcagttccaggagctgctgcgcacgaccggcgcctcggacaccttcgagggttgggtgagtagcggtgaccccttccctttgtgtccacccaacccccgttccccttatgtttttcaaaactcacccgggtcccgctttcccatcgctttgtggctgagggaattccctccagactttggtcttcgtccaggtggccgcggcactggtgacgcgaccgcggtgggtgtgtgcaggcgcaggtgtgtctccaggaagccggcctggacacgatcccctttcaggacagcggcttggcctaacgggaagtcgggcaggggtccagggcggtcaccctttccgcccagtctttgggtaaggagctccaactttcagcacgcgagtgataggtaggaaaggcagggaaggagtgatacaaaagggacttgatttgggtaaagtgcttcaagcgctacttaggagaaagccgtacattctcgcgagtattattcataatgtttatggatacatgttggttcagccgctcagacgtgcacacgtgtttcggcttgcacatcccagaggtacatgagctacactggcagggaaatgagcgcctgggtctgcacgttggcagttttattatttagcatttttccaaggagatgagatttacatatacttgcaggtaacttagtcagtccgaggtgggagtcctgcagtgtgggtttctgctgctatgggtctgagaagaggctgtaaggactcctcaggaggttgttaactgtcttccctccccccatcaccagcctgtgttcctgggtattgacgtgtagctacccgcagctctccccttgcctctgcttttcacatagttcccatgaggcataatttctgctgtaaatcaattaaaacttctagagcgctctacacggtgctaacatgcttttactgcctaatcctcacactgtctttgtgatgcaggtgtcatcgttcccactttgagatgatggaatgataattataataaagtagtctggtttggcaaagtggagtacgccatttgaagactctcaggagtttaatagtttaagttctggagggagtcagttttgaacccaatatcagtattgaaaatgtttgaaatttacaagtggtgaaatcagatggatggtgatgaaggctcatttaggtatttattttatactttgtggaattagtaattttaccgtatattttctaaaattaaagatggcttgtggagctattcctttcttttaaatagaagtacaaaaaccataatgactaaccttaatcgtcaaattatattgagttaatttcccttcagcctaatttactttgtggtacttagaagtggggactagagaggaattgctaaaatacagttagatatttacatttatcctgtgaatttctggaaatgaaatagaagtgagtgtaggcatccagatggaattgttgagttctattagtgtctgattaggagttaggtcgggcaaagctctagaggaactaggttctgaattatggtggtgcagattggccagtggccatgagaagcatctcttcctggagatagcctagactcgtccttctcaaccataatcttcccacttgaatcacccagggacctttaaaaaatccccacttttaaagattctagataggaatctctggctgtgggaccccatcatccgtacttttaggctcaccaggtgattccagtatgcagtcgaggtggagaacctgcagcctacatgaagaccaaaagatgaggacttcttggtgtcataagtgtaggaagatccacgttatctgactaggtggcatgtacagagctgcttattgttccactggatgaatattcaatgtaaatcagatatcgatatttataatggtctgaaataattacacttagatgtttaatataacccactggtggtgttttggaaaacgttgagtggttggtagggagggtcagcatttaaatgaccttgaaaccagcagtttttcatgcgtttgcatgcatcagaaggcagatttttttgttgttgttttttttaaaaaggttttgggtatttcagaactgtaaggatatggaacataggttgggcagagtgttgtttcttttctttttaaagaaaatcttgttaaaaaaatttggaaatatatggaatgcatgcttttttaaaaaagtatcctttataggttcaaaaatgctttaaaaaaatagagatggggtcttgctaccttgttgaccaggctggtcttgaacttgtggcctcaagccatcctcccacttcaacctcccaaagtgctgggattacaggtgtgagccactgcatctggcccaaaggtgcttttgaagttcaggattaaagaaatacttatttatctttagtattttaaattgacatgtagtttattcagagagttaaatgtggaataattgaatttactccataataaatttatggttgcaagtggaactacagattactgacttaaaaaaaaactattgaagttgcaggttcaaaaaacccccaaaacctagtgacttagtttttgctagatccagagaagctcttagctgtaggttatggatgagaggattcaatatggttaagatctcaattcttcccaaagtattcaataggttcagtataatctcagtcaaaatctaagtttgttgtagaaattgacagactgactttaaaatttatatggaaatgtaaagtactgagaccagtctaagaatagttttgaaaaagaacaagttgggggacttagagtatctgatttcaaggctaactgtaacatgaccgtaatcaagataatgtggtattggaataaagagagtcatacagatcagtggaatgaatagaagagagtctaggaatagatccacacatatatgacccactgatttctgataaagctgccaagaaggcaactcagtgggggaaatgatagtcttttcaactaatggtgcttgaacaactggatagccacatacagtaatatgagccttgacacttacctcacatcctacaaagacattaattcaaaatggattatagacctaaatgtaagagtttaactgtgaaacttctataagaaaacaaaattgtagtgaccttgggttcagcaaaaaatttttagatagcgtacaaaaggcaccaactataaaaaaatcagtaagttggactttatcaaaatgaaaaactattgcttcccagagaatgtttaagaaaataaaaacccaagccacaaatgggggaaaataactgcaacacgtaaatgaaagatgtgtaacatgaatatataaaagaactctaacagcacaataataatgagaaaaatacctaatttaaaatccaacaaatgacttgtaacttgtcaaatatttcaataggcactcaccttcatgccaaatagcacattaaaagatgctcaaaatcatgagtcattaaggaaatgcaaattaaaaccaaaatgagatctcagtatgttcccactagaaaggttaaaattaataagactgaccataccaagtgttggtgaggaagtggagcacctggaactctcatatgctatggtgaggaatgtaaaatggtaaatcatgttggaaaatagtttggcagtttcttaaactatcaaacatatgcctactatataacttactgtttagtatttactaaaagaaatgaaatcattcatacaaaagcttgtccacgagtgttcatagcatctttatttgtaataacccccaaagtggaaacaactcaaatgtcaacagatgaatgtttaaacaattgtggtttatccatacaatggaatattactcagcaataaaaaagatgaactattacacatgtaacaacaggaatgaatctcagaataattatgctgagtgaaagaaactagacaaaaaagtacggtttcatttatgcaaaattctagaaatgaaaaggagtctatagtgacaggaagcagatcagtgggtgcctaaaaatggagagtggaggtaagggaggtggattacaaaggaggcagaaacttttaggggagatgaatatttgtgttattctgattgtggcaatgatttcacagttatatacatatgtcaaagcttattaaatagttcactttaagtatgtgcatgttactatatgacaattatacctgaataaagctgtggggaaaaaaaccaatcagcgcttatccatattttactgaaggtgttaagtaagatgctagtaaatgacagaatttcagctgagccaagtctgactcttgaaaactacatttcctctttagtgcagaaaatatttatgagaatgggagcgtagaaaaaatgaaatcacaataaaacaaattagtttctgatttttggacacggtctcattttctaaattatcactgtcagttttttttctgctgcttctagaacatgtttattttgcataatttctctggcttccaaaatctgaagaattgcctctgtttaaactctattttcttctttcgtgtacttgctcttgatttgctgaccttctaaatggggaccagcatctaatgcttaatgcagagtgctggggacatggggaggcaggaggagctggaggctgcgtcatggaaagaccttggcgccccctcaggaaggaaggactggcttggcaggatcccaggctgttttcctggttcagccctcccgaagacattgtgttctctgcagccctggagggcctctttctctcaatttctcagtgaggtacctgttttgtaatcagtcctgtcaggtgaagcagccatgttactactggacaatcatggattatcttttcccttccttcctggatccaggtgtctgaatttataccaccaaaattcttccagattttctatctagtggttcattctcttttgtactttgtagtgccgttgtttattctcatgattgatttttttctgagccaattggaaggaatgtctaacactgactgatcaacccacagtgtttaagaggaaaaatatattttagaatcttgagggagttttatttcagtgtatgtgaattgtattggctatgtagcgtcttcattttcattgtaagaagaattttgctacagtgggaccggctgcttctcatcacaaacaggttgtggctcagatattttcccctttggagagcattttcctggtcatattattatcttgttgtctttcgttgcactcattgctctctgagatcattttgttaatgaatttgcttattatactttcctcctttagattacaaatggcttgagagcagggacccacctctcttattcactgtcctaaccctgggacaatgtctcatatgtagtaaacattaaatatttgttaaatgaaattttatgtgattgggggacaagtaaagtgtaagtactttgggagcatctttccatctttctaaaagaaagaaatgaaaatagttgaggagttactggatgaacagtattcctctgttaaatcaatcaatgacataccaatatgtgcttgaaagactgggcctgggccgggcgcggtggctcacgcctgtaatcccagcactttgggaggccgaggtgggtggatcatgaggtcaggagatcgagaccatcctggctaacaaggtgaaaccccgtctctactaaaaatacaaaaaattagccgggcgcggtggcgggcgcctgtagtcccagctactcgggaggctgaggcaggagaatggcgtgaacccgggaagcggagcttgcagtgagccgagattgcgccactgcggtccgcagtccggcctgggcaacagagcgagactccgtctcaaaaaaaaaaaaaaaaaaaaaaaagaaagactgggcctgactgctatattctttgaatatggtaatggattgaaaaccttgtgtatggaaaattccctgctcttacgtcattttaaaagactatgattttaaaacttgtaatacgttataacgtttttcacttataattttcacgcccaaaatgttaaagtcagggcagaagcaagacatcagcatttaaaaggttgtgcctcagccttggagaggaatgaggttggtgggtggaacgtgaatcattttatcttatgcaactcttagtgaagttttggtatctagtaagtgttaagaatggtgattagtggtgatggtaaaagtgtggtgcatttttatgagaagagtagcatttgcgtagaataatagaggtgcctgggatttttggtagtccttttttatttaataaagcaactggggccgcgtgctatggcttgcgtctgtaatcccagcactttgggaggccaaggcaataggatcccttgggcccaggagtttgagaccagcctaagtaaaatagtgagaccccatctccacaaaaaaataaaattagccaggcatggtagcacatgcctctagtcccagctacttgggaagctgaggtgggaggatcacttgagcctgggaggttgaggctgcagtgagccatgatcatgtcactgtactctagcttaaatgacagagcaaaaccctgtctcaaaaaaaaaaaaaagctgaaaaaacagtcaactagattgtgttccccttttgtgttgacttcttagctccactttattagaatgtgataaaaatgagacctaagtggaaacaatccctgtccattgttttccactcttatcattactgtatccaaaatagtctttctcaattgccaaaccaatagtcatttctttatttaaaactcctcctctgtggttctccactgctcttagataaactcctgagtcttttttttttttttttttttgagacagaatctctctctgttgcccaggctggagtacagtggcacgatctcggctcacttcaacctccgcctcccaggttcaagcgattctcctgcctcagcctctcagtagctgggattacaggcacacaccaccacgcctggctaatttttatatttttggtagagacagggttttgccatgttggccaggctggtctcaaactcctgacttcaggtgatccgcccgccttagccttccaaagtgctgggatgcaggcatgagtcactgcacccagccaaagtccagagtctttaaaatggtataggatgttctccatgatctgtaccctgtgttcctcttgagccttttctcttacatttccccaaattacaatgagcatctttcagttcctcaaaaggaggaacacttcgctttgctaattcttccttgtgcttcaggtctcattatgggcattaattacccagacaactgtccctgatgtgccagtctgggtttggtcctcctcctagtgttccctcagtatcctgagatctcttttgccgctgtctcctccaacctgaaagaacggacgtatgaatggattggcctctaatggaagcgtgtgacactggtcacagggagttcagggtgtagttgtttgaatgattgactaagattcatccgcttggctcttgtagtagtgactctgacagactattacatgtttctatttgaaatgccaagccctaggtgagcatccagccaccaatgagcatgtactaagtaccaggcattgtgctctatcctgtaaagtcaagtggacaggacacacatgacccattctttcgtagggcttgtaattccaagggggagggagattgggataaaaagcaaacaaaagcaactagggaattacagaagtacttacaggcaggtaagcccctggtttggggaggtggggaacatcttcctggaggaaaaacaaagagctgacttttaaggacccagcctagagagccacagcctgcttcagttaaatgactgtgaacagtctttgctcaaaagaagaaaaggaacttctgacctgataatgtttcccagagggacatcgcagatgcccttttgaaaggtaaatgttcctgacccacagaaatgtttccatctttggaaagtttgggagggaactgtttccatgcttgtgaacagatgacctgcaaaagaacttttgactccacaaaggcagaaagtaggaacactatatttgaaccatcaaataccttaagttttgtatagatcataaaataatcatagatgttgaagcaggatgatcatctaattcagaacaacaacaaaaagcctgatagctcttaggcctgcagacagcctgtaggtctattcatttggcacagatgtttttaacattgaaactgaaggcatttggtgctgtggtgctccagtttgccacagacccctccactccctgttatgaaaccaactctcttgactcattacttgcttggacctgggacattttaaattttgtgacactatagctcaagcctttgttttctgaatgtgggaaccaaagttccagccaaatcattactgttgccctaacaggggtgtccaatcttttggcttccctgggccacgttggaagaagaattgttttgggtcacacataaaatacgctaacactaacgatagctgatgagctcaaaaaaaaaatcctcaaaaaaatctcataatgttttaagaaagtttacgaatctgtgttgggctgcattcaaagctgtcctgagctgcatgcagcctatgggctgtgggttgaacaagcttgccctaactcatgagaagtgtaatatacatacatttaatatgtattaatatctatctaatctatatctacaaaaatacagatatacttacttagatttatttagatatgtaataatttattaatttataaaatgcattagtttagatatatatttacttagatttttacttacataaagatttgtgtcctagtatttcagagaaagctagcttactagtaaatatatggggagttaacttttactgcaaattagtattatattaactatccaatttaaaaagaaagcaaactctgccaggctggtatggtggtgtgcacctgtagtcccgtgtactggggaggctgaggcaggaggattgcttgagcctaggagttcaaggctgcagtgagagctatgatcgagctgctgctcctcagcctgggcaacagagtgagactttgtctcaaaaaaagaaacaacaacaacaacaaaaaaacccctctttttatttcgttatacaactcccagcaataggggaacactgtactttaatgggtgtcaggagaactgggttcaagctgtgaccttaggcaagcgtctgcttatctgggtcccatttccccgttatattgtgagggggctgcactaaacggtctccaaagacttttatatctctaaagcctctgcttccatgtgttaggcaatcacataatttcttcccttttggagtaattggtttggtttaaactgtcaaaatgaattatgtgttatcaaagttagtaactcctaagaattaaattggtccaaatctaaattgcttagagttggagaggatttagctcccatctaagtgacttgtatagcatcgctagtgatgttggtattattttcttggtttagaatcagccttaaggcaatacatttcaagccatgcagttgtatttcttgatttatgctaacgcactccttgttctatgggatggttgtaagttatgtccctgttacggcaagtcagagagagactgagaatcccactgttttgctagaagccattctcactagtttggcaattacagcattattgtcccaaagtatctgtagctaccagtctatgtatccacccagggtgatgacaaatactacaaatcactgtaggacagacattttaattagagggaggaatgagcccaagggtattgactatggtagtgtttaagtgctgtgttaaagaattttatgagacaggaaatttttgttgagaatcatggtcctatctggagatatttatcaagattattatgttagtgtgcttctgtagcaccagtaaattagagcagtatctgtcaaagcacataggacttttgtagtagaaagcccacttaataggaagcttaccagcagtgcttttattatgtactgccttcccaaaagttcctttgattgcgtataagttttacccttgcacgcctttgacctcacagggagataaatgcttaaaagttaccaaagatgtttagtttgtgcttgtggtaaaaaattaagaaatttgccagagcataaaaccatggtcaacatgatccctgtcataattgcattaataagtcatataggccagagtgagcatattctatacctcgtcctgtatttccaatttcagacctagcctctgttctccatgcacttagacaaaaaccgcaaagctgcatatttattcgtaagtcacatctgtcccttgtactagcatagctctgtctctccacctctcgtgtcgcaagcccttaaatatgatacactctttccttacaatggactttggtttttgcgtctgtgatgttggagggctgggccccttgagctctgtggtccttccggtgtcagagttttgtggttctggtaatggttccgttggacaatggaaattctgctcccttctgaaatatattcaggagacttctgatactcagatttgttctgggctctgaaattattttgggaagggcacccaaaagtcatacgtgtattagcctaattccataaacagaatacatttatttatttgcaagctgtgggcctcttagatgctttaatatagattactgttgtttaattatggtacagaagagttgagagcagattccatctaaattagtgcttttgaaactgttgtcgagccctagacccttttagagatgatgagagctatggagctgtttctggaaaaatgcacatatgtgcatattgatgatattctgggaacaatgtcatctgattagtagccctcctaaagcctttcctaaaccttaaggacacaggacctcaggttgagaaacctcagttgaaagggttcaaaaataaggcttttattaattcctaacattcagggtgtggttccagtgttttcctttgtatttgaggacattttcacttcaattaattatagaaaatagttacttagtagaaaacaggagctaggagctataaattttagagaaaaagatgttcttaaaaatgtgttctcacttacggcttctggtgaaatatactagatgatgacccattttaggacctatttggttgtgttatttaggtgttttcaaaagcctctatttttttaaagagtttctttgaggtttgcagtagatgaaaacttaaaaaaacaaaactaggacagtttgagtgaccctggcttggtatcttttgttaatataaacttttcccttgtaaaaagaaataggattcatctttttcatacgctttttcttaaaacattcaccctctttttgagctgcagtgggcattatggtgttctgctgtgttagtctaagacaaaatgatgagattggtgaggcctgcctgatcctcttaccctttgagccccagtctcccatggtctgggtccccgtgacccagcagattttttggtcctctctggaattccagttcactcagtcagcatcttacagacaacccgatgttggtggaaactgagctgaatggagactgtccacagagcagccccctagctaaaggtaaagtgagaatccagctctctagacttcaggccaagattctttcccgactccacctcagtgtgtggtggaggcagcagggtagccatccagtcagtcattcataggtgtttattaagtatctaccttgtgcctgagcctgttctaggtgttacaggtagggcagagaacgcaagacccagcatctcggctctccagcactgccgccctagcacagggaggtggataacaagcaggcaaacgcacgatgaagaaaatgacaaatgctgggtaggtaccaagtagagaatcaaagcagggtgacttgattcagtgtgacaaggtggctgctttatctggagtggtcactgtctgcgaaggacaggtaaagcactgtgcagcagacttgctgcacagagcgggtgacaattcagctgaggcctgactgacaagaagcacacagccctgtgaagattagagaaagagcattccaagcagaggcaacaaaggccctaccgtgagaacaagcttggcaggtggaaaaacagtggagggtggcagaaagagagtcggcttggtgtcagaaagctcggggcattgtcccagatctgttgcttcctaggagtgtgaacgatgagcaagtccctccatctctgatgattagttttttcttttggaaaatggtgctaatgtttgctaccttataggcttggtgtgaagattagatgaactacattaaacatgcccagcacaagataggcactggagaaatgctagctttgggtgctttttaaattaattaattaatttatttaatttttttagatatgggctcgccatgttacccaggctggtcttgaactcctgggctcaggttatcttgcttcagcctcccaaaatgctgggattataggcaagagccaccactcctagcctggttgctttttttattttaatctttaacaaaattatttatttatttattttttgtaatcttggcaggcaaagctttggttgcttttaatttcctgaggaaatgaatatttttgacaagggccttctgaaaagaatcgtactggctgaggatagacacccacagggttgcctcttagaaaagagggtggtggtatgaaagtttcttaggggtggggtagggtatagtcttgttggcgccctcaaatgacatcatagaagcatctagttatctctacccccttcagtaacatgttttctaaagagaggatggggaaaggaaacaaagactctgaagtttattccgtatttttcagtttctgaaaagtgtatttgttttctatggactcataaatattaatggaaagtttcaataatttagatggacaggataattgcattgtagtggtataactgatagggccccaacttgtttttatttgttacaaaactatacatttatggctgagaattaataaacatactaacagtaatcataaaggaaataaaacctcagccattgtaaaaaataaaaataaaaaaaaccacaacccccccatctgccaaaactagatataattgattcttgcttaattctgaaagctcatttactttttggattataattttgtgaactaactctggataattttgcctattttgaatagttttagataatgcctattttggcatctccctgaatatttctgaccatcccttcaacatttatttggtctgtttaaagaagacacattaacatttgcctaagtcacatgaattaggatgcagaatctataattatggactaatgatacacaaatacaggctttgaggagtatttattggacaactaccataattatcagtgcatcatagtgtgatggttgggtgtcagccagattggggttcagctattcattctgcctctcattagcagggataatttaacccctgcaagcctgttctgtcatccacaacacagtacctgcctcacagggttacttcagaacacagtgaggacttatgtaaaccatctacacagggcatgacatatactaccgcagaaaaatgattgttgatgtcactttcattaccaccactctaccctcagcacttcaatatgaagtgatgggcccagcccttttctgaagttaactttgaaagcagtaagatatttatttacatagaattcaagagaagggatttttgagtacaacttcctcactggttttgcttttaatgtaggattctggaatgtaaatcagtaggagatttctagttactggtggaagagaagatggcttccttatcccggaatcacagggattgggggtaaattctgtacataggtcctctctggaagttcttgcaaggaatatgggaaaatgaagctggaattattatagttacaatgttggctaaagttggttcatggaaaccttgaaattaagtttgttggtttgcttattcaatattggacagcagagggtctgagttagtgagaaccaacaaaccagaaataaatcaagttgcaatatttagctgcaaaggacagaaagaggcctttgaaaagctgaagtgagtacttttattgctgtaattaagggaaataatggtaaacaggctctttcaattggcattaaaatatattttccttggttagtttgaatatccaatacaagttggtggatgtgaattgttctgtcatgctttcaaggaggaaaactctagttttaaaagtacgtcattagggccaggtgtggtggctcatgcctgtaattccagcactatggggggctgaggtgggcagattgcttgaggtctggagttcgagaccaacctagccagcatggtgaaactctgtctctactaaaaatacaaaaattagctgggcttggtggtatgcacctgtaattccagctacttgggaggctgaggcatgagaattgcttgaacccaggaggcgaggtggaggttgcagtgagtcgagattgtggactccagcctgggttacgaagtgacagtctgtctcaaaaaaaaaaaaaaaaaaaaaaagtacatcgtttgaatatggatttatagatgtattcaaggacaccaacaattttttttttttttttttgagacagggtctcactgtgtcccccaggctggaatgtagtggtgtgaacatgactcactgcagtctcaacctcctgggctcaagtgatcctcctgcctcagtcttctgagtaactgggaccataggcgtgcgccaccaagctcagctaattttttaatgtagagacagggtcttgccatgttgcttaggctgaacatttgatttggcttgcagaaaatatgaagtactttttttcctatgtggactcaattaaacaaaaaattttattttacagagataggatcttactctgttgcccagtctggagtgcagtggtacatacaatcttaactcactgtaaccttgacctcctgggctcaactgatcctcttgcctcagccacctgagtagctgggactacagtcgtgcaccaccgtggttggctaattagaaaaccttttttcttatagaggtagggtctcactatgttgcccaggctgctctctaattcctgacttcgagtgatgccacccttcatggcctcccaaagtgctgggattacaggcatgagccaccatgccccacctggggactcatttgaaggtgatcatttctacttttatttgtttactggacacttgttctgggacctagatctttcacagttgattttaagtgaaaggtttctgaactgtatatatacaatatttcagaacagtaatttcctttgcttcatagtacggcacaacagtgtttgcacttgatgtttagcgtagccttggttttggttgttcagaagcctttgttagctctttggttgtgccaagaatatattgtttttgagtctccttgccgggcctcctcgccttcttgtcatgcacatcctgtacctgggttgtggttgtattgatttgctggggcgctgctgttgcaaatgtctggagtgaatgagaatgtgtttgtgggtgtctgccctcaccttggccactgatctgctttcagccctgaagtactgccatctgcatgaacattagggacccccagcctcccccaccacttagtaaagtaccctgcacatgtttgggattcaggaaatgtttgtagaaaggaaaaattccttatcattccttaccattctctgtcttgagtctgagtcatgattcaaacacttttgctaaaaggttttcgcttgaaaaattcatattcaggtacagatttacttttttttggtgtgtgtgagtttaagagctgcctcaggagtagtttagagagaatgaatataccagtatggtttttattcccttgattacttaaataagtattaaaggtgtgtgaaaagattagctgaatcctaggttcctcaaacaaaatgttaacttttgtttgggtggtaagagatggatttcaaaatgggaaaaagcgagactgaaaccatcatccagcacacactatgtcaggaatgtattaatgacagcctgcgcttgataagaacaggacaccaacagggggcataaacaagatctaggtacaactgtgaccttgaagtgaccttgagtttaagttgccatttaaactcattttccttaaactgtccttttctggcaaaataagtgactcctgaagttgcctcattagaactccaatatgcatttttctctctgaactgtttctgatgggtgttgactccttctgttgtcatttggtcctataggaccaaacttgtatatgtagaattttattttaaaataggaaaaatcatgattctgaaaaattgtgcctgtcaagatattaaatgactgttcccattaatattattgccattaatattttgaagtcaaattacatagtgacagctctctgcctgaatgatacttacgttaaaaggaagaaactgtctgagagaattggaagagatgataatgaggcctccccaccactttcccttttaagcccctcacctatcacctactcctccatcccctagacttaagtaggttcccttacttttcttctgcttgggccattgtttagaaaggtctgagtcttgggatgagctggcctcctgttcaggcttagccctccacctgctctgcctgggtcccctctgtgttctccctgggccaggccttcccttctgtgttttcatcctctcctgtcctcctgacaccttcatttaattgtaactttttttttttttttccgagacggagtctcactctgtcgcccaggctggagcgcagtggcgcaatctcagctcactgcaagctttgcctcccgggttcacgccattctcctgcctcagcctcccgagtagctgggactacaggcgcccaccaccacgcccggctaattttttgtatttttagtagagacggggtttcaccttgttagccaggatggtctcgatctcctgacctcatgatccacctgcctcggcctcccaaagtgctgggattacaggcgtgagccacccaagcccggccttttttttttttttttttttttttataattaaagttaaggttgcagtgagctgagattgcaccactgtactgcactccagcctgggtctcactctgtcatccaggccagagtgcagtggcgcaatctcagctcactgctaccttaactcctaggctcaagccatcctcttaccccagcctcctgagcagctgggattacaggcatgcgccaccatgcccccagctaattttttaatttttcatagagacagaaaggtcctctaggttgcccaggctggtctccaagtgcggggctcaagcgatcctcttgacttggcctcccaaagtgctgggattataggagtgagccactgtgcctggcgaaaccttcattttaaaaacatacccaaatctttctgagcactcagcctttcagtcctctgttggccttgcccactatccttttgaggtggggcacagtgttttcctttcccttctcagcctcttccctgacagctgtctgcagatgcccttccctgccctgttcatttttcttcccggtgcccatccccaggagactgcgctggcgaagcccaggagtgacagtgtagtcaggtcagttcttctttgtcttgttggctgctaccttcttcagattcattgctcccctgtttctgtgtttttccaatgcttactgatgtgtttttaagtttctttttgtatctttcctcatccctcaacctagtaaatattggtgttccccaggtgggagggggcggggtggggggcgggggtgggtgggaggtggtttgtctttaccttcttttctttgtcatggcgcatggtctcgtcaacttttaagtctcaacaatattgcccatatgccaaggacttccaaagctctgtctcttgtcttcccccctgagcccaactattgcttctggaactggggcaggcttaggacaaaccactttatactccgtctcctttaatcctcacagtagactgtgagagaggaggagtgctgtggcacctgcatttctcacccgaggaaactgtggcttagacaggcccgatatcaggtccagggtcccatgtctgatatgcttgctggacagacctgcttggacatcctttaggcatctccaagtcaacatgtccacaattaaatatcccatctttccccttgacctgctcctcctcccattttcccggtcagaactggtcttgccgttgttcagtcacctggccaccattctagacttttctttctcctttacctctttccccacctcagttgattgccaagtcatgccagattggcttggtaaatactttctgactcaatttcttcttttccccacaattaccacactcgtttgtatcatacatatggattattgtgatggccttggaactggtttccatgaatctagttgtattccctcaaatccatcctccataaactgcctggatgagctgtctaaaactcagccctaacctccctcctgccagaagtcgtttaaaggcttcctgtgccctataaagttcaggctcctggggagggttcccaatcggctggccctgccttccccattccatcttccacctctccttgccttccagtttatgagctaagtactaatggacagactaggttttcttgcctctgctcatgtctaattcaccttatttacaataaatgttggaggaggaaggaagatactcctttgtaatttgtacagaaggacttgtataacattagaaaagatagggttgaataagttacatagaaaaaatatgtcactctccatgtaactacaaagacatccataaacaggcctgagcatgccacatgcacatgtcagcacagttcacagcattcactgagcacttgctgtggccagagaccacagtagatgctgggggtgaaaagctcaaggagctctccctgtagtgagggaggcagcagaaacccacagtttcatcatagggtagttgagtttaggaataggaatgggtacgggatagtaggggattgtgagcctgagtattcagggaggacttcttggaggaggtgatgcacaagttctgtcttcagggaaagtcagtagtaaccaggtcgaaggtagtgtaaattccttttctcctttttcctctttgggatttgtatttttcccatggaattttacctgtacaggtcattttacactggactaacaatgcttaagtgctttttaaaagcaaactgtgccagatttatcccattggtaggaactttcttcatgagttcagaggctttgtcttggttcccgttgtattgccagtgcatggcccctggtaggtgctgagtaaatgttggttgaattggatgccttgaggtgaggcatgagaaagggttctcctcctccccctgaaggtggtgaagatagttgtgacagttgagacttgcatggggctgaccttgtgaggtcctaagcctggtgaccagcctctgcagtgtaactgggctgtctcatgggaagggcagagcctttcctacgtggccaactctgtgttctgaacaggagtgccaaactcatttggaggggaagggagcgcccttttaaagcctcaactactaattaaattcaagcagaagatggtgaaggtggagctaactcatttattagcatataatatgatcaacctaactcatataaatgtagattaccttggtttgtcttttcctggctgcagaaaaggcttggagaggtgccttggattgtgagttagtcagtgagcagctgcttaaagatttgaaaaatcctagaatatgtcatctctgtaggctttatcctttaattaattatggatttttatctgcatatatgtgaagctaatgattgacttggttcggacactgaattgtcggcttaaacctgccattccactgggcttcatcactatgttctatgggtgtgaagcctttgttttttcagagacccatttccaccagcgggtttgcactgtaagtgtttccacaggaactctgccctttgccagtgtcactgttgtggctatgcagcagaacccacagggcggaggtgtttcagccctcactgaaaatgcaacagatcttaacatctcttgctgcaaattttccagtgtgttctggtctaccttggtatcttaaaaccaggctcactgactaccacatgagaaatgacagtggggtgtcttaaatgatctgttgaagaccagcagccaaaaagattgcccttagtgtttctctctaccggctaacattagacaatgccatgtagaagctgctgttagggtttgagaactgtgtcgcctcattctcaagatagccaaggaagtgtcatctctggagaaggcagttctgtctctttcagtttctccatggatccgatattgttctgaaagaggtggttttaccaattcgtctcacacagacttcttgcctttacttttatctgactgctgacagggtgggctggaatataatcgctacttaactggacttgactttcaaggcctgattggcgtttccagtatagcagttgcctgagtcatctagttttggaactgataaatcaaaggactggcttggaggctagtgtcctgtctggagaatgggcttaatgtaacttcagttaagaaattaatgaatctgaaatagttataacccaaggaagagattttcctaaagaatgtccctttagagaaataatgaccagttccctcaaaaaaaaaaaaaaaaaaaaaaggaaaaacagacactagactggatagaaaagacttacatgttgaggctgatgatttctcttatggaactataaaaggactggactctaaggaaatgagggtcttcaacttcattggtgatatttccagttgttctggagctgtgatagaaccaggactagagaatgcagggcacgatgatagatttttttttatgtagcacttttaaacataaaaaatatatatctaatgtgccaatgcaagacctggcctttttgtaatcaagtaatattttgagtaataattgattgcacaacatcctgtgacacactgtgaaagagtaaaattggcttaaaaattttaagtacaaagacatttcagaagagttttgtccataactttgttagactgaaatgaggaattacatttggcaccaggaaatggatctggattatttagaacaaatgttttccaggtttgaatcttctatgtggaagtacagcctgacttctttgccttttccctggtccgggatcctgacagtcagttcttcagctctgtgcctccagaatttcatgtttatgctgcacaaggcctgtattttataatggtggctcttttggacgatgacttcctcgatggtgaaacttccagtaatctccctcatcatactgaaatgatatcagtatatcatcagaacaccatggagcttgtcatttgagggacacagcttgcttgtgtgcttgggaaagaagaggtttagcatggtttcaggtcagtgatgagtccaatgatctctgcaagttcccttagctctgagaattctgatgtcatatgcacttctgccgccagagttgctgcttactggatgcgtaagaagcaaggaaaataaatgtaaaatgcctggcgccactgaggaagtagggtgaggagttaagttagacagtgactggcatttcccagccacactagtacagaagtgtcctgtggtacgaacggaggcaggctggggggttccattgtgtgccaggtgtttccatgaaaataaactgttgagtgccaggtatggcagctgcaaacagggatttggggggcaaaatttaatctttttttgtgatttgttgaatgaagtgcctaatgtgtctcagtaacttacttgagaggaaaagagccacaagcaaggtagtggagagtgctggatggttgccttgtgaccagacctgttcttttaaggcctctggagccagctgtgggacgatcaatccagcagctgcaggtacgcctcgggtgacacttgggtctgtagtcagcggggttgcctgtgactgagagtggcagagtggacccttgcactgatgaatcctgaccctgctgatctttgcttgggtgatggctgtttgtgtgctatttctagaagttcctcccgcctgcctatgtgacctgttttcaccagatccagattgctagccccttaaagcttgaagaaccttaaaggtcatctggaacaaaagatttatttatttttagcccggtggccaccctgaaccccccagttgattgattgaggctagtcttgagcgtgccctgcttcacatgctagttttccagtttctactttgggagaatgaccttatcattaggctggccaagagggcttctttctgttcctgtcacagtactaggctgtatactcattcaccctcagttcccttttctggtatatttcttaacaaattatttccctctttccactatttttaggggtaacaagtctaagatatttacatataaatggctctcccttttcaaacccttttctagcaagcactttctgggaggacagtgtcttaccaggatcttctgtcactgtggtccctttgagggtagaaagaatagattgttgtgaagtcttttgtcagcctcttcatggttataaacgtacttagttttccagactatgtaggttttagacttcaagtgaaaagagtatacgttgttatgcagcaatagaaaacaaaacaactaccacaaaattgtattttttctccatccagaggctttaactttcaacatttgtatatggaggcaaggctgacagccacagcagtaatttcatgatggctgaaatagctgtgaactgtgcattaacttgttccttctctcttaaattctgctgcagtgttggagcagggaaggcgagcagaggagtgatgaatagagtagcaagtgggataatatacaataataggagatacacaataaggattaattaggtgtcaggctaagtatttcatgtgcattaactaatttaatcctcagaataccttcaagatattcagattctcttattatcctcctctttgggaggcaactgaggctcagagaggttaagatacttgccccaaataagtggtgaaggctgggcacggtggcccagcactttgggaggccaaggcaggaggattgcttgagcccaggagtttgagaccagcctggacaacatagcaagaccctgtctctttttttttttttaaagttgtggagctagagtttgagcacctgcatggaaccactaagctgcattacacctgcctcaggtggttgatatgaagaaaaataaaaatttttcagatggactctgggtatttgccttttaaggctatatgccttttaattctgatgtaaagtggtagagaaatgattaaaggtttaagagttgatagggccctgggtagcagggacactttacatgtgttgtgtgtgcatctgcagcagatgacagctccccaaatggacatgcctcccttgttcaagaaagcttgtcagggtggcaccaatttttttttagcaatttaatgaatgaggtatcaaatgatcacataatacaaatttgattgatctccttttggatatatctccccttaaacattgtgctggctacactatccatttctataatacctttgattttatcctctttactcctaacagtgaattcctaggtaaagtcacaactgaatttatcagcacaagcatgctgcatcatgttgtacgttctgcaaacagtaacttgagatagtgtgtcatttcccagttcttaaggctgtggcctacaccaatggtcttattttcccttttgattttttcaaaattaactgttattttgccaataagtttaacatttcattgcagcaattattacgtgtctggggttatgcaacacatgggatgtgcagaaataaaaagatagtttccctgccctcaaggagcttgtcttataggggaaacagatacataaacacttctagggcacacagattttcatgtatgtgtgtactatggtgttaatgcagaattctgtaaaggaataaagcttccatgatcaaagcaagcatgggcaaatgcttcacatctttctgcctgtgttttgcgagcccattctgtttaatgtggacttgatttaaagtcgacctgcagtcctggacttcaaccaaacagccattatagtaatgaacatttaaaggagttatttttccaaagcattatagtttttcacatccatcttttcattccctcattagctaatgatgttgatgtcctcacaagcattgtttaggaatggcttaggaattttaccgtatgtttactttggcttgtctgctgccccttgctttgtaatctgttcaccggtgattcagttgtttctttgagtccctttgaaattgcaagttgacgggtggggactggtggggaaagaaatccagaatagatattcctaaaactgtgaagtgaaaattcaggagagactgtcataactctgcttatttaaggtggtttggtttgtgccaagctaaaggagggaatattgattgaattacttttttaaaatgcaattaatttttatttaattgttttccctggagttgtggggttgaggtattgcagtttaaagcagtttggatgtgctgataatttttttctgattatcttcaagtctccatggacagtgtcactgcaggtctattcatgctttcgttcctcctttacctgccttcatctgctttctctgggcattggtacccatacccaggtgtggtcagttggagtaactcctgccttgctgggcttaactgtggtgtttctgggcctaaggcaattggaacatctgtagtttatttcctaatcccaattttgtggaggtttgtgttctagctttgattcaattactcctaagtagtggcccgtattaagtagaggctgtgtgagacaagacacttaatgtaggccccttggagctgctgggtccttttcatcagaatttggctaatgatgcctctctcttttttacacactaaagcctaatataactagtaatgaacctcattaataatttgtattggcagatgtgaggtgtcacacattaaaactgttttacaccatgagcattgacttcattcggtcagtgagggaggatgcaaccacctttgccaaaataggaaggaagagaagacccagagttttcagggaacggaattaaatagcactttaacaagcttggcggaggcagtggggtgaggagaggaagttaataggcctagggaggagagtatctcactggtttctccaagctgattcttctgggtgccaagagagctgtggaaacccacagaggaatgccccggttcctttccttccttctttctggtaagggtttagatctatttatttgatggtcagccttccagttttatcagcaccggtctctttgtacaacttcccaaatgtacaaactccagacagatgagtacagttggtgttttccggggagggtgttgctccctgtggtctgtcacagccagagagcagggggccagagagaggactgattgcccatatgttccacatgagtcgtcagtggtgcacccagttttaaaatgctctgggggtgtgtggccatgaagtggattttgaatgaatagaaggaaaaagctcgtggatgaaaaccatgagccatttgaaccgtgtgtggtgtctggaaaaacaggtggtctggcaaaactgacaaagtttgcttggggaaacagaagctttgcctccacctctgatgcttgggctgggatgaaataagccacttttctgtttagactgtgtttagatggagggaagcttcttcagttctttattgggtgcagtgaatggcagaacttttattacttgcattcttaattttagttagccatgctgagctgggtttacacccaccttggtatgtaatttctgtgacctgttccgcttccttctctcctgtcacagtcaccaaaagccactatgggtagccatttgttaatatcacctttattaggagtcctccaggctcagttaaggtctccctccatctttccacccccactattttatgccttcgtagccactggcactctgccttgcggcacttgcacatatttataatcagtgagtcaccctcctagactgtaagcaccatgagggcaagatctgcagcccaccagcagcctctgcttccagcacagcacttggcacacaggaagcactctcttagtatttgttgtacttgtcagtgtttgttgcctgaatgacacagaagtgttccctgctggagaagggattcgagttaaatggaatcatccagagaatttgataaaatgatgatggctatccgtttatgctcttaaaagtatgcacttgagacctctaagtagatgtttatttgtttatctctttccagggttcatgtgtttatcttgtttccttttgtatgcattttctgctttgcccctcacatagtaattcttggaagcaagtagatcattgtttccatttcagttgagatcactttaggggcatgtcttggacttgatgacagatcttccactatcttatgctccctacctcacatttattgagtacctactatgtaccaatccttaacatttgttattccagtttatcttccatcagtcctgttgaggtagatattgtgccccattttacagatgaggaaatcaaggttctgagagattagataatttctaggaacatacaaccaataaaagggaaaggaagagtctgagttcaaacccagttctttggtgctaggggtacagctgctgtctgtagggcatgccagatgacacctttttgactcttttggtaggaaatggggaggaatgcttgtcaccttagaaatgctgttcgaggttgctcacacctgtaatcccagaactttgggaggccgaggtgggtggattacaaggtcaggagttcgagaccagcctggccaacatggtgaaaccctgtctctactaaaaatacaaaaattagccgggcatggaagtgtacacctgtaatcccagctactcaggaggctgaggcaggataattgcttgaacctgggaggcggaggctgcagtaagctgagatcatgccactgccctccagcctgggcaacagaacgagactccatctcagaaaataaaaaaaaaagaaatgctggtatgtccaagtctgtgttcactcttatgttcatggttgttttacaaaagctgtatttagcaagcactcaatggcaagttatgccagcactgtgcttggcataacttggatatataggtgaatgaggcagccatacagagaaatatgacaagagtatgttttaaatgccccaaagaaggtttatggaaggtgctacaggaatgtggagctgggaaaataaccatcatttatatagcgctttatatgctgtctcttgcttttatatttgcccccattgtattgtctttctctctcacctttcctccacgtctcctcccctctccggaatttcaggatttggatgcatgtgtacatttaagatttgttctaaatacttgaaagcacgcttgcttgttagttacctgtccaaagcctgttgactgctgggccccagaggaacactagcatgtgcccttgccccgcctgtttctttgtatacaaacagtatacaaaacatagagaagagaactgacagatatttagatctatgggcttttatagaaaataagaattacttttcttctgtaaggtcagtgtttacaccttgtctgcttgctccatactcctctagagactaaaacacctcattgcttctcagaatcatttctgaaactgaggctagaaattacaacagagactctcttctcacctcttcaccagcatcccttgcctcttaaagtcactgaaagaatatcccccctcccccatggaggggtcataacacttttttgtctgtctattccaggaagctcgagtgctttacaacgctttacccagcatccctgggggcaggatcggtgcatgtagatgtttactgtgccaaccccttaaaaggccttctcttagcttagaccctcatctaacccagactaataataaaaagtccccaataactttgctgttatagatcttacagtgctcagagattggccctttaatatccatggttggcaaacatttctgtagagggattgtaggttattttgactctccttgtaagtgccagtttgtcttaagtggcctcaatcaaggaaacaagtagttcggctgcttcctctttatggcatccttttgatgaagcaccacttactttactttgcatattagggtcccaggatacatgggtacatgtatttttaatctatcaatcatttcatataacgttaagtagaactgatttaggaaattgcagaagtttcataaaaagatactctactaaaaagctttaagagagctattgattcccaaaaatagttgattgggccatagcatcaggtgtgctgatgcagaaccacatcgttgtgatttatttctgctgtctttgtgaggggatggaggacacaggcttctggaagaacatgtttataagtcttccttctcccagatggcgcttccagctaaggtcctgcagagttgcattctgccacccttcctggagcctgagagatgggcgaggagtgcaggtggtggtgttaggtggtggcatgtcaaggaggcaggcaggaaaaggcagactgatttttggtagcattagtctttcttctgtccttctctgcttttctttattctgaattttaagatttggatgcatgtgtacatttaagatttgttctaaatacacgaaagcacgcctgcttgttagaaggacatatttgagggaactaagtggtgttcggaggcacagtgacgattcgagagattctggaggacgcatgttgggtgttggtggttttccagttggtatcatagtgtcatattctcttcaattgtaggtttagctctttgggacccaaaaagacaagattagtcaggatagtgacatgcacttggcatgctgtggcttctgttgaggaaaaagtgacccaaatttgaacatccaacttcaattcttagtaattggcaatggctccttgcatctctttctgcttgactataaaactataaaatgctgctattaactttgaaggctgccacttacaaggctaggtgaacagacttttatattaacaactcagactaaccctgggaagcatctgtgctccctaacggagaagttgctttcacgtttttcacggtcaacctgggtggccctcaccatcaggagtgtggaatctcaagagtaacagcacaaaggggtggcaacttgaacccctgggttctagtcccaggtcagctgctaactgctgtatgaactcaaggaagtcatccaatgggatcatcttttgacaaaagaatcaggccattaatcaccaaggtcttttccacctctgaattctgtgatctctactcttgtaggtttcctccctaataatttctgtaggtctgctttttgaactatttcccttatttatcctttccttaaaatcaggtttgttctcattcttctggtcccacccacatccacatggctgttaaagaacacagtgaattgatgcagaaagatgtcccagatataggccgggcgtggtggctcatgcctgtgatcccagcactttgggaggccgaggcagatggatcatttgagggcaggggttcaagaccagcctgaccaatatggtgaaaccctgtctctactaaaaatacaaaaaattagctgggcgtggtggtgtgcacttgtagtcccagctactcgggaagctgagacaggagaattgcttgaacctgggaggtggaagttgtagtgagctgagattgacagagcgagactccatctcaaaagaaagaaagaaagaaagagagagagagagagagagagaaaggaaaggaaagaaagaaagaaagaaagaaagaaagaaagaaagaaagaaagaaagaaagaaagatgtcctagatatattgttgagtgaaaaaatatactaacagagaggcatgcctggtatgacctatttctgaaatgagaatgataatagtatcagtataggcctgcatcgttaatttgaagcagtttaagtcagatgtgtttctgaattcaggattttttcagttttacataggacaatgtattaaatacatttactattaaataacacctccagtgggggctggggtggcatctgtaatcaaaaacattaatacttctgtggcaaaacatggatattcacactaagtggggtaaataaagattacacattgccttatgtcagttcaggtaagattttgacaacaaatgttacaaaatttgtttgggttttgaaactttttgaatattgggattgtagataagagatcgtggtggacctgtatagccaaagtggggaaaaatctggaaaatgaagcatcgagcacttagcaatacttttcttgagtggagaagtagggtggaattatgggggactttcatttcccaagttatattctttactagtaagcatgtataattttataatcagaaaaaatgattaaagatacttatgagatataaagatttacataaagtagctggaaacatttaaccaatctgtagctgtttgagacttatttatattaggacaactaagacttgttttctcaatttttcaaacttttgtaatgtgattatatttcatacacacttaaaattttttgtaggtgatagtattgggaaaaacgaaaaggaatatgtgatcgtaattaaaatgtcagtggataaaaataaggcccttggagtaccctgtgggaaatcaggagccacttcctcctggatgctttatgtagcacattatactgacctattaaataatgagaatcaggctgggcatggtggctcatacctgtaaccccagcactttgggaggctgaggtgggaggatcacatgaggccaggagtttgggaccagcatggacaacatagcaagaccccatcgctacaaaaaaaataaaaatataaattagccaggcatggtggcacatgactgtggtcctagctacatgggacactgagacaggaggactgcttgagcccaggagtttatggttacagtgggctatgattgcaccgctacactccagcaggagcaacagagtgagaccctacctctgaaaaaataataataagaagaatcacatggatgaagcaaatgatgataaccaaaatataatgtatgggagatcactttataaagatgtaaggctatacaataatttaacgtgtttttgaagtaacattgcaattcctaaggggaccaaaatgaatggttggtcttaatgggctttgtctgaaaattgactggaacaattgcttccaaacagaagatacttggaatttcatatatggaatatagatgagatggttggcatttgaccatttaattttatcagtcaatataaaatgatctatattattcttaattttcacacttttccatatttctaatcctaatatactcatttgttgccttttcccacttaattgtataattgcagttcccatgttgcttataatagctgcataatatttcagtcactggtttacataatttaccatcttcttattgctgtttctatttgtgtgtgtgtgtgtgtgtgtgtgtgtgtgttacaaataacacttccgtacctatagctgtttctttttcttttcctttttttccccctatatttaggggttgttttcttagggaatatttttttctgaatgcgtgaggaacttaaagtttattctataagcatttattcagcatctactgtgtacagggccctggagatacagagatgaattttagaacctgtgcacaagctgtctccatttcctggactctcttcctccctctcccttcacctgacgaattctccatttaaatcccactttgccaatgaggcctttatgtattccccagagtattttaggcttttctgtactttttcttctcatttagtcacagttatattgtgtacatctcagaataactaagattacttcatttttgccttcctcattagactattaaacagtaaactctgagaacaggttttatgtctgatttattttccttggtaccctcagtacctgggacattatgtctggcatataccaggcacagaaattcaaatgagtacttgcataaatgaattagatgaacaaatatttgaatatgattcttgccttgagaaatttagattagaactgaaaaatggattcaatggataatttcgatgatgtgtaagtgctttatagaaaatagaaaataaaccttttcctagctattatcttttcctcctttacagtgaatcccttggaagaggattcaattccagcaagtcatttaatgtcttacttttgcccatactctgcagcagaaatgggcttgtcttattttctgctaaaactgttgcttttctatgcaaatcctactttatttctcattgcactgaacaccattatcattcacctttttcacttctttttgacatgttggttatctttgttttttttttcttattattaaaaatcctgtttcttcagcatcccctttttcctggtcttatctgatagctgtacctattctgctgtttatgaccttttaaaaactgttagctccttgagggaagggatagtgtgatcttttggtaggagactttaaaagatccactttcttatattttagtgtatcccttgggtcaaatggaggatttttttttaaaggatgatcatcaaataaatattttaagtaatttgaccaaaatttatcttcttacctttttactaaaaatatacactaaataattttaagggaagattttatagtctcatattcaacatggaaatttcttgattagtattgccctgactttattggttgcttcacgggtggcttctgaattcatttcttggaatgttactattcagggccaactttgttagtattgctacgttgtgatttaattttttgccacttacacattctagccagtctggaagttctccaccaaaacacctgtatagttcagtctgaatttagaagtgtcacttgcaagagaggcagcaacgtcaggcccgtgagactcaagagaagtctctttccatgatagatcttcttatacttggtagaaactggcaagtgactcaccaggggtggaagcctggaaaacagcctgccgaggagggtagtctttctggtaacacatcgccacccctttgaagcatccagagaaccggaagagcaggaactgcctgtcagactgactgagcgcttggcattctttcatggaaagatgacaactcatccagggtgaaagaggaagtggaggggggtggcagggaacaggagggtgaccttacatttccattgttttgcaggctgcctggtcgagtgcagtgggttgtttgggggttgggaggaattggaatcatgtacttctattgttgctgtccaaagtggatgtcctgtgctgtgttgccaaggaggggagcttgtacccattttatccttgtgctccttcgtaatccagatggtttgtgatctgatatttctttcgtgcttagccctggactctatcggttagaatcctagtatcattttaagaactgggattctcctatgccaaatttctgtgaaatctgagagccaacagaccgacatatttttccgggctatctctggctttgacaatggcatattttgagtgtcagttgatttttgtctcagtttattggcttaagtagtaagagtcaagggattgaactgcagcagtagtgttattttgataatttattaagtgttgtcttgggagatcttggggggaaaaagagtttagtttagttctttcttataggaaattttgttttgttttgtttttgagatggagtctccttctgtcacccaggctggagtgtggtggcatgatctcagctcactgcaacctctgcctcccaggttcaaacgattctcctgcctcagcctcccaagtaggtgggatgacaggcacctaccaccacgcctggctaatttttgtatttttagttgagacagggtttcgccatgttggccaggcttgtctcgaactcctgacttcaggtgatctgcccgcctcagcctcccaaagtgctgggattataggcatgagccaccacacctggccttatttagttctttcttactatggctagaaccctcccaagagtaaaataaagacttcagtggacaaccagtggtgagttcactttctagagaatggcaagtcatcggaacactggtcagtactcccaattctatggcatatctgcacatctgccatctttggtcagcaaccctccaggactgccttcttcacacctgtgcgtgaacttccaagctatactgggcaggttggtgctgcccgtttctcccatgctatttaacgattactccatgcagttactgttcttcttaaggcctctccacccgcctcactcttttaacatatgactttgtatctgactttactaagcaacttgaaacttcttagaatgagctcctccatttcctgtcctgatgcctgcaaacttatgtgtagtcacagttatcttcatctggttttctccaggggtatcccatctgctcctgcatcctcctaggccttgctctgttagtcattgtccctccctctctttctaattttcagccacgtttatttactgtctgtttctccctccaatgtgttactgtctctttctccttggctgtcaaatgttctctgcgtttcccatttttgtgcttctcgtacctactaatgacttacctatttgtcaactccagtggacacgctatagtccttatctttctggagcttcttcttgtatttaacccaacatatccactctcttctctagaagagtttttagcttctgcaaccgtccatgcttctgttctcttgctgcctctatgtcttgtatctccttggtgggcttctcttcctttgtccacctgttactgttggagtttagttctgggagtgttgcttttctctcctcatatatactctggccttgggacttcatctgctctctaggttttcactctctgtgtgccagtgattcccatgtctctgccttgcactgcctggtgaccagattctgctggttgtcatgtgagtatctgaaagcctccttaaattttccaggagctgaatgcatgaccatttctcctaaacctccccttcttttctgaatttagagaccatattatatatggtggttaagattagggctctggaatcagatttggatttgaattggggctctgatacttcctggatgtttgagcttgaacaagtcacttaattccctgaccctcagtgtctttctttttaaaatggggataaaaatactatccatctcagaaattcttatgaggtagattgtaatgcatttgtacagtgcctggctcagaataagactggaataaatgttagctgctgctgttctctttcagtttccctcatccacggagacatccaagccagaaacctgggagtcatctctaatgccattttcctttagctccttaatgcctgttttctttagcttccatacatagccagttacccagtgtggctgatttctaatcactgtttacttcttccttctggacatttctgagttttcctttctcttgattcccattaccactacctgtgtgaggcctttatccttactttccaagatgaagccacagcctcctgcctcctttatgttcctgtgatcctccctccagtgtgttaccaggctgcctctctgtgtctaacagggtttccaccctggttgaagccctcttgtgatgctccattatatgcaaatcaaaggccaatctccttagcatggtattcctgggtgtcctcctggcccttggtggcattctagcctcccttttaccacttcctgattccggcttcatccttgagcaacacagtcttgctgtgttccctgtgcaggccctgctctttaggctctttcccacctttgttagcgacactgcttggaatgctcccttccctgcttttgacttagtaactcctcatcctgaggactcagctcagctgtcacctcctccaggaagccttctctgacccttccaggataagttaggtaatcttccatagagtcctgtcattctctgtgcccatgatgcacttaccacgttggatcataatctatttatgtgtctttcctcccagcctcagtcctgaagggcagaaaccatgtgtcattccacctcatatttttgtgcctagctggatgcttgacatgtagtaagtgctcatgaaatgtttgttcattgaataactgaattcaagaaccagtagacctcaggatgaccctggtttcctgtttctgtggaccacaatgctctggggcagtgctgcgtatcagaggttcaagccatggctggagcagccacccctgaagtagacaccctaatatccttcccactgagttcctagttctacatgctggagtgaggctgtcaactctgaagtgtcagagtgtgtctgaaaatgattgctgtgaaaaataaaatatttcacattgcaggcctcatttttaagttatttttcccagagaacattttcatattttagaacttatggtaatgttaacactttctatttgcataagcacttccctgttgggagatactgcaggtgtaagtttttctgaggagtgtcataccaccatggaactattttccatcgatctggagatagggaacttcttgtatactctgagagagaacttctttgagatgtaaactagactgacctactttagaggctgcctgtatcctaattttctgttttaaaagagtgatggctgaacactgaaaagctcgggacattttagaactgtgctgcccaatatggtggccactagccatatgtggctatttaagtttaaattgaattaaaataaaatgaagtggaaaaaattaagttcatcaattatattagccacatgtaactgatgactagtggctacctaccatatatagaacatttctattattgcacattattctactggacaatgctgttttaggatgtagaagtcctgatggataatatcaaagccaccttaccacagacagagttttacagagctgtgaagtaattcttactgggaacaccagatacttacttaccattttatatagcgtatgtggcattctctcatcttatcattagagcatgcctgtatctttagcgacaatagcattcaaacaccaaatgttatattgtctgtctggaaatgttttcttatacaactcaaaggggaagagaggaatatgtcgtgagtaaatggaattatttttctctgcaccacatcattataaaaactcgaagaggttgggtgcagtggctcacgcccatgatcccagcactttgggaggccaaggcaggtggatcacttgaggtcaggagatcaagaccagcctggccaacatggtgaaatgctgtctctactaaaaatataaaaattagacgggcatggtggtgggcgcctgtaatcccagctactcgggaggctgagccatgagaatcatttgaacatgggaggcggaggttgcagggagccgaagtcgcgccactgcactccagcctgggtgtcagagtgagactccatctcaaaaaaaaagaaaaaagaaaaaagaaaaactcgaagaggctaaaacgtatcctggaactaaatatttacatttcttaaagccatgtgtgttttctttggatgaaaggataacaaatgatttgtatcgttggataatataaaaacacttcaaaaagttaaaattgaaagaaaggcaggatcttctacttttctttattttcctccccagttacccaacccacttggcttccaggagcctgagaagttgaagaagtaaacagaggtttagttcagctgttaaccatgctaggaagttctagctatctggtaataccatggaactcaccagaatctttcatcatggaccagctgctttttacacttggataccagtaccctagatggtgggagagactggaaggatcgttcaggtcaggggtgatggacttctgcagtccctctcacatacactgttcaagttacctacagtagctacgcacggaaagtagggtgtgagtcattccatgattgacaaccccagtggaccacaggtgactcccacctgggtggcttcgggaactcagttcagaggctgcagcaggtgggatattttttggattatggagagctgtttgatttcacatcagtgggttcttccctcaaccttgttcagatcagtgcctgagtaagttctaatatattaaccttttctgagagaagagatgtgaggatgagggtggagggtgtgaatcttgttttttcaccatcctgttactcttctgcatgcggtgtccccttactgaggaacagaatagaggagctgtaagttggggtatagtgtggcaaggtttgtgagagacttaagaacaaagggtgtttatcataggtaattatcacagtgttgttagagtgtaggcagagcagctttctaaccaacattacaagtttattttgctagtgaaaccttttatttaccaatgaagcattagaatttcagagagttaattgtttgtgaactttgttcatggtctttctgaaactttcaactctctgtttagttacaataaggctcattttatagcctttattgtcctcttttgagaagaggcagtataggtagataggaacatgggcttgggatcagatagactgggaatagaaatccatgcctgacgcttggacaaattgtttaaacttctgaatgttaatttcttaaccagtaaaatgggaataataatgcttaccttacaggcaaggggacaatttctttgtgtggaataaaaaaaggaaggtaagctgactcattttcagaaagatctttaaaaattaataaacatgccatattccttaatcttatttatgattacatttggtttatttaagttttaccatgcatatctacttagtgttatcaaactataaggaggaagggctcttggtaaaatcagtgagataatctcagagtctgtgctcttaggaaattaataaaaaaattaaatctgataaaaaagatctgttttaatagcaaattcctttttaagactaattgctgtattatctaaaaggaaacaagctgagtgcagtggcccatgcctgtaatccaaacacttcgggaggctgaagcgggaggattgcttgagctcaggagtctgagaccaccctggtcatcatagcgatatttcatctctatgtttttatgttaaaaaaatagctaagtgtggtgctatgtacctgtagtcccagctacttgggaggcagaagagggaggatagctttgagcccaggaattcgaggttacagtgagccaagattacatcactgcattccagactgggcgacagagtggcatcttgtcttaaaaaaaaaaaaaaaaaaaggaaacaaggggccaagggaaatggggagactaggaaattcaaaggattatttattggcaaacagcaaaacccttgattatttgaatgttttgctattttgagtaatgttatttactgattacagtgcagtctgagtaataacaaatccatcatccagagagtttttgaggctagaccactcagttttgactgttcacatacattattacatatttgtaaaagttgagtttcatgtgactgacacagaagaggtggagtaatcaaatgttcctctctaggatactatgcagtgatcataaggaaaggaaatgaaggttcccttttccctaatgcctatattgctcaggccagcactcctgaagatgcttgttctgttgaagctccataatgtgtcgatgaccctctttgcatctgaggctgggttaatccccagaggtacaaagacaagtcagggatggcatctgtcttggagatgaggttatcctgaaggggatgtggacattggcacaggggatgccagtatcaaatgattggtgttgaacagggagctgggagatcatagaaaacagcctcttccctcatgtgagaagaagggaggttagggcaagacttcctggagaagtcgcctagacggagtcttgaacaatgggtaggacttagatgatgaacgggtgagagagaaggaggaaggcattgtaggctaagggaacagcatgagtgtcagtgcattaaacagtctgtgtatgcttgcaagggcaagcctttccatgtcaatagcatataaagcataagggtgggaatcaaggactataaaggggtagttgggggcccagccatgaaaagccaagtatactctatgaaggcttagagcatatgcttctagctgatggggaactgttgaaaaattttaagcaggggtgtaaatggccagattttcctggtttgctatggcagctcattgagtcatagatttgtggctggatagcaggaaccgatcatgataggctcaatgtgagatgatgaatatgtgtaagaaagcagtgaaagtcagggctggagaggagaagatgggtttgagaagtacacaagatttggagttgatacaattttgatcaactggctacggggagtggatgagatggaagagaccagaatgacacttgaagttctggtggccattttgaacctggggaatataggaggaagaatgggtatgtaggggccaaggtaatatactgattttaaaaagtgtccatctggcaattgaatgtgagtctgacgctctgggaagatggcgtctggagatgggaatctgggagccatcacctagaggtggtagttagagccatgtgagtaggttggtgcccaaagagaactctgaggatgaagaaggcaacgggcaggggatggagtccaagggaacaccagacagaagtggagggatggagggaagaggaaatttctagaaaagactcagaagaatgggtctggaggtagaatctgtggtgtcacagaagctggggcaggggacagttttatttttaataaaaattttttacatatatatgtaaaaatatgtaaatatataaaattttatatatatacgtgtgcatgtgtgtgtatatgtgtgtgtgtatatatatatttgtgtgtatatatatatttgtatatatataatatatatatatatatttgtgtgtatatatataaataaattgcccaggctggttttgaactcctggcctcaggcgatcctcctgccttggcctcccaaagtgctgggattataggtgtgaactaccatgcctggcctggagacacttttaggagatttatagctgagatagctaacccaagtcacccttagtatttgatgaagtagcaggcaagatagaatgggattgggaacttgaagagaatggagactgtttggaatatcccagtcactgaaggaaatgggagatgagatgattgaggaaaagtaaaagaagtgtgaagagatgctgaggctcagctgagattagaaactgaatttacagtggcccaagtgtgtgtggctccccagcctgtgtgtcagaggcagcagatactgagactggtccagggtggatttttaccagtcagatgtggcagaaagaaggtgtgaggacgtgtgtatgtgtttgcagggggtgcttttaagaataggaatggccaggtgtggtggttcacacctgtaatcctagcactttgggaggctgtggctggtgaattgctggagcctcaggagttcgagagaccagcctgggcaacatggtgaaaccccatctctaccaaaaagtacaaaaacttagccaggtatggtggtgtgtgcctgtagtcccaggtactagggaggctgaagtgggaggatcacctgagcccagggaggtccaggctgcagtgagccatgattgcaccattgcgctccagctcgggcaacagggtgagaccctgtctcaaaaaacaattaaaaataaaaataaggaacaggaaggagtgtggctaggagggacctaagaggatagaaggaagcagttcgtagacctggatggcttgtatggttaaaaagcagatgtaatagaagggcaggaggcggtagggtgatgtagtctccaaggtagagcagtttgagggagtggccatgggaatggctgagagaagtggcctggaagtgaaggccagtgaggtagaggatagcccacagggaaacctttgtagaaatgggacttttattccacttgtaagattcacactgaattatagcattggatgtgtagaataagaaacttcattttggtgtttgagaacacagtagataggtgtgtgtcctaaatgttttgagccatatgcaggggcaggtataggatagtgtatctgaagatgctgttgggattctattgtcatttatttatgatgtggtaaaaagtctgactttgtgtctctttaaaggaaagttttgacaatgaatataacttataataatacttttatgtatttacacttttcaaagtcatttcataatgtttgctattcagtttagtttagtggctctgggtaatctatttaaagtccattttcagtttgttagtttctgtagactacaagtgtagagggaaaatgtatttcacgtatttcactgggtaagagaatggattattagcaagaacttaaatctaaaatttaagcagtttctagtgctgagggacacgatagatttatgctgaattgtatatttctgtatttgatttttttttaaactgcaggcatctgtgtcttccaaggtgagaaaaaacgttaaaacatatcatgtattttctggcctcctactatgtaccaggtggtatgaggacataaagaggcagaagatacgattcttgcccctagatagcttcacatttagctgaagaaacaagacataaacacaggaaaagttagctaatcatgcagggtttaaatagcaaggcatgacatgactaatggggagatgcattgtttaggcagtaattcctacaggagttcagaagaaagagattattttaggctgtgacagtaaaggaagggtgtaaagacttaaaaggagaaaagagaaaaggcttatgtagaggaactgaaacttgggaatgactgaagccttgttctaccacttatgccttaccttgtgcctcaatttcccaatctgtataacataatgatgatgtgttacctcccagactgtcagaagatgagacagtgattgcagaaaagctctttgcaaataatgcctggtccctccatactgtgtagacagtaaaaatcgtacactttttgaaagtctttgaaaatttaggttactagggtataatttctgtcgttcaagtttgccaagtaggattttttaaattagcatattgccagaagtttgactttcttctttttcccagtaaggagagatttgtaagactctgaaaaaattttaagcaagcaattagacacattattactttgggaaaattgcttttatggccaggcatccttttctgtttctttatttccttgagcaaagataatgattgataaggaagtaaaactagaaagaagccagatccaaacttagaaggaaaatattttgtcacgtatggaagttcagtggaggttgcaggttggctgatgaccactttgggtgaacccagcctgacactcagcattttggagatgatagtctcagagttcacaggtttcctgtgtataaggaaatggatgtcggtcatttcaactgtactgttaattgctttgggaaaatgagtggtattcattaggcaaggaagcttgtagccagccctgtaattaatgtgaaaccttttcatacagccagtggctcttcagcatctctgtactttatgtttatgtgtatacttaggcttgcttcagtggccagaggcttcaaggcattcagggctctgggggctcttattataatggtaatgaaaattggaccctagaactttggacctccccagccttaaatccactgagaggagctctctgtctagggatgtggctccttctgctggcttcttcccttctctaagatagcagtgagatgcactaaacatgagatttctaaaacaaatacttcgatgagtaggaaagtctgttttcctgaatatatccactttcctacatattccattgcttgtggaagcaatgacccaagggttatatgcaggactttttcttactttggcagactggagacccagagctcagagaaggcagaaagtgtgttaaagaacaataggaaaagtggtgagagacaggcagatgaaggaagcatgaactaccatcacagagaaagggtagagtcagcaggtaattctcaaagggatgtgcatctgcccctaacccaatctaaatgcctgactcaatgtcctcagaggacacgaaccctggaaaacaagtatgagatgatactactcaggtattgcgtgtgtgtgtgtgtatgtgtgtgtgtgtgtgtgtgtgtgtcagaggtcagccctgatgtaattgccaccgaggtcaccgtggatgaggtcattgtgggtgaggttacagtgcaagagctgtcttttggtgctgttctggtcttgtgatttccctattttcagcacccagtaggtaggtgctcaataaatgtttgttggaggaatgggtgctggggccagccccctaactctggcctctgttggacgttttgtgacctggaatcattctagaaggaaagagactgcccagagtggatttgtgtcctgcttgtgactttcttggtaacaactacaatgaatatgctccccaggctcttaatctggagaactcctttttttttttttttttttaaacagtctcgctctttcacccaggctggagtgcagtggcgcaatctcggctcactgcaagctccgcctcccaggttcacgccattctcctgcctcagccttccaagtagctgggactacaggagcccaccaccacgcccggctaattttttgtatttttagtagagacggggtttcaccttgctaaccaggatggtctcgacctcctgacctcgtgatccgcctgccttagcctcccaaagtgctgggattacaggcgtgagccaccgcgcccagcctggagagctcttgatctgtaggtgaatcttagtatgagggccttggaggagcttccaagtgtctgagagcctcatgaaatgggatgcaaagttaggaatttctaaggagaaagtcagaggagcctctgattcccagccggctgctaagcccttccttaaccaaggttcaccctcccatgttgcctgctgggctgccttacagcagcctctagttccaacatctgctgtagatttctgacactcacagtctacccttcacctcttctctggctattaccagtacttcctcactatccctagtcatgggaaaaaaaaaaaagagaaccgtgtccccaagatgatcttgcctttgagccttgtgtgtttcctgacagggaaaaggccctgtactgccatgtcctcccctctggctgcttcatgccgggtcttctgcctaatacctgacacaaggagactcctccagactgaactgcgaggaaaggctttacaggcagaacaggctctgcagagttgctgctcagtaggccaggggtcagcagacttcatgctgtgtgccttaggccacatgagtgatcctcctgtagatatttcccatcagtgaaaacagagctggcactgatcacctcctctcttacagactgcggagctaaagtgggctgctggttggaatgtgctgtgaaagttggaatgtttttgcaaattttattttattttttgaatttgaagtagaaagctgtttgattataaatggtgacttttcccttctaaaatcatttaaaatttttgtaccctttgaaaatgacatttaattataggcactcaaagtgcagttgacaattattgttatttttggggaattgtttaaaggatgttcattcatgcatgcatttttttcattatttacttattcagaaagatgtggaagtctaatatgtgccaggcactgggaaacagtgatcctgctgctcatatttccattctacacccaagctgtgtacttggtcatgtggcttggatctttgtaaatctcctttaccctctttgccctgaagaacgttattagaacttggtatgcaaaatacaccattggctgattgttggaatacttttgagcaggtttgtaaccactttcagtggatgctgtgtgaagacccactaaagcagtggttctcaaggtgtagcttgcatcagtatcaccgggagggtttgttaaaacagcttgctggacccccatgcccagattctgtttcagtccctgactgcatttctaacaagttcccaggggatacttatgctgctggtcttggggatcacactttgagaacctctgcattagagacatttctttagacctaagggctttgaagtctcttctcctgagaaattggtgtggtttcattagggtttatcgtgaaccttgtttgtgaacctggttttctttttgtttgctttgcttcgcgtcagaaattcagattcaaatttgtagctcaactttaagaaaattttaacagttacatcttaacttttcccagccttgatttcctatttcattttccccattctgattttacatgtttacacaatataagttcctgtatactgactgttttgtggaatgtagtatatattgagaaatatgattgcagtcagtgttcttttcttggacatttgtctttcgaatcaactctaaagtattacatgttttgactgtttaatgcattagttatgggagtagattccccagaagaattatattattaatagcaactaaccaaaggattggaaagaaaaaattgggaagaaagtgacagaaagttcttggtaaaaaacagaactttatttttaaactattgatgcatagatagtatctacaagcagtaatacatatgcatatatctgtatgtttatatgtgtatatatatgtgtgtatgtatggttttttatttttatttttatttctttttgagacagagtcttgctctgtcacccaggttggagtgcagtggcgtgatctccgcctcccaggttcaagcgattctcctgtctcagcctcccaagtaattgggattacaggcgcccatcaccacacctggctaatttttgtatttttagtagagacaaggtttcaccatgttgctcaggctgcctcgaactcctgacctcaagtgatccgcctgcctcggcctcccaaagcgttgggattacaggcgtgagccaccgcacccggccatgtgtgttcttttaaaaactgagaaccctaatacataaacaatatactttctttggttgttggagaaaaagcgaagggatgaggtggtgatgagaacagtgaaggcaaactacagtggttgcccaactttactggagtcacctggagtttgttaagtgcgatgccagtttgctaggcctgggggtggggcctgcatttgtaataagtgtatcaggaaattctgacccacgagaggtgggagaggtttagcactgggtagaaaaatgaaaggcccaatctgtattaaacctgctccaaatctttgtatccatttttggatgaggagttcctgttcagattttctgcaacttttcctgaaatcagagtgtaatgggcacaatatcattcatattagtcagtcttagctccagaaagtactcattatgttagatgttcattggaagtagtttgtagctgatttttttctctttcttcgctctctgtatttctgtcttctacttctgtttttagttgaagagaagatactttaccaacagcttgtctgaaaacaatttgcagataggagtactcatagaaaactcttggggttctcactgtgggtcttctccaggggtgtggataacaccaaacactgcagtatggaaactagcgcaaaatgggatgtgctgtgacactggccagctggagacagttgggacaggggatgacttaacgttaacatgggaatgttacatacacagtctagaaaggccagatattcttttgcactgctgcctctggctctcttttcatctatttagtgaataaccaaatttatcacctgtagtaatcagttactaatttagaatttaatttctttaagagttacctggatttagggctcagtgaaggcagtttttatttaaaagcattttcttgaataaacattttagaacagttttagtattacagagaaactgtgaagatagtgcagagaattcccatatacccaacagtcagttttctgtattattaatgtcttaggttagtatgctacattgtcacagctaatgaatcaataatgatacattattactaattaaacttcatagtttatcagatttccttagattttacctactgttccatttctgtgttaggatcccattcaagataccacatcatgtttatatgtctgcttaggttcttctagtctgtgacagtttctcagactttccttggttttggtgagcttgacagcttgacaagtcctcgtcaggtattttatagaatgtccttcaaattgggtttgtctaatgtttttcctgtggttcaagggttttgggaggaagaccacacaggcaggcatagtaccacatttcattccatcatgtcatatcaattgcataattagcttttacatgcatacatgctatcaaaacgacctatcactgttgatgtgaaccttgattgcatggctaaaattatgtttgtcagatttctcacataaagttcctcttccccttctttccatactgtactcttgggaaggaagtcactgtacatagctcacactttagttgtggagaattatgctctacctccctgagggaggtagtatttagagaaattattgggaattcctctgcttgggagatttgtctattctcccccatttatttattctatcatttatttgtatcagtatggactcatgcatattttatattttaggttataatctaatatcacatgattgtgctcctcaaattgtttcagatttggtttttgggagctgtttcaataggctcctgtgtccctttgtgacatgccacccatcctggtgggtttttgttgttgcatgtgtgctttttaaaatcacatccttattctttctggcactaaaagatgcccctggctcactttgtatattctttgccccatccctagaatcagttatttctccagggaccctggttccttttgttggagaatggttttagaaaccaagttctgggcactgcgtgtccttgttgctactgaggtgtcattgcttttaggtctgttcagctgacggaacagagaaataggtgtatactcacccttgtatatacacatatctgtaaatatttctatatgtatccatctgtatctatattaagttgaacatgagttcatgctaatgttttcaactccgatacagtgttacagacctttttttactagcctttctcccttgtctgcaaactcctgctctaacagtgaaaaactggttcctaccacccaccatccatttacttacatgtatagtggtttcagaattgttaacttgtatcccttatgagaaagaactttattggctagagttcagtggttatgtgaaattcgttatgtaaaattcattttgcccttagatctagagtccatactcatttctgaaggtccttaagccagcatcttttccctcacttctttcagtgaggttatttcatgcattttgatacagttgattctcatgtcatagtctgcatttcatattccaccccaggatctcttgataccctaactttttaaattgcatatattcaagttctgtgtgctataaagttctatgggttttaacaaatgcttagtgttctctgtctaccattatagtatcatagagaacaatttcactgccctaaaaaaaattctctgataggcctcaactcatcatttggcttaacagtcctgctgagagagtcctgccagttgcatctgagagacagtcctgccagttgcacctgctgagagagtccttcagttgcatctgaaaccagtctggtttttaattttacctgatgttcagaaaatgctctcaggctgtcaccgggctgaagaactagttgggttgtagctgtggctgtgaatctggttcccaagaactggctgtattagtctgttctcacactgctataaagaactacttgagactgggtaatctatgaagaaagaggtttaatggactcacagttccacaggctgtacagaagcatgactgggaggcctcaggaaacttataatcatggtggaaggcaaaggggaagcaagcagcatgacggagcagggtagaaagagaaagggagagtaaaggggaaagtgccacacactttcaaccaaccagatgtcatgagaactcactatcatgagaacagcaagggggaagtctgcttccatgattcaataacttcccagcagcccctcccctgacaggtggagttacaatttgagatgagtggggacacagagccagaccatatcattccgcccctggcccctcccaaatctcatgtccttctcaaccaattatgcccttcccaacagtcccccaaagtcttcgtttttgtttttgtttttgagacagagcatcagtctgtcacccaggctggagtgcagtggtgtgatcttggctcactgaaacctctgcctcgcaggttcaagcaattcttctgcctcagcctcctgagtagttgggactacaggcatgcgccaccatgcccagctaatttttttgtatttttagtagagatgggattttgccatgttggccaggctggtcgcaaactcctgacctcaagtgatctgcctgccttggcctcccaaagtgctgggattacaggcatgagccaccatgcttggcctgtccaccaaagtatgaactcattgcagcattaatgagtccgcaatccaaagtctcatctgagacaaaggcaagtcccttccacctatgagcctgtaaaatcaaaaacaagttagttacttctaagatgcaatgggggtacaggcattgggtaaatgctcccactgcaaaagggagaaattggccaaaacaatggggctacaggccccatgcaagtccaaaacccagcagggtagtcattaaatcttaaagctccaaagtaatctcctttgactccatgtctcacatccagggcacaccgatgcaaggggtgggctccgaatgtcttgggcagttctactctgtgcctatgcagggtacagcccctgcgactgctttcgtggcgttgagtgcctgtggcttttccaggtgcaagatgcaagctgtcagtggatctaccattctggggtctggaggacaatgtctgtcttcccacagctccactaggtagtgccccaatggggactctgtgtgggggtttcagccccacatttcccctttgcagtgccctcatagaggttcaccatgagggctccatccctgcagcagacttctgcctggacgtccagatgtttccatacctcttctgaaatctaggtggaggctcctaaacctcaactcttgccttctgtacacccacaggcccaacactatatagaagttgccaaggcttgaggcttgcaccctctgaagccacagcccgagctgtacattggccccttttagccatggttgaagctggagtggctgggacacaggatgtcaggtctcaaggctgtacagagcagtgagggccctaggcttggcccccagaacaatttttctcttctaggcctcccagtctgtgatgagaaggggtactgtgaagatcttggaaatgccctggagatcttcccattatcttgcctattaacatttggctccttgttgctgatgcaaattcctgcagctggcttgaatttctccccagaaaatgggtttttcttttctactgcatggttgtactgcaaattttccaaacttgtatgctgtgcttcccttttaaatgtaagttccaatttcacaccatccctttcttcactcatatgagtgtacactttgagaaacagccaggccacatcttgaatgctttgctggtgaggaatttctactgccagttaccctaaattatctctctcaagtttagagttccacagatctctagggcagggccaaatgccaccagtctctttgctaaaacataggaagagtgacctttactccagtccagtaagttcctcagtctccatctgagaccacctcagcttggacttcattgtccatatcgctatcagcattttggtctcaaccattgaacaaatactaggaagttacaagctttcccatatctccctgtcttctgagccctccaaactgttccaacctctacctgttacccatttccaaagttgctaccatacttttcagatatctttatagcagtaccccactcttggtaccaattttctgtattagtctattctcacactgttatacagaactacgtgagactgggtaattcatgaagaaaataggtttaattgactcagatttctgcaggctgtacaacagcatggctaggaggtgagggggaagcaagcacgtcttatcatggcagagcagagagagagagagtgaagggggaagtgccacacactttcaaacaaccagatctcgtgagaactcactgactatcatgagaacagcaaaggggaagtctgcctccatgattcagtcacctcccagcaggccccttccccaacatgactggattacaattcgagatgagatttaggtgtgaacacagagccaaaccataccacgggcaaaaattgattttataagaagtgagagaatgagacaggtgaatattttgaaggcttgtgtggcaaatattcattagccaggtttattaaaaactcagctacttgggaggctgaggcaggagaatcacttgaacccgggaggtagaggttgcagtgagccaagatcatgccactgcactccagcctgggcaacaagagtgaaattctgtctcaaaaaaaaaaaaaaaaagctcataaatacattaagattttattcacagtgtggtgggtgtggtactcaaggcctttaatgggattttaataatccaaacctaattcagtctccagatgactgtgcaatataatggagataatgctgctttacttttccttactcagaaggtggttgtgaaggtctgctcagggtagccagcgtgcctttcccaacacccttctttctgttttgctggttctgctttctctcattctctaaacatggctttggtccttgattctttgctctttgaactgtacaattgttccttgagggtcagtcagctgtcttgtggttcagttattcctgtgtggatgactctacctgcagcccagccctttattttaagtttcaggtcccatttatctttttgtcacacatttctaatctccctacaaatcagtatttttaaaaaccagagtcatcccaaaccaactgaccctctagattgccttacttcttgcagatttagtcttaccgtcttccagatactacagctgcctttgggcttttcatcatcccttatccttagccaccaagtcctgctgagcttcttttgtaatacttctctcctgcctcctccactgcacacttgtaccactgagacagtctcttaattctgcccagcacctccagccccatctacacccctctagtttgtcctccagcatgttgttttaggactgttgctagcctaattatttgaaatgaaatttcagttcttaacttggcatccaaacctttcgtccattgcatttctagctttaccttctaatttctagctttaccttctaattcacttaaatgagatacaatttaattaaaccatgtattccttgcagcttctgtgctgttttccacatctgtctctttccccatgttggcagggtaaattttagaggtgtaatgaaatttgcaggtggaagttatggggatatagattgtctttagcttaatgtaaggatgacctttccaacagaattgctaatgatggggtgggtatcatggaagaagtctacctgtcatctcccaggtcatctactgtcatctcccctttaaagacctcatcttccatatctgcacatttggcttctcctctcttttgaagctgcttgtttccatgtcccatgatgctaaacttggggactcctcccacctctcagattgtattttctctggttctttctttcactcctttagtgaatttgctttttcttttcttcttttcctgtgctctttcttgaaaaatttcactgctcttagacttagtgtttaccttttgagaaaaattcccaaatgataaccccagccgtatgtttaactacatgatttgtctttatttccaacatcttgccagatatttctatttgagtacttttgtgtccaaatttaaactcatttctttccctttaaaacatgttctttccctgagttccctggctgattagtggcaacagagatgggcagatctttctgtaaagggccagagagtaatatttttgtcttcatgggccataaggtctcaatcacagctactcatcttgtagataatatgtaactaaagggttgtgactgtgtttcagtaaaactttacttatcaaaataggcagcagctggcattggcctttgggctgctgtttgctgaccctgatctaggatacccaggccccaaactccatactcctttggcctttccactgcttttgtttgctctcttcacatgattattaattttcactgatttcacccttagcaaaccattcatacttctagaccatagctgtctgtctattcattcatctagtagacaaaatcttccttttacatgttaatctctatcattttacataatcaaaaacctctagtggctccccttggcctgcaatctaaggttacagttctctgggtgtagctctttctgtgttttgcctccagccttctctcttactcctgtatggacattcctccaatgacactgatcaagtgtgtgttctgatattagttctatcacttctcacaggttgctcctgactcagaatggtctcacttcccactaattgaaacttgccttcaggcctcaattcagggtctcacttcccaggtaaagcttcgccctagcccagtgattgctcctctcctagggctttttttttctttttctttttctttttttttttttgagacagcatctctctctgtcacttaggctggaatgaagtggtgtgatcactgcagcctccaactccagggctcaggtgatcctcctgtttcagcctcccaagtagctgggattacaagcatgtaccaccacatctggctaattttttttatagagatggggtcttattttgttgcttaggctgttctggagctctggcctcaagtgatcttcctatcttggcctcccaaaatactgagattacagatgtgagccgccacacccagcactgaatagtgcttttgatgttgccactgacctattcagttgagaccgcattgggttgtaatttgtggtgttcctccctctccatctgaattttcagaagctgttaaggacagcccagtagatgctcagatgtcataggtaaaggtcatacattgaactctttgtctttcctccagttctgcttcccccttggagtccctgtctcagttaatggcaccagggatcatcattgccttgtgattctgactccttctctttcacctccaccctacctgcatcagttacgaaaagtccagctgctgctccctcctatgtctttctcctatctgccctctcctctccatcccttctactgctgccttagctcaggtcaccactgtctttcactcagaccattggacttgccttgaacatgaattcccaccaccagcttctctcctcttataatcccaacagttatgtatcgggatctgacatgtaggtatgaccttgtaactttcctgattgaaacccctcagtggctccccattgccctgggataaggaccagcctgccagcatgtcgtgaggccattattgattggatgcactttcctctgcagtcctatttctgacttgtctcatttacacagcttacatttgatcatctgtaacccctatacatcttctgtgcatttgcacactccccgtctctgtgtagatgccccccctccccaggtccacttggaaaaccatcacctgaatttctaggcattgtacaaacgttccctcttttgtggagctttcgtctccttccctccagaagaccaagaggagtaaaggtgttatcatagaataactgttgggatagagatataggcttcatctattttctaatgcctcctcagattcagagtcttccaaagtttccctgcagactgagcaatgaataattaagcaaacaagtctctaaaacatcttgaaatgcttatgtatgctaaatatgtagttttgagttcttgttttggttttgctggagcttttgccttcttcctccattacaatggatgatgagaatcaacaatgtagaattattctcggttagtttatatcttgtttttaacctggtatcttcagtgtgttaagacatttttcctttcttgtgggggttcccctgcaaagaaggaggctcacttgtggggccgatgaccactgtctctaggcaacccagagaggtgtgaaagaaagaagggggctgtgaggctgcagggagtatattccccatctccagccagggtcacacctgtcacttctgtttagtacctcttcctagtaaggagaacgtatgctccctttctggaagggtctacttagcagaaacgaggagtggcgagctcatgtggaaagtgcttttttgatgtgttctttcatgtaggggacacacggtgtggaggggatgcacaattactcttctgtggttcctctttcttactccagggtctcctttgccatgaggtccctagggacgtcttatcagaggagaagaaaagtaccttcttagttcttttttgttttgttttgttttgttttattatggggtttcactttgtcacctgggctctccggggtgcagtgttggaatcgtggttcattgcagccttgacctcccaggctcaagtgatcctcccacctcaacctcccaagcagctgggactacaggtgcatgccaccacacctggctattttttattttttatagagatgagatctccctgtgttgcgcagactaatcttgaactcctggactcaagtgatcctcctgccttggcctcccaaagtgttgggatttcaggtgtgccttggcctcccaaagtgttgggatttcaggtgtgagccactgcagccaaccccttcttagttctggagagcagagtcttgcctggcatcctggtgctataccaagagtcctctcctggtttccagagaggacatttgacttcttcaggagaactcaccccactccttttggtccattaggagcaccagaagctttggacctgatgggctgggcttggtctcttcagagcctctgtcctcattcacagaggaggtatcaggtaggccttccagcacagaattacattacctgggaatttaagtgggaggaattgcagtggagtattttgaagatcctaaggcatccttcatttaatttacattttcgattcttcagatattggaatcaaagattgagacacacacataacactagagcacacagtagaccatttctaccttgagctatctccttgttagagaaaaaatagttttgactgtttgtgattttttactacgggcagaaaaactttgaaaaattaatttcaatgtaaaagagttttacttttgccagatgataacacttcctatgctagaacctgggggtactgggatctgacttgaagtaattctaagtttaaatttatagcaaccatgtgggtctgttcagctgggaggggagaaatattgcgagccataaggatgtattttagagagtttctttagtagtcttcagatgtctacttgccctgtacaaagttcagaaactgtttaggacttggaaccttagaatatcagatagaaaaggattgacaggcttagtctactctgtttttgagatgccgaagccaggtgacttcccctagtggcaggtaggcaatgtcagagttgtgatcatggcctggggctcttttccaacctgctctctgacctcacataggatccggattgagcagggtaaagggtggaccagtaaaggctttaatcagtaaagtaatgacagtgttttccttcatttgaaaccagtcagatttgatactacttttctgttcagtttttgccatcattgttttctggaagtttttaatctgtaatacctcttagtatgctttaacacataacacctagtgtcattgttatagagatgaaagtagaaaattagcagggatgtagtatttgcctattgcaacttcttttcctttaaaccccttcccatgtcggggggataccttgtgtgtctgcagcatgtgatgctgactcggactctccaggcagctgactaacggcacctaaactgcctgctgcattttccctgccccagcacagacttgcttagcagctcccgcctcgggccctcattgagaaccatccagcggcacatcaggctggtgccactcccagtggccttggcagtgaggaggtgaggcgagagcaccctcaggtgctagtggcacgagtcttgcccaggctcccaggggaatgagtggtgtgatgacctcatgtgccagaagccagggcaggcatgcttgaggctgagagaaagcaacagatggacctcaggcagaagcagtcagagcagcctcaagggaggctggtgcggcaccagcgtggcatcttcccagcatctgaatgttggcttgaccttcgctgtttgtgtgacctcacccaattcagtaacctcactgagcctccctttttccatctgtgcaacggtgatggtagtacttcactctgcaagcggtggaggtgagagataatataggtcaagcatttagcagttggccaagctaaagacatagctgttgtttttgttattagaaacacagcctcagccaggcacagtggctcacaccagtaattttagcactttgggaggctgaggcaggtggatcactggagctcaggagttcgacaccagcctgggcaacataatgagacctatctctacaaaaaatacaaaaattagctgggcgtggtggtgtacacccataatcccagctacactggaggcttagttgagaggttggcttgagcccaggagatggaggtttcagtgagctgtgattgtgccactgcactctagcctgggtgacagagccagactctgtctcaaaacaaaaaaacaaaaacaaacaaaaaaaaacaagaaaaaccaatacaatctcatttttcctgttaggttattcatacaaacctgttggaattttttttctttaggaatttgaatgctcatttttaagccagacagtttcaggtggaagagaatcatgaaatgctttatcatgtttttgttatttatcgctagagtaagacttaggaaagctatagaaaagagccatccagccaagaatttgaattttgtcaacttctctattacagaggtttgctcaaagcccatagagtctagatgaaccttctacctttgcccccaaaattgcttttttcttttaatatgctagatccctttgcttattccaggctgaaatgaatgttatgtagctagaagtttcctgtctgtgatcaattctaatggcttttgtgaagggaaatggttgtaaattattaccagttaattaaatgagtgtttctcttgagtcctttgtgtaggcttttatccaagcctgtttagaatcatggaacattacagctagaatatttttagacaactcttgtttcatggacaaggagacttaaccagtgatataagtacttgcctaactcctgcaaagtgatgccaaggaaaagcaaactttggctgagggtgtaggagtggctgtgctggggatccggtgggtacatcaagctaacagagtataatttctaagcagtgagcccttgtcatccatatgtcaccggtattccttggagccatcttggagtgcttttattttttacaaagtgctatcttgtaggactattctatagtaaatattacctttcctatttttataggtgaggaaattgaggtggtcagatgaccttatttagctcttagatcaactcagcagatatgtattgagtgtttacttggttcaaggaactctgcgaggctccttgggaacataatgtcagatcctgctggaatggaggttacagacttattgcaagtgatgagatatgtgtatgaaaatgtaagtaattgttcaaggtatagataagtgttaataatagttgagatgtgaattttgagaccggagggatcaatgtgaatatcaaatcctggcaccagtttcttccttctgctgctcatgaagctgtgtcatcttctgtgctcggtaacccatccaacctgtagccctaggagctcctctggggagtcttgagtaccttgcagttgtcccgaccctgggagtcattcaataaaggttcaaatgaatgaatagataggtgcggtgaagagagacaggttttccaagcagagaacacggcatgagcaaatgtgtggctgagtgatagagccaggagaggggcctgactaggacagcaggttttaaaaagtgatttttttcttctttttgtattttaactttctaaagtgacaatggaaggaagggaattttgaaaacaaagtttggatagattagtgggaaggcagcaaaaggggagcccaagtggtcctgaaagccaggtggagcagggtgttttattctgaagactctcggagaccagcggaggctttagagggggaagttgatgagatcagcactttagaaaaggctgctttgtttttggtggggtgttccatgactgcaggagaaaggatgagggaggaggcctgcagtgacagggatcctagaatgatggagggaacgaagggaaaaacagatggtcacggtgcctcaagtcggagtggctccaggattttaagcctgggaacgcagaagaacagtggttctagtgattcagtgatgaccactggaagctttaggaggaaacatgggattggagccctttaaagctggaattggccccttagagagaatctggctcaggcttcccagatggtggtccgtggtctggctatatcagagttacctacagaacttttaaaaacagcagatgcctagaccccgttcccttgccccagaaaatttaaaatcagtagatcacctgtggggtctgggaatcttatatttaatccctttctgtgattctttggcaaagaagattgaatggccttcctgatgtcgcagattggtcaggacagagcaccaggacccaggtcttctctagcattgctattactcagccacaatgtgggagataggggataagttcagatggggaggtatagtatttgaggcagcgctgattcatgtgagttcaacactgatggctctttgaggaaggggttacttggcatgagaactcaagggttagatggctctgagggtgcacgttgggaatcattcagtcaagaaatgctttcccgagtggctgctgcaaaccaggcataggatattttcagtccacttcggggactcaaaagtgtagaacagagtagtagaaacaacatagagaaccctaaaggctgaagttgtgtttatgttttcttctctgagctgttttgagtaaatttaggtgtaagttacaatgtatgggttgaaattcattattttgggtatggatgtcccgttgttctagcaccatttgttgacactgagtttttatacttttgttcatttgtctatttgtatagaagaatcacatttttttaaagaccactgttatctgggtttcaacaagggcccaggagttgttctttttaccaagagaagtggtctgtaggggagggggttagtgtgtttattgctccttgaatgactgttatagtaagaatgctaagtgtgttcatttctatgtggggctgccctagactctgacctcagctctgttctattagacactctgtcagtgcattagccaatgacataggtagcctgaggccctgatttggggagccataaaactgagaaggggagtgaatgaactgactggatttgcgatccagtgaacgctatgacctgggacaagccaaaatattgcagaaaaaaaaaatgaagcacttaggtttttatgaaggttttgagcctaaccactgcacgagcacaggatgtgggaagcaaagccttatggcagctagaaaagatgcagaggttttagttcattgcaagctcagcctgggtcactggggcttctcagagcgcccatgtattctcgctgcattggtaaagggcactgtcactgtcaagatcaacgttaatgataatcttgctcttgctggtgaaagtcaggtcacacactcagcctgacttcaccctttaatgggggtgtgaagaaattggggcatgtcaggaggaaactgactagaatggtgaaggaggagaaaatcatgtcctacatgaagttgctgagagtttgagatacccaggtctattttatttactcatttgttccacaaaccattttctgtccccttatatgcaaggtagggtctcctttggggacagggcataatgactacaacatgatgtgggttccagcagtagtcttcataacaggtgtggagttgcccacctgtctgaaagaggtctggaaaggtccccctatacaggtgggtcttgaattgatggacaaataggagttggacaagtataaaaaggaagaaaggagtttccagccagaaagatcacataccccaaatcactaggcaataagctacagatgggtaatgtgtaattttcataattttgactatattccccagtatgctgcttgatccataatgcgtttggttgctctctcagaataaatgaaataacatacctccctggagagtgtacaagaattaagagatggggatactggttgtatgcagctgcagtggtgggaagagcttaggctgaaaggtaggaaggggtttagtgtctagggctatgtgctgtgctaaagaatttggaccttatcatggacaggagaggaaacactgacggtttctaagttaggaagccacatggtcagattttaatttttgaaacatgtcactggcagcagctggaggacagtagtctggaaatagaaggcagctagaagcccgttcagggaggccagatgaaccacggcagtaggagtggagcaggggtagatccaggagagacttcgagagtggacgtgttgggatctgagagcgattcaatgtacctgctgaggagctgggcttctggcgtggcctactgggtaaatacagggctcaggagtgagaggagggccaggaaagggtggtgtcctggaagtaaggaatgagagattcatgaagaggaagatgtcaagatcagatgcggcagagagatcaactgagatgaagacagacacatctttgtatctgacagtaggacttcataaaagttgctggagctgtttcagtgctggtgggaggcagggaggcagacggcaggggatagcacggatgttagaaggcatagagggatgtgataattgttgtcgaatatttgacctattctctttggctgacaatttgaatatgttttttgagtgcaagtgatagaaacccctactcaaactggctaagacaaaaggaatttataggctcaaataacaaaaaaaaatcccaaagaatcaagcaaggcttgatctaagggtttaaatgatgttacgaagagctgttctctttctgtccctcagctctcccctctttgttggcttcattctgtagctcagtggggggacaacacaggtgccggacactcccaagtttgtgtccttccagattgaagtttagcagaagcgagatcttgtcccttccttgtagatccaggattcctagttggacctacttggatttttgtgctcaaacctgaaccagtagatgctgataccgggtagggagttgtaattacactgatagccagagagaaggaatgtgcctgccccaggccagctgtgcagagttcagtcagtgctctgatctgctaggcctgctcacatgtccactctggagttaggggcagaatcccagatgagccatttggactacatgtgagggaggagtagttctcaaataaagctcaagtgttattcccagaagctgggatggatgtactagctagagacagtgtccactggagctgtagagggcgaaactaaggtaaatgagtggaaattattggtcttgctgcgtttgtattcatagagaaagatctgtctatattgtacaggaatgaaataggccagctgttaaggtagtgaattggttgtcactggggggtatctaagcaactaccgtgaataaatgataacagcccatcagcagtgtatagaaggaacaaataacctccaaagccacatttttcaaactgtttctctgtgacacagtaaggaatacatctttacattaaaacctactgtacccttttatatgtatacaaaactacacacaaaagttgcatgaaacagtgcttttccttactacctgtagcatgttcatattttctgttctgtttttattctactttgaaatccctattgtccgctgggtgtggtggctcatgcctgtaattccagcactttgggaggctgaggtggacagatctcctgaggtcagaagtttgagaccagccttgccaacatggcgaaaccccatctctactaaaattacaaaaatcagccaggtgtggtgacatgtgcctgtagtcccagctatgtgggaggctgaggcaggagaatcacttgaacccaggaggcagagattgcagtgagccgagatggtgctactgcacaccagcctgggtgacagagcgagactctgtctcaaaaaaaaaaaaaaaaaaaaagaaagaaatccccattgtgtgcaacccactaagttgctttcatgtctctctaaaaagtttcaacctgcagtttgtaaaaccctgttctaaggtccagtgtcttaccacatctgccctaggtggacaacacttgaagaccgtgtttaaatccggcttttccaccacagtgggtgacatgggtcaaaaatgcggaaggaaacctgttctacttgtgagagctcctgcttctaactggtggaatctcctgctgtctgtcagagtagctcctgacccatcttggggtggaaaggcctttgtgggccctcagggaagtgttgaagggagtttacgggctggctgtgggctgcaggatggcggaggcggccaggcagcaactgtgcctgtgccagcagtagtttatgttgtgaggtcgaatgtatgtgtatgtatgtattctctggcaggcctttatattgaagatgagggagtgtggcttttaaaaataatgtatttttgacttgaaacaagtcaaggcagagagtggagacaattagaggctgatatcctgtttagtcatctctctagagagctctattttcagagctgttctataaaggttcacaagtggtattaagatagttaagaggatattgttaacagtagtcatgatgcaagtagctgatttgaacagggaggtgatttatagtgtggtaaccacattggtaacaggttttatgcagagaaagggtgggttgtaagaataggttgttatacaggttaagctttctgaatctgaacaaagcaggcatcttttattttgaaaaagtatataatcagggtgtggtggtgacctagggtaagtccagtgcatttttgggggctttgtcatgggtagatacaataaattttaaaaaagtaaacagtactgttaagaatctttgagattggctgggcatggtggctctcgcctgtaatcccagcactctgggaggccaaggcgggcggattgcctggtctcaggagttcaagaccagtctgggcaacatgcctctctaagccaggcatgatggcatgtgcctgtggtcccagctacttggggggctgaggcaggaaaatcacttgaacccaggtggtcgaggctacagtgagtcatgattgcagcattgaagtccagcctgggtgacagagggagactctgtcttaaaaaaaaaaaaaatctttgagatcatatgtggaggctgtgttagaaacgctaggccaatgccaggcacagtgactcacacttgtaatcccagtgacttgagaggctgaggtgggaggattgcttgagcctaagagtttgagactgggcaacatagtgagaccttgtctctacatacatacatacatacctagataagcaggcaagctggttatggtggcacatgcctatagtcctagctacttgggaggctgaggcaggagaatcgcttgaggctgggagttcaaggctgcagtgagctatgattgtgccactgcactccagcctgggagacagtgagaccctgtctcaaaaaaaaaaaaaaagagaaaaaatgctaaataatgatgccatagacttttcagattggaagagtgaggctcagtgtggtaaaggaccttgcccagggtccagaaccagctgtgacagaatcagactagagttcttggcctggtctagtaggggggctctttccactgtaccatgtgactatttgcagcttattttaaatttaatatttgaccaaaaatggtcattcgtatctctagtgaaacttctctatatgccagtcttcctcttcagatgaaaggtcaaaggcagaaatggagccacagccaaagaaagagaaaaataaaataaaaatggagccatgggcagaatctgaaaagatttatttaaggacaattgtaaattcatgtatttgagtccacaagagcctcacaatgcaaggcttagaggtgttcatggatagtgaagttagcatccggtaggaagaggggagtccgcccacctaagctagtggtgatcagaacagagccagaggtgctgttcatcctgggcgccatgctgtatggggtctttcggaaactggactatatgcagaggacgacaccatatgaaaagacttcaagctgcattgcttgcagaatgcatgtcttgatatttcagctgataggtaacttcaaggtatgttgatactcccgtgactaattaagagtagcagtccgacacagtgtctcacgcctgtaatcccagcactttgggaggctgaggcgggaggatcatttgaagtcaggagttcgagaccagcctggccaacatggtgaaaccccatctctactaaaaaatacaaaaacagatcagatgtggtggcacacgcctgtaatcccagctactcaggagactgaggcagaattgcttgaacctaggagatggaggttgcagtgagctgagatcatgccactgcactccagcctgggcaacaaagtgaaactacctctctctctcaaaaaaaaaagagtagtgaatgcaaggctcctaaacttccttccctagtgcttccttaagattgaccagactttggtggaaatatgtagcagagactctttatactttttactccataaaactaaagatttgcagttgaccaagccacatgtgttcattaccttgtatgttgccgttatttctctatttcatattcttgccatgtggtttagtaaaatgctgctcttataagccatatgcataagatatggaggtctcaaaaacaattaccaagtatgtggatgtgcctgtctatattatgacaagccaaaaatgggagagaataaaattcaagaggaaggaaactgataaaatgtggtttcttttcagtctttacagttttttgagctttcacttgtttccctgccactctactatttaatgaaagacttagatttatttgatttgtggctgtgatttacacattaggcctctctgtgatgaattgtttaaggcccacaaaaatattttaaaactaacatataatatacatttttttttctctttgtaggtggatctcgagccagaggggaaagtatttgtggtaataacccttaccgggagtttcactgaaggtaagaatgagttttgggtagtttccagaatacatgtaatcttggtttacactcagtaggaatttctatcatggacattataaaaaagagcatgttgtaagagatgcttaaaaaatcactttcataagttgggctggctagtattttgttgcccagtggtctattggttcaggttgccaaattaaatatatttgctaaatctggcaatctcacgtttcatttaacacactcaatgagtttttgtttttagccagtgtcatcgtagctgaatggtttttgcgtctttttggttcatgactgtggaactctacgtctttggttttgtgccatcttttagtttgcctgtgaatgtctatgaaagaaatttagggatccagttatcttctttataatctctatctcatttgtgacctgtaagggattctgttcttcatctgtggctaccgtactccctactcccccatccaatattttttttacttgaggtaaaatttatatgggggtgaaatgatagatcagaagtgaacaatttgaattttgacaaatgcatacaactgcataaccagcaccccaatccaagatacaggacatttccattattgtgaacatttccctgtaccctttttcaatcccctgctcccagaggcaataagtaaagtgctttatttcaccacaggttagttttacctaccctagaagttcatatacatggaattatacagtatattctcttttatgtctggtttctttcactcagcatagtttttagaagattcatatcattgtgtatatcagtatttttttcattttatttctgagtagtagtatcccattatataaatgtagcatccatttgtttacccattctcctcttggtggacttttggggtttttcctattgttgtctattatgaataatgcttttattaaccttcttacacataaatttttctggacataacactttcatttatcttggataattatataggagtggaattgctgggtaataaagtaggtgtgtgtgtaacttcagaagaaacttccagatggtttccaaagtggttttattatactcccaccagcaatgcatgagagttccaattacttcatatcctcattaacactttctatggccattgcttttcatcgtagacattctagtgggtatgaaattatatcctgtgggtaaatttgcatttccctgatggtgagtactttctcacatgcttattggtcatttgtttgtttatttgataatttccagttccagtcttttgtcctgttttctaaaattggatttgtctttctattattgatttagaggagttctttgttttctggatatgagtcctttgtgagaaataggtattgtgattactttttcccagtctgtggcttgccttttcattttcttaatggtgtctttgagcaaaagttttaaatttctatgaagttcagtttattaatctcatcttttgtagttcatatgttttatgtcttcagagatctctctgtcataggatcactaagatattctcctgtttctttttttgttttttttttttaagaagcaaatagttttaggttttatgtttaggtctgtatgccttcttaaattgatatttgtgtgtgatgttacagaggagttgaaacattttttttcaatacacgaatgcagttgttctagcaccatttattaaaagtctcccctggccccttgaatcaccctggaacctttgttgaaaatcaattgaccatataatgtgggtctgtttctggattatctgttctgtcctgttgatctgtttgtccatctgatctctctttcttttctctacattatgccagtattacactgtctcattactgttgctttatagtgagtcttatggttacatagtatgagccctccaactccgttcttttttgtatgtttaaggttattttagctattctcagtattttgcaatttgatatcagttttagagtcagcttatatatttccagacaaaatcctgctgtattttgaattgaaattgtgttggatctatagatcggtttgaggggaattaacatcttaacaatcttgagtatctttaaacccatctgtagtcaaattagtcaattctgtagtccgtggacatggtctttgctcgtaaggcatagccagtgtgaggtttcagtagaaatcccaaggtgttttaagcccattaattttatggcactcaagcttctaactctttctcctatgggtgggaaacagctgaaatctcagttcctatctttcagcatcctagctcttgctcctgtctggacctcttagagtttcccttgcacatgcacagtttaggaagatgtgagggcttgaagagtttacatatgtggaggttcttctttctgtggccccatctttccaggttttctcccctcaatatccagtcatctggtaggcttgaattttgtcaattctgccttcaagccaataaaactgtggttccatattgagttctatttacccaaccctgcacaacctggggaataatctggagaaaagccctacaaatgtgggtctcgcctaatgcggtttccctccttcacgtgtcagattctctctagtttgtatgtgtttttggttgttctctcacatcatcaactagttgtttaaaatatattttccaggtattttaatcttttggtgggagggttggtccatatcaagctacttcaccattactaaaacctcatgaagatttttaagcatgtggcttaattgtttgtatttttggtattggcattttgcaaaattggttacactttctttgagaaatagttttctccactcctttcagccaaccattcccattcatatgggtgaattgttttaatgttaaagtttttcaatatatcgtctccattattaaatcttgtctttttgcacaaacctggatttagcagaaacctagaatacttgacataaaaaaaaaactgttcaggttacaatttgggggggtgttctgcctgctccaaggtctttttgctttgcttggtatcttttatgtacagagaaaaatgagtctgttcctagcctagtcaaataaaatcaatgtagtattatggaacattgttgataaaacattctcatcatgcacgtagaacatggatcagctatggtagaaagaaacacaacagtgagaaagaggtcaggaggaggagtgggtaagattctctctcattcgagctgaatcaactctctgcattaagttacaagggactggcgaagtaaagcaatgcatattagaccaggtctgattgtgccataatcattacatgacttttttagagccatgccaactctctaggactaaatgctcaccaaatacatctgattgttctcattgtatttatttcttagtttcagtgataataagaatgaaatggtaagtcatactagaggtgagttcttactaggtcattgcagttgtgtctttcagagctgaccctgggtaaaattgtgagatgagttgagtttatctttggtaattccatctttgctttaagctagtcctttgtctctgcctacagttgtcccttactgcagcaagaagcccagtggtccctgtccagaaagagttgctgataaggaaaacagttaattcataggctaattcacactacagtgatagagattgatgtcatagtactctattcctcttaggtgtgtttgcatattttaaaagatgctggaagagctgctttatccatgagaaatagacttttaatgctaaaattttaatattgaaatctacgggtggggtatattttaggaaccccatatctgttctctgtgtctctgtgcgtgcattgctttttcattttggctcctagactggggctcagcttgagcttgcacgttgctgctgcctttaaaacaccgctcccttgtcacatgcagaggacgtgatggctgcctgtctgtgttaagtaagaaggaaatggagccccccccccccccatttgcctgccacagctgtggcagcaacctggacctggcactgagagcatgtccctagcttgacctcgctcctggaagccaccttagattatgtccagccataatatgacaggttggctggtgcaacatttggagctctagttcccatcttggatactgaaagccttcatggaaaagcagtgtaaggtcaggcctgcccagtgtgttttggactgtgaaaagggcattgtcctaggatcctggaggcactgtcaaagctcaggaaatgttggctgatcctcagtctgtctcacatggttgtcttgaaggtcagatgatataatatatggggaagtgctttgcaaactataaagtactatatgaaggtatgttagtgggattttcatttccatgttcctattgtcacagcaaggagatcccagtcatttcccctacccctgccctgggaccatcttgtatactcagcaggttcgttttatcttaacattgactttatggccaggcgtggtgtctcacacctgtaatcccagcactttgggaggctgaggcaggcagattgcttgagctcaggagtttgagaccggcctgggcaacatggtgaaacaccatctctacaaaaaatacaaaaattaaccaggtgtggtggtgcacacttgtagtctcagctacttgggaggctgaggtgggaggattgcctgagcctgggaagtggaggttgcagtgagctgagatagtgccactgcactccagcttgggtgacagagtgaaaccttgtttcagaaaaaaaaaaaaaaaagaaaagaaaagactttattttatacaagaagcctcaagaatttcatggacagtggctagcataatgttggcttatctccatgcctgttttcatgatctcctatgcgggttctgccataagctcagattctataatctcaaagcactcctttaaaaaaaattacttaaattggacggtggtctgtgatgtacaaggctggtattggggctactgactgctacttacctcattttttaatttttcattaattatactgaattagctcaggcaaaactattttgttaaatgtaagacatgattgagaagtgacataagaaaaacctgctgggtgcagacctgtaatcacatcatagatgctggagagataaagatgaacgagacatagacactctcacaggagctcataggagggaaggcagatacatattatgtatgcaatgcagggagccaggtcccatggcaggaataagcccagtgcatagtgttggcacatgggactacataatcaatttggccaggagggtttagagaaagcttttctggggaggtgatgtttaaaacaagtctgaatgataaataggactgtgcctagaagggaacagagttcaagagagggagacagtttgtacaagaaacgaaaaggagtgtggaggtgctaaaggtagggggtgtggaggtgctgaagattggggagtgggatggggggatgtggccagagatttcggagggcttatgtgtgggcttgcccaggacaggctcagtttgttggttacaccagaataattatacaacagcgccactgttcactttcaaaagggtgccaggtcagacaataaattgcatgttcacaccacttgtaggctaatagaaatgataagataccagtgaagggttttaagcagagatctgatttggtggcagtaagttcaagggtggggaaggggtgttagttgataagactagatctaaggtgtggagaaccattatagagacttggaaggttgtctcagggcaagattattagggcctgaattaggttggaatatgtaggggtggagaggagggggacagctttgagagatgtctgtgtagtaaaatcagtaggaattagcaatccactggatgtggaggatgaagaaagaggagtctcagatgatgctcagatggtgcctcagagtcatttaccagggtagaaactgggagaagatgatgaatccagctttggacaagtggagtttgaggtgcttgtgggaaatctaagttgcaatgtctgggagaaattggaaataagattccggagtttggcaagatgcctgggcctgagatgtagctccaggtgccaggtggaagacaggcacatggataaagaggcccattgagaagatttagcaagaaaaccagcaaggctgaccagcagcagaactctgtggagcatcaacatttaagtactttggctcatgaattatagtttatcaaaccaaccaaactatgctgaaggtttacttaatgaacacccattttgctaagatattacttgtgaaatagtatctgagtgcttgctgtatgccagggactgtttcaccagattgtttaccgtcttccaaattggcaccaaaatgtttgataatgaagttagaagaaagaacagaacacaaaaggctttgaaaagtaatgtttgcattggtggtaacagtggtttcttcgaagtttgatgatacaatgtgctgtgtgaaggtttatgcctaatgcgggggtaaaaagaacagatgaacctactcaaaacctgcagtgaggggtcttcactgaacttagatagagcaagaaaaactcttttacattcattgctttgtggaagtctctcacagagctcaaggcgtataaaattatcaactggatcagaaacccctcaccactgttcatcttgttaaaggtgtcactctgcatctgtgcagaattcccctaggcactgaggcagaagtagaagtgatttattattttgaaaaagctgcctaatgtcaatctttattctaactaagccttcctgaagctaagaactggatctgaagtctgatcaaattgaaatttattatagtgatgaaacagccctggatttttaatgcagccttcagattccatcattgttgccatgtgtgtgattgtcactatgttggactaatttttgtctggaagagtggagtagcaaaaaaaagaatagattgaaacaatggaaactgaggaaaatgcattaaactaaattcataactgctttaattggaagagaaacaacagaaagaaattaaagtatgacatcatcttatgtgaggacaaaaagatgtagctggattattatgctactaagaaatatggtgtaagattttacgatttgaagagaacatagtttgcagtaaatgaagtttgcttggactcagggaaccacaaacttaaatggttggcccacaaatgaaaaaccagacatgatgtgtctcctgatggaagcccacacaacatcgtgatcttgccaaaaagtagaggtagttttgcccaaaactcaagccttagaccagtcaggcttccagatccaaccaccagttaagaggaaatataggggacagaggagcattttaagttacaccatgggatgtaatcagcaaaatccagactgtggaaaaattttacaggaaaagagacttggtttcttctaccaaacattggaagaaaaaagtaaaggaaagagaaccaaagtaacaagagagaggcatattaatcatttgcaatatatgggccacattttatcccaattcaaacacaaattataaaagaaacattaactcccaggaggcaagtgaagaaatggaaaccgtgcctggatctgtgaggatattacagaattgttgatgttatttaggtgtgattgtggtattgtggttacttaaaacaaaaagaacatccattagaaatacacttaaaaatatttactgatgatatgatatgacatctgggctttacttcagaataatgcagaggtgggcagaggagatgggatagaattgaaacccgattagccatgagttgtttactgaagctgggtgatgattatatgttgcatgtggtttattatagtattctacttttgcatgtatttgaaattttcattaataagttaaaaagtaaaataaaatgacaaatttcaagaatatctgcttcttaaacaaaaaccagaatctgggttatgacatcaaaatgatgcttgaacttgaacattttacctctttccacttacaaattaaagctggagggttttttaatgtatatgttttatccatgattctcagtttttatgtatgatgaaaaagtaagttaaaaattttaaatgactaaagtactgtgcttcagaaagacttttttaaattgctaaataaataataagctgtgagtcaaaaactgcaggtaggaacaggtgagtaagataattccttttgttccgtcataaagttctcactcacagtgaatgacaagtagattatctcctactaacaattacataacattttgcagttgcgaagtttaattttaaggtagtttcctaaaagaataaagtaaatcagaaggattaatggtagaagtatctttataaagatagtaagaaaaaggttcttagtgtacttgtttcttccccagagttcccaaggcaaatataaaggtattctattttgtacaagtttttggggaaggaaaacttcctcaaaaacaaaaccctgacaaagaacctgttatttgtgaatttgaagcttgtttagaaaaaaaaggccttttacttctgctaaaaccttgaattgttccttatttgagacatttaatatgtaacttggaaaagatatacatttgtcctggggagacaatggaaaggcacttgaattttggcatctgctttttctctctactaaggcagtgcacaatggtgcagaataagagtctgatctttttctttttgtcccattgcctcagtttttagctcacatttcttgtctcaagcccactggtttacaaataattacgttctctgctaagtcatgtggcacatggaccatcaaggcagatgaagcatgtgttactgctttgaagctgcagcccacagttaccccctgtatcaacacttcagatgcatgtcatttttaaagagaaaaagtgatttctggtggtagttgatttatagcattcctttctcagatttcaagcctggtgacaagttgttgatttaatttttttaaaatgtagctttaaaaaaatttattcttttggcatattagcttgaagaatgagtgaccactttagtttttgtgtttgttttttgctggtctaagcaattgtggctatcaggttgaagacagggtaggagagaaagaaaggaattgagggaatgggagaataggaactggaaacgggcgaatgatgtttttaaaggattgagactaattgtcccttgtcatagatgctctctcgtcttctccataatatctagctcatttgttgaatgccttctgaggaccagacactggagttggcttgtaatttagcaaatagcaatgggagccctcattttattttctggtagcaggataaactcttacctagtaactgagtacctctacgtgttcataccatgctatatattattccattttctctctataacaaatttctgaggctgttgtaattctcagtatgcaaatggtgaaccagactcagagacgctaatttactatggtctttcctggatagtaagtgccagagcccagacacaagctcagattgcaatgctgaggtccaagatctttctacaccatccagctatctgaggagttgggggtgggggggcagcattttagtttttttctttattccatcttagaggaaaactgtcctcaggatagcataatcccaccctccagagagtcttgtcttttgggatgatgtctttttgcaaggcttcccttgagttcctcctccttaaactggaggaccaacattcacccaggaaaggtgcagcattctcagacatcaggcatggatgggccagaaagctctaggcagattgagtttaagatttgctcaggttttgttgtcagtaggttctcttaatgtacatcttaagctagaactcagaagatgaaaatacaatcagtgagttcagcataggtatgatagctctatttgcctttttataccccagtcatcattggcttcactgtacctacttctcttattttgactgactgtaagtgaaaaaactaggtggtggctttgttggaaattttaaaattcattctcaaagtgtgatcctgcagacttctgagagttccagagacattttcaggaagtctgcagttccaaactgttttccttataatacgaagattttattcatccttttttccccactgtgttgacatttgccccaatggtgcaaaagagaaatggtgggtaaaagcatggcaccaaactataaagtcatcattgtattcttgatggccacgtagttgcaggaggaagaaatctagtttcacttaagaatgtctttgatggaacagtaaacattattcatgttattaaaggtcaatccttgactatatacctttgtaacattctgtgtgacaaaatgggaaatatgctaaaagcattcctgcttcatactgaaatactgttgtgtctcaaggaaaagcacttgtgtgattgagttgttagctgagctagccactttttgcatggaacaccatttttactttgaaagaatgacagacaaaccatactatggaactggcagatttttcagacattgtctaaaaaacgaatgaactgcgcctgttacttcagggaaaacaactgtaagtatttggtgccagtgataaaattagagccttcaaaacataattcgaattttggaaagtttatatccaccattgtgagcttgacaacttcccagtacttattcttttctcatgagtttgttgttattaacgattgtaatttttaaaaattgtgttatgagatatgtcaacatttagaagatgacttccaatgattcagtgaacacgtattttcacaatggccagtacgagatgttataaaatcatttatgggtcaaggatctcttgaaagcgtaaggtagactcatgtatattaatttaaagtatgaaaagttcattgatacagttttatattgcaaccaacttttgagaaactacgccttgtttacttttgtgtggtattaaagaagaatatctgcaattatctgaaaaatctattaaaattatatttttaaattactctgtgtgaggctggactgtattcatgtacttcaactagaacaacattacagtggcttgaatacagaagcagatatgagaatctagctgtcaggctgggcgcagtggctcacgcctgtaatcccagcactttgggaggccgaggcgggcagatcacgaggtcaggagatcaagaccatcctggccaacatggtgaaaccccgtctctactaaaaatacaaaaaaaaattagctgggtgtggtggtgcgtgcctgtaatcccagctactcgggaggctgaggcaggagaatcacttgaaccagggagtcagaggttgcagtgagccaatattgtgccactgcactccagcctggtgacagagcgaaactctgtctcaaaaaaaaagaaaaaaagaaaaaagaaagaatctagctgtctttttttttaattaattaattaatttatttattttatttttatttattattattagactttaagttttagggtacatgtgcacaatgtgcaggttagttacatatatatacatgtgccatgctggtgcgctgcacccactaactcatcctctagcattaggtatatctcccaatgctatccctcccgcctccccactagctgtcttcttttaagtcagacattaaagagatttgcaaattgtaaaataatgccactctctctatctttggggggatgtttgaaaatgtagttatattttattaaaatgtgtatactaacatgtaatggaattgttattgtttttaataaatgataaatatttttaaatgtctccatttaaatttctaatttgacaaatatcagtagaatccattcaaaggggtacttggaccaaaaaattttacaatttctaggttatttttttcttacattctttcaaaagcccagtgctttaaattttaatgaccacagggagaaggaactgacacatatttgtgtatgttataatcagaaaaaaatatgtacagttaggtgatacaggtgacagaattgtcatttttttgaaactttctttttgtttctgattatttctgctgtgcagtgtactttttcagccagtttttgttataagcctgttctcataaaaataaggtcaggaagtgacaccaaaacaactcagaagcctgtggtggtttctaactttagagctgcctgttacagatagcttcatgctaaacctttgcttgatttgagcagaacaaggcagtcacgatacttctgaacaagtgatcagtgctgtgagcactaaaagctgaacctcaaaaacagctcaagatccatggacagagcctcaggagacacatttctatggcactcgcttactgactagcattctccttttctaatcaaggttcttgaaaaacagaggctgactcgtttgttaatttttttcaagctttattgttttttccttgaaattatagtgatgtggtattctctctatggaactgaggtttgggtaaaacaagaatgatttaattttttgatagaaaagttaattgctccagtgtctgttttcattatacttccattttatttccagcaaccccttatctctctgctctctttgtttcaaatgaacaagacagtagagtttgttttccaggccacttgtgttggtaacccttttcctaagctttccctaataacaccctgtgtcagtggacaggtagtaggtaggaagacctgcttcttcccttctaccgtgaaactcgtcttcagcatcattctttcatcctgatggctgagagttgtgttctggtctcaagtcagcagtggataacccactgcatgaagttgatggggagtgtggggcatggacaacagtggcctgaggttgcagatacattctttgtatatgtaagagaccaccttatattttgtaagtggaaacttagttctcataggattttggagaaaatcagttgcctcctctaggaattttcatttgtttacaaaatgtcctgggtcaagcaatacttttatgttatccccacttaggtttagtggatccatccatccatccatccacccacccacccacccacagagtatttatgtagaaaactatgtaatggatgtatatattcatgcatgtgtgtatgcatgtacttagtaatgacactggtttgttctcacagaactcaaaatttggtgtgtatgtggagacataaacaattagaaaggttaacataatatgtacctccacaggtggtacatgctatggagaaaataaaacagagtaagaggacagagatgggtcctatgtgtatgctgttttgttcaaatcagatggtcagggaaggcccctctgatgaggtatcatttgagccagaggtctgaagaaagggagggagtggaccttgagtctgtctattgggatggggaacaggaagtgcaaatactgtaagggttgcagcagggagaggagtgtagctgggccttgaggtcaggggaggtgcccacatggttgttggcacaactttggtgccctgctaatgtcactttcctcttcaagaatacccttgtcacttaagtgatgttcacttatgcttgctgctggcttaccatttggctcactgagcacgtcttttcccctttggttaggggcttgaagagcacagcatcacatctatttatgacttgatgtattttgctaatgcggaaaccattccaaattcatgataacaactttctccagttctgtgaattccctcatggtttctttttgttctaagccaaattaggagccaatccccagcttaataagcattaaaagttcaaattgactgtctggaaatctataacaagtccatgcactcctaaatataattagctgtaattcagttctagttatggattattaagaaattactcttatttgagcacctcactcatcaaaaataaagtcagaaaatttaggcgcagctggaatcttctgctcttttttttttttttgagacggagtctcactcttgtcgcccaggctggagtgcagtggcgcaatctcagctcactgcaacctccacctcccgggttcaagcgattctgctgcctcagcctcctgagtagctgggattacaggtgcgcagcaccacgcccagctaatttttgtatttttagtagagatggggcttcaccatgttggccaggctggtctcgaactcctgatctcaggtgatcggcaccccttggcctcccagagtgctgggattataggtgagcgccaccatgcctggccaaatcttctattcttgaacttgtggtgaactatcatttgttgaggagttttaataagtgttagtgatagatctctactaaataactggagaggtaagtaggttggagctcagtcttggtaccttatagggacttagtatatagcttttggaaagttaattcttactgaattttgatgatacttcttgtttcatgtaaatgtggatgcttccgttatgtgagtcctaagatttgggatttaccaagtactgagaataggaccttcaaaaaatatgaaatgccaagaggatctgttttaaagcaatggaattatttgagaattttgaaaaatacagattctcaggacccagtctgaatgagaatctctggggaagaggccaaggaaacagaattcaggtaagcaccttggctgcttccagtggttggccaatttggatatccctgttgtgtcctaaattatacctaatttgattaaagttttggtggctgggaggtttgctagttgaaaaacacatacaggaaaaaaaaaatgtacaggggagtgtattgctttggtgtagtcgtttaagagttgacaaaaaccccaaatgtattcttttaagaaccttttaaaatgctgcgacaagggtcaggttacagtttttgcgttgttaggggggcacatgagactcagcagctacaggccttgttaatgtctgcaaacactcagtgctaatgtggagactcaagccaggcttgaaagtgataaaatcaggatgggaatgttggctttgctgcccatcaactgttagactggagacaagttacaggcatttccttttttgtggggtaactgagaccaggaaaagacaattgaaagtggttccagttaaaatgggagccacagttttttcgtagtatatatctttaaaaaggtttgattaatactgttcttaaaatgacaacaacaattgtgaaaggaaatttcattcatcttatatttatcagtgtttgggttccagtggcacctgtgtgctaattcttagaaccaagaatggatcacataactcagtaggtatttctctgactgatttgaaagcatgataacagcttccacttcacgctgactttctcagcattgtgccgagcagagttatttttgcaaaaaggtttgaagatttcatcagtttttccagtagacaggcatggctccaccagtgttggtctcctctttgttggtgatgaactcgacatccgagatttactctgtcaggggtttgctgtgattggagtagtgtattagtcaatttcatgacttcccgcatccactacaagatctcactttttgatccggggctgatttttgtggcacagtttgtattatgggatgtatctgctactcagaaagggagaacaacagccatttacatggtgggcaggaatagggtagttttaagcaaggaggggtgttagagtagggactgatttaaaagtggtcattctgttcatcagagactattctcatgctctgaccatttagtttatctaaatcttaggattatagggattttaataattaatactcagatgatgagttcaggtgtctctgtaaaatgaataatgcatttattattaagtctaaataccctaccattctgaaggcgggactgcatgtctaataccaccatcttatctaatggttccttgggatccacccaggcacaggagaacataacaatgcttggaggggttctaacctaggacttcagaaagaattcatcgacaaagactgaagcttaactctaggagggaactgtattgatttccttaaacatactaaggaatggcaattcagtaggactctgctgtccccttccagcccctcctcagtgaggacctggtggggacactcagccagagtgtgaaaggaacagcttcagggccctgctcaaatgtgtctgggagctgtcactttttccatgcctctttctcgggtgttggacgtcctcatttgagacttttaattcctacattcttggtctttgcctctctgaatgcttgaaggtcacacttaggtacagcctttatagaaccttttgtctgatatgcagaatattgactgcatgctggctgtgtctgtctgtctgtgcctctgtctttctctagccagggattacagactgcccatgggctgaaatcagcctgcagaccagttttgctttgtatgcagcatggaataatgcttttgaggttttccaacttgagctcttcagacagggcagggttctccagtgtcccacatcccctgttgtctgaatttcctctgaattcacacctctatgcctccttctctggcctcagtttgcaatcctgaatctgagcatttgtcccatgtgtttactgggcagtgtgcagtggccttgggggagactttgaaacatgttttagtgagaaggatcacttctttactggagtcaaaactgaaaatactttcccttcgtggaataccatacaggcgtctctcttgcactgttcagcatcccatcctactcagtggcattcccactctaggttttgggtagtacagagtctcactgctttggggagcttttgggggcatggtggagagagaaatctcttcattttttcaatttgtttggatcagaagattagcctgctttcaggtaataggtctacttttagtgatgcctacagttccctgaatgccccccaaaagttaatttctggtgtcactgttaatccttacagtcaaaatttcctgggaattgctattggggatctgtagctgtgctggagataggggcatgggtaggggaggaccatcagttttggatcagatggacttggttctgctgcctgtccttccttgctgcgtgaccttaagcaatggttgccttatgtgtaaaacaaggggctaatgatacctaaacccagggttgctgcaaaggttacatgagcttatgcacacaagcacacacccacaaagtgtagcattaggatctgatgcagactatgttcccacccacttgggaaggaaatccgtgccccatttacttccatgtacttggtggtgaatcatctaaaagatactggaaaaatgtgattacagatgccccctttctcggccattgcttcaaatcctagacagctattgaacgtcaccggatagacgtcatattctaggagggtgtcaagtacatacaggtctgtgtttctatgtgctttttgtaggagctatcaactataaagctgtgggtatgagaatttcagggcaaggtcgggaaggtgtaggagggattcactaactctggggaaagtgtgtgctgctttgtcagtttcctgttcgctaggccacagggaatatgttggctctttctgaatctgcccaccagagccaatgtcataccttttcccaagccactgcttgagggtccagctaattgatgccaccgcattgcctctcctggtgaggaccgactgtgccatgggggtggtggctgtgggcgtagacagccctgttcatgggcatgcacactgccatgggtgctccatgggaatgctggtagatagcagaacatggatcaggagttctactctccaggatagcatgacccagccatgggctcaaggaattgctctttgggatatgtttgaaactcatcccctactctggccgattctttcagtacagatacagaaatgcaatgagaaccttctccctgtagttctgttaagataaatgagtggtagtggctcatacctgtaatcctaatactctgggaggctgaagcaggaggattgcttgagcccaggagttcaagaccagctgggcaacatagtgagatgccaggcatctccaccaaaaaaagaaaaaaaaatccaggcatggtggtgtgcacctgtattcccagttacttgggaggcaagaagattgcctgaacccagaggtttgaggctgcagtgagccatgattgtgccactgtgctccaacctgagtaacatgagtgacacagtgagaccctgtctcaaaaaaaaaaaaaaaaaaaaaaaagagttaatgtttataaggtgtttctaggtcccaggaaaaagaaatgttttaaaagtagattgtatatgctacttgttattaatttcttatctctagagattgaatggtaaaagccagggccagcattgtacattgtcaggcagcattgcccctgtcgtctgccttttcctcctgttactaggagcttgttaggtttggtcaccagcctgatgacctgatcaaatgttgcctgtcaacttggagtgactgtggttgtttattttgttatttattcaccaataaattgagttggttcactctgtgtatttttacagcatttggccttttcccaaatatttgccttagtttattaaattagcttctcagttataagttaaagtgtgtgttgacttttatgattttaattttacaggcttggttggctttgaatgaccagatggcatctcttgagtctgtgagcaggttttgtttcacttaggacttcacccccaccccgttcttaaaaatggtgatatgttaaatccactttaaatctagtatttgattattaattaaaatatctcttatgcattttgaaggtaaaattacaattttgttccatgtgaaatgggagcatgtgttgacaaaccgttgattaacttgagtggatttgggttaatctttttactctgctccatgctgcctgcctgtagggtaatataaatccgttgggctgttgctaggctcagctgcttctgagtagtttgacaggtttcatcctgttaaaggctctttttctctaggccctagattctaggggtattggggtgatgctggtgaatggagtctaactgcgtatttgcttcttgcttccagcaccaattgtggccaatggagtgaggcaaagagcactggtgtggctaaattactccttctgcagtccccagcatattattggatgctctttttccctctcccagagctttccttatcttctaatttcaaagataagcgttacctgtaggcaatgcacccgacctctatccctgttgtggtagctacacataaacatagccatcatggccaggtcccttgggtggtcacatttcctactgttctgatcaccttccactatcaacactgaccagtgtgcctggctaattccaaaccgtgcgaatggctgtgttgcctgggctcatgaagcctgtcaggaagagctgtggacagatgatttttgaaaatgagggtgattgcaaagggacagaaagtatgagacatcgtggatgctgtcttttccttaggccttcagtcatttgaagtcaggacttccaagcctggatatccagtgggcttctggggaaagtggatcagagctcagcaaggattgagccccagcgacttccaacaaaccatcccatccaacagaggctgtcttcactatgcagacctttgagccacctcagaagacaccagccttcatgctcatcctttacacgtctctttggttcatgtaccagtcccttgtcctcctcggtgaccaagataggaatggtgtcaacggatgattatggcatgacatagagtaactctttgcataaaagagtggacagggcaggcacttaacacttgaggacccctgttccagtcagccacagatgtatttattaggccttaaactgatgggatggttcttggatttttcagtttaaaacctatagggggactttacttttggccaaatgctgaaacaagtattggatttatcttcccatgtgaaaaacaaaatatggacaaaataaatgaaacaatgatttgtaagacactggatacatcagacaacaaaggccaatgattcctgagagataggaaacaaatgaggtgagacctctgagttttttcaaactgccttaaaagagtttccaagctatagcacaggaaaagggaaccatgtggagcccagcagactccctcagttgaggattggatctgagagtccagagagactaaggccactagagatcatgggatacagtactagagaagagacagctgcaccaagacataactctggaggtgtacaaagttctgagaactgatcagtgtaaagaagctgcctgagtctggggaaagcaccattcaaaaggagcaaagataactgtttctggtgctcacacggggccagaaatagtgcttctgccaccaaccagactggaaaacttcaagagtcatggagcattgggtagagtagagtacatagaagggccttgcttgcttagtggggaataactaacccaactgagcatggctttaaatctaaaaagcaagatctgatagggccgaactatttctgagtaacttagctgtgtcccagatcaaagctgattttatagaaatacaaaactatcactcaataggcaaaaaccagtgtctggcatccaaccaaaaattaccagatgtacaaagaagcaagaaagtacaacccataatgggagcaaatcaaccaatcaaaactgacccagaattaacgcagatgttacaattagcagataaggacattaaaatggttattataactatattccatatgttaagcagaaacatacttgtctttaaaaagacaagtagaaaagtgaaaatggagaaaataaacaaaaagaccccagttggatttgaaacatgggttgcttttctatgactccatccttatgttacttcaaccgaacccatatgacctgaacctggcccctgctaatttatctgaaccataagctcctacttatcttctcagtgctctctctagcccagactgtggggtcatccctgcagtgctaactcagtgatgcccaggggtcacttgaccctttaatcttccttcatgcctgctgtgccaatgcctgacctgagcaatcatctcacagatgattggatgttgctggctggacccatggcatataaatttttggcattaagcagatacttagcaaaaacggaagcattcttcttgtgttggtttctcagcaattctaaaacttttacacctgaaagccccttcccactttttttcccactcatgttctctttctcttactctgctgaaaaaatcctgcaagatctgccatctttatgtgcctgctgtccctcagtgtggccatctcttttcttcctttctgctggctgccagggaacctctcttcctacagaagctacaccttttcctgggtggatccatcctctctggcctcttaacacattctcacatgttcatttacctggactgaccacactttgtttagtcccttgctctcctttggctgcttctcctgtggtgatttaaacagaaaaaaaaaattcttcacctgatcatagtatcctcagctaccatcctatttctttcccccctttgcagccaactatcttgacaaacgttttgtatctgcgtctcaccaccaactttctactcagctcctgcttcgctcttgcccagacactttctaattacaaagtgtacctctcctttctctgcaatctttcgtgtgaccgtgatgctgcatttggttctgtttcatgttctccctttgggcacctcaaacgactgcaaacccttggcctctattctgagtggtggtccccagcaccccagctccttttctcccattcccttcagtgatgacaaccttcatcatttctttttaagcgccccccccccccccgcccatgtaccctgtgcctatattctaagcaagtggcttagatcctacttaatctggaaaattgcatcaggtgtgagtgacttccctcaactacactgactttatctgcattcccacccatcctgagtccttagcctctgttccagaggatagttgtcattgcttttgctaaagacctgtgcttcctcacgaactttgcttccctttctttaacttctccatttccttctctcattttctttctctgatctgtaaacatggccaggcctcctcctcctaaaaatctccttgggtactttctaatttgtctcctttttttcatccggatatgttgagagtacagcctacatactaattcttcacttcattgccttctattttctcttccagctgctacttaagctctctggcttccctcaccactattctgctcaagtagcgcttgataaggtcactgagggcatctatattgccaaatccagtaagcagtttccaggccccatcttattggacatctctgttgtgtttggcagtgctcatcactcttccacctcagagcccacactttttgacttctgcaactctgaagtctggatcatcccattcttcccttctcttcctttctcgtatctttgggcttctctaccaccctctgcagtttgtatccttgggggatccatcttcagcccgccgctgtccccattcacatctctggtcatctgtttcagtctgggatttcactctgcctgttgctctccactcctccgtctatatctgcagcccaggtctctcccctgagttccagcttcctgtgtccagtcgtgtgctgggcactctcaatgggcttcatttaatcttttttttttttttttgaaatggagtctcactctgtcacccaggctggagtgtagtggtgtgaccttggctcactacatcctccgcctcccaggttcaagctactcttctgtctcagcctccctggtagctgggattacaggtgcccaccctcatgcccagctaatttttgtatttttgatagagtcgaggtttcaccagattggtcaggctggtcttaaactcctgaccccaagtgatctgcctgcctcagtctcccaaagtgctaggattacaggcatgagccactgtgcccggcatgggcttcatttattcttttttttttttttttgagatggagtctcactctgttgcccaggctgcactggctaagttttttgtatatttagtagagacggggtttcatcatgctggctgggctggtcttgaactcctaacctcgtgatccgcctgcctcagcctcccaaagtgctgggattacaggcatgagccactgtgcctggcccatttaatctttcagttagcaaacatgcatcttctgtccccacactcttgaatatgaaatgttgaatataatgaataaaagcattccccctctgccaagcaccatactatcctgattctgtttctatccctttgtccttcctctgtttccttcctgggctcttgtgttcttcactatcttagaagtgggcgcccattctcatagggcctttcatctgcagggacactctcagtggttaccttcaggccccatttttcctgtgagccctggttctgtgctgtctttcaaactcctctggctcagaccccagttgtcattttcctcccatatcagcactgtcttcactccatttctgtcattgccttcttctgaacactgaagcttgaacacacacattttccccacctacacattttgtctttcctactaacttaaaagtaatttgaagtgtgtgttctattgtgtacctgtgcacctctccctccccaacatggtgatatgtgagggtataaagtgaggcaaagaaaaggcaaaaagatgaagttcctgtcatttcccattttaacaagagttgcagagggtccccctaccccccatctcccacagcaactttgacattaagtgatcacttcaggggtggtatttgtggaagaggtttcacccacacttccatttccttaggagagctgaggaagggggttagccattgaaggatgaagatatgtaatcaatttaatgaggactgtcatttggggattttacaggaatttttgactgcatttactttaggctacactatgtggaatcttcctttccctttgggtagtggatcccttaatgccatatttgtctggttccatatctttcctgtcaccttcagttttttaaaaaaattgtgataaaatgcacataaaaatctaccttctgaaccatttgtaagtgtatagtccagtggtattaggtacactcacattattgtaaaaccatcaccaccatccatctccagaattcttttcatattgcaaaactgaaattctatacccattgaatactaattctccattccctctccctccagcccttagcaaacaccattctgctttctgtctctatagatttgactactctaagtacctcctataagtggaatcatacagtctttatccttttgtgattggcttgttttgctttgcataatgtcttcagggttcacccgtgtggtagcatgtgtcaaaattcccctcccttgcctcttttttcttttcttttcttttcttttttttttttttttttgagacggggtgtcactgtcaccctggttggtgcagtggcatgatcttggctcactgcagcctctgccccgcccccgggctcaagccatcctcccacccagcttcctgagtagctgggactacaggtgtgcaccaccaagcccagctaatttttgtattttttgtagagacaggattttgctatttgcccaggctagtcttgaactcctgggctcaagtgatccactggcctctgcctcccaaagtgctggcattacaggtgtaagccaccatgcccagtcaatttcctccctttttaaggctgaataatatcccattgttagtatagatcacatgttgtttgtttattcttccatcagtgggtgcttgggttattcactttcagttttaaaacaatctcttgttagtatttaatattggattttgtttatgttgaaaactttggtctcaaactcagttgagatctccttggcatatatctcccagcttggctcagctgctgggcgtgaagaagatgatgaggccttgtcctgagatacaacaccccctaacctcttcccagctctccctcctctctctttcctctccccacccctgcttctctctcctgtccctttccccctcccccaagagtgatagtaagtaaactcacattgtggcaacacccgttggagtctcctgcccttagctttctgttggggagagaatagtctgccacctgaaacactgcatgccctctaaggccaacacccctttcctttctcagactcattctgactttgaggaagtagtccagaatagtggaagggcttagcggtcctgtctccaggaagcccttatgggaggaggctctcagaacttaaattgtggggtactttgtgcctttgtcctcacgtgaaattctgggacaacaggaaaattgccacccaacattgttttaacacttaaaaattagaggggacctagactgatatgatatttataagggctgtacataggagccctgaaattctgtcttctctctccatccctttttcagtatccttcatacttgaagaggaggggttggggtccagtatagaatgggattttaaagtccctttattaatcattatttccagaggcgagactgctccttaaggatagacgtctttgaaagggcttccttcctgttgtctggacccaattgctttaccacatagaaccgtcattactttccctctttttggcagtcttttttgagctctcattgttggtctaactgaaagcacctgatttctagggctttaactgaaagcacctgatttctagggctgtcagtgcagcacagcagaggctgctcttcaaatggtctggcttagtggtttctaacccttttgattaagaagaccactgctaaatttcccagagcctcacctaagtgttgtactttgtgtctcttttgactaatcatatacttaatgacaaaaatttggtaaattagtgaagcctttaattgggcatatttttaatttatgaaagtatatcggcacttgtgcatatgttaggcttatttttcattcggagacagtgcttggtgcattgtagatttatggttccttataaggagtcctccttctgtctttgaagtcttagacacacagcttgggaatggtcctaatagactgtttcctttaaaaaaagaaagaaagaagagcctgtagtgtgattgaatctctatctgacaaggcttaacagtctaaatgaaaacatctaggttgaaagtgtgtttgtgtttgcagtacatttgtgtatgagggtttttgtggatgttttcaaggactgatgaggaagccacacacgggttatttctctgctgaaagggtagaggccaggtcatctgacctactgattaaacttgaaaagggagagtgtgtcttttgccatctcaaaggccagctgtttattgaatttctccaccctgcaattgtcttacatacggaatagttcctggagaaagatctaacatctgcgcaggtctatcctgttctgtggctgtgtttactaaagtgagttctgcgcttacattcacacactgcaaactgcacgtacgatgtaagtgtacttgtcatgtagagttttaccaaaactatattagattatactctgaagcatgttttgcatctgacaggtcgagctcattcattcagtattaagtccctcatgggccaggctctagcctgtgtcctggtgataaggaggtgaatgtgacagaattcctattttcaataaactcactgtctggagaggaaggtgatcatcaaaataaattttagcacgatgtgtaatgattaatgcacagaggatctttggaatctccaggaagaaggcctgacaacctctggatgaaggatgggatggaagataaagtggacttagagagatgtatcgtgtggctctgtctttatccctggaaaggttagcctaagcatggggtaggtgctggtttcttttgctgagaaatgtctcagagaacctcagagtagcaggaggcctttgtgatagattggccagcagtttttatttccctgacctttcagcatcaaaaagtgccagttggaccctgggttttgccttggaattagtaaatagatagttcaacagcaatggttgaaaagcctcttggagtctgtcccatgagagtaaggatgttaattctgaagcctgggccattttccatcctgggaattatactctgccccttcctaaattcccattgtggtttcaaatgaagaggccattgttcactttccttcctaaaagaagcaatatatttaacttctggctctttgcctgactgatggcgagttgatctctctgaagccaacacccgtggcttcctatcaagagaaacactctgcctccatctgatttccttcttgggttgaagttatttagatcctacactggctcagtaggaggcttgcctgccgttatgtcctactaggtggtgacagggcccttgattccctccctgtgtttaatagaaataaagacagagtcttagcgctttagggcagctagttattctcccaaagacctattataggaatttaaaagcaaatgtctgatgtgaaaatctatgctattttagggactttgaagcacaacacaaaagagtatcactttgttgaatagtttgggtccaggcaggtgtcctagagcagaagttttcatttatttttaagcaacaaaattctttctttcccaaatgaaatctcctacagaatccaaatactgaagggtttctcaaccccagcatgcttggtattttgggccagataattcttgttgtagaagctgttgtgtgtgttggaagatgcttagcagcattcctggcttctaccctccagatgacataagtggcacccacattctctagttgtgacaacaaaaatgtctccagacattgcaaaatgtccactggggagcacgatcacctccagttgagaatcaatgcaatataatctagaaaacagacttttaattaagctcctcctttagaactctgcccagggtccctgactgttagtgtttgagacctggtggggcgttctgggctacacagatgcactgtcctagagggttaagttgtcattttaaaaacctggggcatagagaacttgttataaacaaagcaaaagagctaaaattagacaaatccacaagtactttgaacccacatgtacactaaatatttctgtctatgtattatgtatacattgtgtacttggatgtgtagcataagggaagagtcgaagggtggtgtctgccttactccttatgtgttgaggtttggctaccacaatttgccctgttttgccagagatgccagttgaaggcctgtgactgacagcccagtgatagagtcaccctcactgcacaaaatactcagcttctgtgggactcagtggccctggccctgctcatgggcattccgtggtgagtgggccagcacctgcagcctctttcaaccagactggttggttggagcttggaccatggttattccaaggtggatttttatccttctgccctttgtactaaatgggtcatgtgtgcctctgtacgtgtatgtgtgcgtgtatgtgtgtgactacacgtgtctgtgtctgctcttctcctttcagaagcccagagccactctgggcctggccactctgagcattggttgtgtgggggatgctgggagcttggcacatgctactcctcctttttcctcccttagaatgatgaaagtgttgttggagcctgtcccacagacagaaactgtacctcatttatgtgggcatcagtataaacaagaacaataccactatgtgagtcaccctcacctgcggggagacgcataggctcagggagggaatttgctgccagagggtctcagcttcagtctgtctccccggcagactcatcctaacttcattccacagctcaagtgcagtgtgaatcagcaggcagcctgtgcctagctaaaggactctctctgtgttttgtttgtttggttgcttgtgaagatctctgggcacatacagcagtgttttattttcccaaaagatcgcatgaccactacagttagccttgggaacagattgagtaagcacaattcatttgatctatctgcagatctccagcccttctaagaagctcacttccaaaaatgtttcaggagtcctgtagaagtttgcttagagttccttaaagaggctaagcgtcagttgcaatatctctctatcaaccccatttcccccagtgccactgccatgggctggaggagtgggtaacttgcttaggaacttgggtaagggacctgaagctccccacccactctggccctagataggctaaagatttgaaattagtttgatttatgtaaatctctggtgtgaattattgctatcagataaatacacagaccattgaactgaaaacagagcctcaacacaggttgccattgctaatgttagtttatagtagccattatctagtagtgcctttatcagtgaccccaggtgtataattggtttgttgtgaaagaggagtggagttcccaggatgctttttgtcccccatggttcccttataagtgactgtatttcctgagctctctgcacttttgtcaccttttgtcatcaatatatacaatcagtttcaggcaatattgatagggatgtgaaaactaaacactataagattgaatggacttaatagctaggagttgcagaaaatattcctacatgtatacataacttttataatgtacaaattgttcttatgtgcatactcttgcataatcatcacaagtcagccttgtgacttaggctctctcttggccttatcttgagagaatttatgaaatctgataatattgcagccccgtaggaaaacttttcagtgccttgctatgatctctgaaggcctatactcctccttcccttcctaggctggtattgacctgctttttaaatctcatctcctaccagaccttcatattcattgtagttctagcagtagtgtactacttgtaggtacctgaatgtggcaagctcttttctacttcttactaatttatggaaacaccaatctacccattcattctttcactgctacttgtatgctaggcattggtgatatcccctaaccccctggtccttggtctaagcaggcataggtggtgctgtgtggtaagagctttggtcttggtgctaggggagctgtaaggagggcaccaagccttgacttgaagggattagggaggcttctccagtaaggcatctccaaagtaagtcattttagtgtgaggtggatgggagagttaggagaggagaggaagaaagagattagggcaggtgtggaccccaggctagacagggatggatgagtgataaggtcttgatagtgggtagtgccagatgcaggtgtatagttttgaggactttgccctaaggcctgaaggcagccattcaatgtttttgttttttgtttttttgagacagggtcttactctgtcacccaggctggagtacagtggcgcaacaatggatcactgcaacctcgaactcctgggctcaagtgatcttcccacctcagcctcatgagtagctggggctataggcatgtactaccatgcccagctaaatattttgtttttctgtagagacagggtctctctatgttgcccaggctggcctcaaactcctggcctcaagcgatcctcccctcctgccatggccttacaaagtgctgggattataggcgtgagccacagtgcctggccaattaaatgctttttaagtaggagcatagcagggtgcagattgctgcaaagcacctttctagaatatatcctgttcccctcattctccctctagtactttctagtatataccccgttcccctcatcctccctctagtactctgctgcttaggctttaggttcaattcaggcatcactgtctctgtatgtgctccagattccccgggcaccatcgggggtccctctgccccacagcaccctggacatgcatactggagataaagcagcaattgcttttgtattttaaccgtctagttgtgtgtccttcctcctagaccactggttttcaggatttaaaagtgtagattcttgttgcccaccccagatattcttacttactgtgggatagagtctaggcatccccattttttttaaaagaagcagaaacattgcagtaggctaatcttattgagggcctggtttatacattatgtgtgtgcacacacgtatgcacacacccccacatacttgatctcattcatgcttatatctgtatttcttttatttttattttctttgatcctgtcattcaaatatccatatttcttaagaatgtccggtataaatttgctatgctacaaatgtttgattgaatgaatgaatgaagttgcccaaatttacgtgtgaagatgtgttggagcctaagttaaaattcataggtgattccgaggcaaggccctttcacagcatcactcttacaccacagttgctacactgagatggcctttgaaaagcaggcagtcccactgaaccacagtatcctagagactaagaaacggggacaagagatctttaacttgcattttataattttcagtggcacatcaataatctgcagggatacactaataagatgggtattggacactcattacgacagaccctggaggatccaaaactgtaaaatctagctctgatctcctacaaatttttggtctacttgagggtaaaaggcagaaatacacagacagttgaatgattgtgccagatcgtgacagttacctggagtaccgtgcacagaagggcaatagaatgatgcagtgactgagtaagaaagagcatgccattagctggagtggtctgcagatacctttggatgaggaagcacttttatgaggtttggctttagaaaagtgagaagccattccaagtgggaggagtgacatgagtggaatcctggcaggagatgggctatgaatggtgagggcatcagtttgacaggaacataggtttgtttgtgtaggggagtgatggttgacacctaaagggagtgctggttcaggattgggagggccttaaatgataggtggggctataatacagttggggatgtgtggcacattcagcaatgtaaaagtctgttgtcctcgaccccagatccattcaccttattaatgaaggtcatgaatttttaaatataataactgatatggataggttttgtgtcctcacccaaatctcatcttgaatcataatccccaggtgttgagggagagacctggtgggaggtgattggatcatgggagcagtttgctctttgctgttcttgtgatagtgagggaattctcacgagaactgatggttttataaggggctcttcccccttcacttctcccacatactctctttctcacctgctgtcatgtaagacatatctgcttccccttatgccatgattataagtttcctgaggcctccctagccatgtggaactatgagtcaattaaacctcttttctttataaattacccagtttcagtatgtctttatagcagtgtgagaatggactaatatagtaaattggtactgatagagtggggtactgctataaagatacccaaaaatatggaagcaactttggagctggataacaggcagaggttggaacagtttggagggctcagaagaatataggaagatgtggaaaagtttggaacttcctagagacttattgaatggctttgaccaaaatgctgatagcgacatggacaatggagtccagggagaagtagcttcagatggagatgaggaacttcttgggaattggagtaaaggtgactcttgctatgctttagcaaagagactgacagcattttgcccacaccctagagatctgtggaactttgaacttgagagagatgatctgaaattggaacttatttaaaagggaagcagagtatagaagtttggaaaatttgcagtctgacaatgcagtagaaaagaaaaacccattttctggggagaaattaaagctggctgcagaaatttgcgtaagtaacaaggagccaaatgttaatcaccaagacaatggggaaaatgttcctagggcatgtgaaggacttttgcagcagcccctcccattacaggccccgaggcctagaagggaaaagtggtttcatggactgggcccaggaccctgctgctctgtgcagcctaggacttagtaccctgcttcccagccactccagtcatggctaaaatgggcaaatttttaaaaagtcagctcaggctgtttgcttcagagggtgcaagccccaatccttggtggcttccatgtggtgttgggcctgcaggtatacaaaagtcaagaattgaggtttgggagcctcagctgagatttcagaggatgtatggaaatacctggatgtccagtcagaagtctgctgcaggggcaaagccctcatagagaacctctgctagggcagtgcaaagggaaagtgaggggttggagcccccacacagagaccccaccgtggcactgcttagttcagctgtgagaaaagggccaccatcctccagaccccagcagatggtaaatccatctgcttgcactgggcacctgaaaaagccacaagcactcaacaccagcctatgaaagcagccaggagggggatataccctgcagagccacagtggtagagctgcccaaggctatgggagcccaccccttgtatccacatgacctagatgtgagacatggagtcaaaggagatcattttggagctttaagatttaataactgccccactggatttttgacttgcatcaacctgtagcccctttgttttggccaatttatcccatttggaatgggtgttcttatccagtgcctgtaccaccattgtatcttggaaggaactaacttgattttgattttacaggcttataggcagaagggacttgccttgtctcagatgagactttggactgtggacttttgagttaatgctgaaatgagttaagactttggtgaactgttgggaagccatgattggttttgaaatgtgaaaagatatgagatttgggaagggccagggctggaatgatgtggttaggctttgtgtccccacctaaacctcatcttgaattctaatccccaagtattgactagagacctggtgggaggtgattagatcatggggggtggtttcgtccatgctgttcttgtgatattgagtgagttctcatgagatctgttggttttataaggggctcttctcccttcacttctcccacacactctctgtctcacctgctgccatgtaagacatgcctgcttccccttctgccatgattgtaagtttcttgaggcctttccagccatgtgtaactgtgagtcaattaaacttcttttctttataaattacccagtctcaggtatgtctttacagcagtgtgagaacagactaatacaataaccatgttctcttctttctggagatctccagccacatttgacttccaggtctgtgggaagcagtccaaggtgcaacctggaacactttcatttggcttcttcatgtagaggaacatttacatgtcgctgcttgttccttctacccatggcctacacacactgccaagctgtcaccttccctgttgtgcaatgtgtttgccatcaccttcaatgaaaacaatttttttaatgtcagaattttcttagttattaatcccaaacacagacaccagaaacatgatccagaataaagttttcagttcacactgagcttgtcattgctgaagtaagactcttagctctttcaccagtatggacaaaattcagtaggaatgttttcatcacaagtcttacttcttaataatgctttgatctagggtaatttctctttagtcttggatggtaattttgcctgaggaaagtccaagaggtcttatgtgaagatttctgttttgtttagagtttgccacaaatactggaaggagaaagttttctgtaatttatacagctttacattagaaggctatagcttattttaaaatggtttctgttcaaaaaattttcacctacaattatagtataaagtgccttgtccttgtattcacagaggaattttctcatacaactacaagaaaatgtggaaagtttcgtctgagaaaattcaactttttcatctctcataatttactgcttcaggaatgcaatttaccaaagtggattagaaactgtttgtaatggggaaatacgtgcactctttgaaggcagttgtcgacaaagagtcaaactctaaaatatttgaagaggtttattctgagccaaatatgagtgaccacagcccaaggcacagtctcaagagatcctgagaacatgtgcccagggtggttgggttacagcttgattttatacatttcagagggacataagacatcaatcagtacatgtgaggtatacattggtttggtctggaaaggcaggacaacttgaagcaaggggtggggagttgtatgggggagggtgcttataggttacaggtggattcaaagatctgcttattggcagttagttgaaaggataaattagttattatctaaggacttagaatcaatagaaaggagtgtctgggttaagctaaggggttgtggaggctgagattcttattatgtagatgaagtctcataggtgtcagcccttagagacaatagatggcaaatgtttcctatatagacctaggaaaagtgctagactcaacagttaatctctttaggattgggaggacctggaagaggaaagatctagttatgttaaagagattctttacggatgcaaattttcctccacaaaaagatgctttgcagggtcatttcaaaatatggcagagaaacatattttgggataaaatattttgattttcttctttggttgttttgtttgtttgtttttgagacagggtctcactctgtctcccaggctggagtgcagtggcgtgacaatggctcattgcagcttcaaccttctgggcttaagtaatccttctgcctcagctgcccaagtagctgggactacaggcatgcaccaccatgcccagctaatttttgtatttttgtagagacagggtttcatcatgttacccaggccggtctcaaactcctgggctcaagtgatccacctgcctcagcctcctggagtgctgcaattacaggcatgagccacttcacccagctgttacctttatctatcatgtgatgctagctgagtgtggtggctcacacctataatcctagcactttgggagactgaggcaagtggatcgtttaagaccaggaatttgagaccaacctgggcaacatggtgaaacctcatctccacaaatatatatatatagatagatagatagatagatagatagatagatacacacacacacacacacacatatatatatacacacatatatatatatatatatatgtctctcacacgatgctataccagagtcaggttgagttggtatttttgtagagacagggtttcaccatgttacccagactggtctcaaactcctgggatcaagcagtctacctgcctcaccctccgaaagtgctgggattataggtgctctgcactctagcctttgtaacaataagggtctattctgtcggtttcaggtctctattttagtgttaatgctggtcagttgagtctaaactccaaaagggagaggatataatgaggcatgtctgactccctctttgcgtcatggctttcactagtttttcaggggttttttttaatccccttggttgagaaggggtccattcagtcagtagggggagcttaaaattttatttttggtttacaaagtgaagagctttcctcttttaagtcctcaccatataaccagtctctaccagatgctgagaatagcttaaactttcttactgtcttatttgagcctggggtggtttgttgtaggaccttatcaacatagattttttgataattgatctactttacttcgatgtctgagtaaagctttaacctggcccttaaacaccaaaaatgctttagtgggagctcttgttttgggaaaatgaaaaatttctgtgtctatcaatcacggaaagtattccccactggtttgattctgaaattcaatcattgcctatgaaagttaaaaacatttttttttccctgtagctagcttttactctgtctctttaaaatacctttttttggaggagaggtggagcaagatatgtgtaactatagttttttctttttttgcttagatggtttaaagaattctgcatgtcatagttgacattccatcattatcctgtgttccacagtcaaggccaaaggttaaaaataagttcttaaaggaaacaaaattaaagcaagagggaattacctctgaattgttttagggactcctagcattttgcatgagtttctgttggtctggagaatagaaggaagcatgaaaggtttcattccttgcaaatcaagtgaaactggctcctaccctcttcttcaatacaaacatgaaacagaaaaagtagactggaagaccagaaagggcacagatttttataccattttcatcaggattactatgttcatgttatggaaccaatttgtaagttttgggtaacagcttaaatagaaacctatagaactgaggcaaccttctgtttctcaaagacagatggtgaagcaacatttataaatgctttacagttagagagcatatgctctcgtccactgttttttgtctttgtgatcaaagaaggatttgaggaatttcttttaaaaatcagtctgtacaataactgagtacattactttcagataatggagaatagtcacacccattgttttcagggcctcagggaatcctagaatgtgtgtcttgtggactgtgtcatagttggctagttacagtggcagttactaaaatcaaatctgtttcaattaataaagaacttgacaatgaaactaacaagacccattctaaagacgccaggaaaataaaataaaaacccatatgtactaggaattgtaaatagagaggaagcagaaacaatgtaatttgaattatcttattaaaattttaaaatattaaaatttaactagtttctcttattcagctagagacggtataaaaacttggcagaagtgtgatttttgtctatctgctggccagaataatactatatagatgggattttgtaggttttagtctctctaccccgctgtcttccaatatgtatgcagaaaaagtaaacatgatccctaacctttctgaaaccttctttaccttcagtctacacatacatagtcttgggcaaagagttatcaggtaaattccatggaatcaagagtagaggcatatgttgcttttcttaataggaaaaacagtgactgtgtccccctaaataaagtcatgattcaatgaaaagacaaacagcccaattttaaaaaaatgagcaaaagatttgaacagacattttctcaaaagaaatatgaatgggcaatacacacatagaaacatgctcagcaattttaggctttagggatatgcaaattaagaccacaatgagataccactagaaaggctaaaatgaaaaagaccaacaacactaaatgttggtgagactgtggagcactagaacttttcatatttttagtgggagttcaaaatggtacaaccgctttgaaaaatggtctggcagtttcttacagaactaaacagaccactaccttgttacccagcagttcttaggtatttacccaagacaaatgaagcatatctctgtcaatagaaaagcagatgccagccatggtatgattttgaacagccagtggaataaaagaatagggactatatctgaccttgctgttagagtagttaggcagatatgagcggggcaggagaggcccccctcccccacaggaatgtcaggcaaccatcaggtgatggtcaggtggttgttaaactgtctcactaacatactagttggtcacagcttgcaccagggaaagcagactcccagtagatagaaaacaccttaagctcttaatcagcagcttcctttttttttttttgagatggagtcttgctctgttgcccaggctagaatgcggtgtcgtgatctcagctcactgcaatcgctgcctcccgggttcaagcgattctcctgcctcagcctcccgagtagctgggactacaggcgcgtgccaccacgcctggctaattttttatatttttagtagagatggggtttcgccatgttggccaggatggtctggatctcctgacctcgtgatccgcccgcctcggcctcccaaaatgctgggattacaggcgtgagccgcggcacccggccaatcagtagcttcctcataggatctcaggcgttggatgagtgggctcaaacttgcatgctaagagacaaaatggtggagtttagctggtgtatgaccttcctctaggaacactcaattggtaagggaaaaatgcctcaaatgaacatgtgcacagcttcagtaaacacactgtacatgcggcccttcccaagtgctggcaggccactgcacatgcggacagcccaccccaaggaaaaaccaagggaggagagacacaaacctcagcaccatgccattgtgtaaaaatcccaagtcaagcgtcggacagggtcctcggatctctcaaattgcccacttggccctcttccacgtgtactttgcttcctttcattcctgttctcaaactttttaatatactttaactcctgctctaaaacttgccttggtctcattctaccttatcctctctggccaaattctttcctccaaggaagcaagaatcgagttgctgcagacccatatggattcgctgctgctaatgttgccatttggatttttttttctttttagagtgttctagaatgcatgcttagagaagggaatgtaatcctaggacaccactcagctctgcaacagtatagctctgcagtaatgagtaaatgctgtttgttggtttactttaaagctctgctactgaatatatacaaatatactgttatattttcctggtaaaaccttttattatacaatcacttctttttatttctagcaattctttcttttacagtgtattttatctgacgttaatgtggctgcattgcatgtcttttggctagtatttgccctgctttgcatcttctttaattcatttactttctactttttctacctatgtcttaggtttgtgctttataaacaacaggtggttagatttcctatttctagaagtttattgagattctccctctaccactgtctctaccaattccattttttcccacctctattggtttggaagatagaatctctctctctttttttttttttttaagtgattatacttggaattttaacatgtctgtgtaactaagtctaaagttagctaccactttaccctcctactgagcaatctaaggatgttagaatgtttttaactccagtcactttcctcctggcttatgtgcatttccttgatatttttgatatctttttatttttcttttgaagctccattaactagatgttattagttattccatccttctttgtttctatttacttacatgtttataattttttaacataccactttcttgtatagctcaaaccttccctcgaacatttccctccttcttcaagtagattctcttcaagtacattctttatttagcgaaggtatttggtagtgaacaatctcagttttctgaaatatctttattttgccctcattctggaaagctagtttcttactttatttttttaatagacagagggtcttgctttgttgcccaggctggtcttaaacttctggcttcaagcagtcctcctgccttggcctctcaaagtgctgggattacaggcacgagccactgcgcccagcagtaacgctagtttcactgggatcatggactcttaagagctagaaggaacttcactgattatttgactcagccttttccatttccagaaaagcctgccaccaggcacagaaagaatacatgacttccagaatccctcgctatattgtccagactggttttgtactcctggcctcaagtgatcctcccacttcagcctcccaaagtcctgagataataggcgtgagccaccgtgatcccctttacctttttctttttttttttcctttatttcttcttaataaaaaaaaagtggggggggatacatgtgcagagcgtacaggtttgttacataagtatacgtgtaccatggtggtttgctgcacctattgacctgtcctctaagttccctcccctcaccccccaacctcttcaaaaaaaaaaaaaaaaactatcaaaaaatggtggccgaggttcaaagctctcaccttggttttgtgataaaggtggttaatctttggtgttggatttcaaattagtctgtttacagtgagcaacagtacagcagttttaaaaatcatgttgaatcagaaacatgaagaaggcagcagagctttctctccaccatgcacttggagaaggaaatgactcggcagcatactcctcatggctaatatcctttaagatttttccaaaatcatgaaaccagaacttgagagcttaaaagggactttagaagtctaccagtggataagagagaaaaaaaaatcaaaagggaaatggaataagccaaactaaagggcaggattcttttagttctcagcaggaaacatatgtttatctggaaaagattttggttggacaggttgtttgtgtaagaatcttttttgtgaggaaggaagatcaacctgggcttgaaggctggggtgggggtagagagaacagtccctgagcttcaagtaaatgagaaaaatacacagattttaaacagaggagccctgctttcacggggatcatatgatcgtgctatcagcttacttttaagttgtgataatgtatacatactttatgaaatatgattaaatggtaactttagtattagtggctacaagaacagaaacagcaacttttaaaaagatatgaaaagatgttttgggtgaaagtagttggctgcgcaacacatagagtataacatacatcattaatttaagactgtagatgtacagtatatatttggcatgtacaccaggattttcagtgattattgatgtaataagatttatgatttttaaaaagaaactcttcatgatagttttctgtaccacttacattttccatagtgatcatcatattgtctttataaacaatgacaacaataaatcaaaaagagagatcttacatggtgcctcttctctgacagctgagaccacatcatagctacgttgttcccttacattgcatttacattacatttaaaatgttatcaggaggacagaggctcatgaatgagacatgttctctccagttaaatttagtaaagaagaatcagagaaaaatctccagataactggaaaatgtttacattttcaagtatataaaaccaggatacattatcttgtttaagcttggagttgacaataataccattttgagatgtttttcagatagaatgacagtgagagtcatagtggggttgcacctccacatgatgcaacccaaatgtgatggaacagaaacatttttcttcatcatcctgaaaccgagcagtgatgatccgctgaggaatgtttaattttcatgtattaaaaaatgaagaatgtctgacctactgttaatgagaaaaaaaaacaccaaaaaggaagaaagaagaagtggcagctaaaagcctttttatggatgacgtcaatagaggaaaatgaaatattcatagaatcacagcaagagaataggaattctgaacatttttgtagaaggaaactgtaggattcttgcaattgatagtaggacaggagggaatttccatccttatgtgtgcagaaaggagtagacacagtgaaatttgaagactattgtaaacattttctacttcacttcaccttgaagaagtctacagaaagcatatatggcatagctgggcagagtggctcatgcctgtaatctagcactttgcgagaccaaagagagaggatcacctgagcccaggagtttgagaccagccagggcaacacagtgagaccccaactctactttttaaaagattttttaaaagcatatatggcagttaaatttcagtgagaaatcaggaccagggtaaatgtaaatacattactatagcagataaataaatatggatgccccacccatatttcctttcatcccacaacagaaagctggaaatgctgaaaaattaatacctcccacccctgaagcagccatcagccagtgaggaatgggagccagaggataaataacccaacttcctcacccgctgagggtgttcaaccaggtccttgaaattcccgacaggaatcgagcctcagttgcccaccctggaaacctgctcagtaatacgcttatcgttggtttccttccctttcctgtctcacttctgtaatcccctggtgcatctgggggttccttcccgaataaactacttgcaacttaagtccctatcttgaactctgctcctgggggaatccaaacaagaacaggtggagacagagtagaacaaggataagcaaagcaagagaggagatctgaagacgtctctaaggttgtttgagtgactccaaggatagtggtacaattagctaggagaaagagagggtggaggaggccgagaagagggttcagcccaacaaatgccaagttttaggtagcttggggataccttgaagagatgctgacaagctacttagaaataagtttattagctagaagccggagctggccaggcacagtggtatgcacctgtagtcccagctactctggaggctcaggtgggaggatggcttgagtccagaagctgtttgaggtcagcctgggcaatgtaatgagacctcatctcaatatcaacaaaccttatctcaatataaatgaatgaatgaatgaatgaatgaatgaatgaaaccagagctatagctgtatatttgggaatcctcagtgtacaggcagttgatgaatgaacatccagaaagactagaagcatggtatgcagggaaccttggagcatacacatatttaaaaattgggtggaggagaaaagccagtgaaggagactaagaaagacgattatagagagaagaaccagagctgttattggagccaaggcctctttcttcaaggactgagaaggggagagtttgtactttggagtttgcacagatcacagacatgaaaaaggaaagatgatgatgagtggaaaatgggaggtcaggactctcctcccatcctgatgtggcaagaggcttttctcatggttctggatggaactttggccctgttgcagatgctcacatgcaacgttctgttctaatcactgttctgctggcagaggaggctggagtgatgagtgagcatgggctcagcttgcgtggatgctatgagccgtaggtcctactcaagagagtcagtctagtaacaaattattttcctctccttcttttgccatcccatttagtttgcaggatggttggtgtttgtgtgggctgagattcctcagagggaaccaaagccctgagaaacatgtgtagcagctgttgatttgggtctccacagtgagatccgggtctaatacagtgagtccaaccactttatctgagtttggaaataactatgagttacatagttaagctgttttcaaaaaacacagaggattctgtactgctagtgccattgagggggcttttgctgccatttattttcaacttatttttttgaggtggagtctcactctgtcgcccaggttggagtataatggcgtgatctcagctcacagcaacctctgcctcccaggttcaagcaatcctcctgcctcagcctcctgagtagctgggattacaggtgcccgccaccaggcctggctaatttttgtatttttaatagagatggggtttcaccatgttggccagacggtcttgaactcctgacctcaggtcatctgcccgcctcagccttccaaagtgctgggattacaggcatgagccgccacacccggccttgctgccatttttaaataccaaaaccttttgttgcagtctttgtcacaggtgctggcacaaaattcctggtaccttctccctgctctaattcaccaagttctccttcctcttttccaaagactactaacatggaagtcttccttaattagttacaggactatatctgcaactcctgtgatttattcgctcagtgcccgtgtcactgtcacccactggtggggtgtgcttgttgtaaatacccatttaaatgtttacattttcaagtatataaaaccaggattgtaaaataccgttgtatttccagttgtaaatagccgtttagttaagttaggcatttgtttatcacgcgtcctaatctctgtttgtgtcgttactgtctcagagatcatcatcatctgtgtttacatttttatgcatcattctttatgcaagtagttcttattcagtgtttttgatgatgttaagcaaaattctgttgctaccttacctcattaccttcccgggatatattttgcagatataaaccaataatattttctggttctttcttgactagtagcttttggttaactctaaggtttttctgtttgtttttctcacagttgttttctcccacgtgtacaaatgataaaacaaattatctcaggaagaagaaaaaagacatttgatagtatatccagtagttcaacaatagtcaacggagtctggtgtcctcacttctgtcattggctgcttgacctcacttaaccttcctgttagtttctgtttcctcactagaaaatttattactttctagggataccaggagacctggtgttaataaagggcacagtgcagggtgtgtggaagattttagtgtcagttctagcacaagctagctaaatgtgtctcggggtacattaacttctctaggccccaatttcctaggtattcattcttcttctagacaatagacagttgaattaaaaaatcctttctatcgaccaggtgcaatggctcacacctgtaatcccagcagtttgggaggccgaggcaggaggatcacttgagcccgtgagtttgagaccagcctagcaacacagcaagaccctgtctcttaaaaaaaaaaatcctttctattcctagaactctagggtagtgtgaagtaagggttttcacagttacactaggtaagttactacctgtcgggtacttctctaattatgctgtgcttattaacttatcaagtcctcaaatggccctatgaggaacatatcctttatgttctatagatgaggaaactgaagcattggatgttaaacaacttgcccagggccaccgagcttataagggaagaagccgtctgcacaccccaggctccagattccacagcctcaaccaccaaactctcttgtctgtcgtcatatagaaggctgttctgttttctcagtgtagcccccttaaagataagccacagtaaaccacagtgcttttgatattaggcaaattaaacttgagttcaatcgtatgttacactgaatcaaagttatattcgctgtgcattttacgccagtaattctggaaactaaaaagtgccatgccagaaattttctctgatttaatttgcttacaatcattttaaaaatgaggagctgtgatccacgcttttgccccaggttggaatattttagaagtactttcaaatatatatttctgctgctgggatataaaaccataaattcgagcagatagaacaaaagaccaaagaggatgatgtatttactgtttttgagttaaagttacaacagtttacagaatcacagcaaccgagaataggagttctcagagacatactcctcatccacagaagcctcacatgaccaacacaagtttcagtccagtgcaactttttgcaaatgaaaacttaccctggggttgtttggtgactcctagtcacatgtgctttctaaagttctcaaaacaagcatggggtgacagtccagttttatgaaatataattttagttcagaagagatgggattttagaatagttaatcttcattatatttgacataattactctgcaccctgtggatggggtggcttttcaaaacccacttctggtgaggcagaccagggctccaggccagcacccctctggagattggaatgtgaatttccgtgctgggacacagagccagcttcctatttatttagagccattgggcacctaaggagccaaacagaagttgtgatgcaagttttggctgcagagcatgttagggttgcctgacgtgtctaactaaaacatgatctgagagatttctcaaagccctggttgatttaagcaccatagtattcaatagggtttttttttagtccttttaactcagtcctaagtaaacaggaggcggtgcaaacaatgaggaagttccctctgcattccgatggtgaagtggggttggagtctgtaggcaagtgaagagcgtgtgggagagctgtttccttttgctcatggcagcagtctagaacatggtgacagtgaaagtcattggaagccatgggggcccattttctttatgtgaccaaatgtcttgcaaagtcccaggtgtgtgtgtaggtgcatgagtgtgtatgtttgttttctaaacgaagcacacgtgcaaaataatgtaaaagggcagagtgaagtttgtccatgtccctgtatgaaagtgcatgggaagtgcctggggcagaagtgaaagagacacggccccaggtcgtgagagaagacattgaggtgcactcccggcctgctgtgggaacagtgggttagcatgtcaccggtgcactcccaggctgctgtggcaacagtgggttagcatgtcacccggctttaggatttgggggagtttgctcaggctctgaggcaggtaggttaaggctaatttaactcttaatggttggaaggaaagagggaagggccgtttaggaaggtgaaaaggcaggagtgaaggtggcaagaaatgattggcatgcagttttttcctaaatcctcctctggttataaggaatcaactggaaaattgcagtggcaatagctgttaagaaaaaaaataggattcaattgatgaaatattaaacatgcaagtgggctggtcttttaaccaatctttgtagtattaagggattaaaaagttaattcttggtaattagatccccagggagaacttaatttgcatctatacatgataagtgtttactattaataattcaagacaagttttgctttggccggtattgagctgggtctcaggctggtgataacagaggctggatagagagtgataccattagcctaattttgtcatctgcaagcaaaggaatgttaaaatctgttcacttcgtggtttctaaatgacttctagaagtatcatgagtggaagagggcagtgtagtgtagtaacttttgttcttccgcagtccttagaacctgtcaggattattggttatgacactgttcccacagggtggacaacaggggcatttttatcttcttgagacatatgggaaacttaagaaggaaagtaactaggctgtttgccaaagattacacctacctccaaacaaaaactgaggcaggtataattttaactgtgctggaatctctgaagatgttggtgtcttggccaaattcatttggactctttctgcatttcactctttgagatctattgtgtagactctaatttctttgacaggtattgtcacattggtctccacaaaaattattattgaaagccaggcatggtggctcacgcctgtaatcccagcactttgggaggctgaggcgggtggatcacaaggtcaagagatcaagaccatcctggccaagatggtgaaaccctgtctctactaaaaatacgaaaattagctgggcttggtggtgtgcacctgtagtcccagctgcttgggaggctgaggcaggagaatagcttgaacctgggaggtggaggttgcaatgagctgagaacacgccactgcactccagcctggtgacagagttaaactctatccaaaaataaaaataaaaaataaaaaattattattgaaataactacattttttttcttttttttttttggagagaaagtcttgctctgttgcccagctgaagtgcagaggtgcaatcatggctcattatagcctcaacctcctgggctcaagtgatcctccctagtagctgagaccacaggtgcacacttggctttttttaaaattttttttggtagagaaggagtttcattatgttgcccagactggtctccaattcctaggctcaagtgatctcccacctcagcctcccaaatttctagaattaaagatgtgagccactgcacttgccctaaataactacatttttttgaatgctgcgatgtgcctagctttgtgctaagctctttgaatgtgttacctgattcagtccttgggaaaaccctaggaagaaggggccacctgatttctagatgggaaccctgaggcttagcaagaaaaagagagccggtgcggtagggtcaggactggagcccggtttatactccgactgacaggatggggatgcctgtttcacctcacccttgttaaaaaggacactttagcaatccttttaagtatttgccagcttaagaggtaaaaatgtgatttagcttctggttcttatgcgtccgtcttgggtagcattggacatcttggcatggttattggctgtttgcacttacagttttaggaattgcctcttcacatcctctgccccatttttacttgattgttcatacttttaaaaattgatttctgtgtattataaatagtaaccctttgtcatgtgttacaagtcctcttctccctcagtttctttctttcaattttctgctttgtatttttttttttttttttgccaaatagaactttaaatttcttaaattgcaaatctgtgaactttggatgcctttagagtttattatccctttaaaaaaatttttttaagagatggggcctcagtatattgtccaggtggtcttgaactcctggactcaagcagtcctcctgcctcagcctcccaaagtgttggtattacagacatgagctactgtacccggccaagttttattatccttatcttatcctaggagtataatatttttctgtgttttcttattgttctataatttcctttgtaacaggtatctgagattatctttgaaatcttctgtctcttccagggtttaaaattttttagcaaattattatttcatggtttcttaaatttcctttgtttcaatgattaaagcattattgaggaaataagctatattttattaatcacaagtctctgcatacactagaaaaattctagtataattatttggaagacataatgatgtagttttcagagtcctcagattagaagccactgttttaaaagcgtgaggttagaaaaggaattttgcacctattccaggttaatttctacctattccaggttaacagaggtgatcctgtaccaatgggttttggacagagctctcatagtctgtgctgtgggcgattccctcatttagtttgcgaggataccagaattaaaggaaaataatgagaaatgcttatagcccatagatagacgcgaggtcacagacagccagactggagctaggagaccatgctgatgtcacatactgccctatcagaaccctgggaaacccttggtctgtgctacaagagattggcccatgatagccagttataaccaggcagtgggcatctcaggggtttgcatgggtctaaccttaaaaagccacatgactgggtgcggtgacacacacttgtaatcccagcactttgggaggccaagacacaaggatcacctgaacctgggagttggagaccagctctggcatcacagtgagacctccatctctattaaaaaaaaattatttttaattagctgggtatggtggtgcatgcctgtagtcccagcaccttgggttgctgaggtaggagcatcacttgggcctgagagttcaaggctgcagtaagccatgattgagccactgcacttcagcttgggtgacagagtgaggtcctgtctcaaagtaaagagtcctgttaggaagccataatgattttaggggggatggtttagatcttgaagaaagaaaaaataatttgaggagtgagcacttgaactatcaaactttctcatctattaggtgcgttaggttccttacatcttattctttttttccttccttttaatatatagctactctccagagagaccggatcttcaaacattttaccaggaagcgccaaagggctatgcgaaggcgagtccaccagatcaatggacacaagttcatggccacgtatctgaggcagcccacctactgctctcactgcagggagtttatctggtaaggggttcccttacttctgtcctcctcagagcttccatctaataggcttcctctggttatgtatgacttcagcagaatgcatgattatttaagaattctttcaggatctgatttttgcctcttactctagtatgttgacccagtaatttaaatctccattgcaaaaacatctaaataatttacagatccaagttttagataccatttctttttaaaatcatcttggtaaagatgctaatgaatcctaaactggtcaacaagcataaatcagagaaaaaggctaataagtcaataaacaatcagtaaattggataatcagcccctaaggaccaaagaataatcaacagtattgctttaagaaggcatgaatcgcataatgacttatggaaattaatggttgcgagaaaactaaacacaaagtagtcttcggcctcttggtatgtaacagaagataatagccttcagtgatcatatactgtaatctaatccctaggaattagtaggaactaagataattcaacattgagaaattctagagatttggggcaatatcttactagacatacaactgaagcttaagtctcagtctcagtggcaaatgtaaaataaatttaagcagtagttatctttagtgataaattaagcatacttatttggaaagggaagaaagaaagatgccctcacacacccatctcagaaggagaaaacacagtttggtagcgtgaaaggagatctatatttttgttgtcaactttaattattttgtttagtgaaggcagaagcccttggatcagagcagtttctgaatgttgatcaattactttgtattttgttttctgtgattattttggattttatatcttcaacagtcagaacctagggctagttagtatttctgacatttttaatcaagaaacaacgattttgagatgctaaaccagctgtagatatgaagccaacaaatgtgtcataacatttattgtatttagggaaaaaattgtattacttttttttgggaaaaaattagcagccctggcgtctttgagttcacgtttcctctttgcatgaggctgcactcgacttagccacagccccacctctctgtggtttgctcacttgtgacctaagggtgcttgcctcttgcagtgtatttcatgtcacacttttctgtttcctttacatgacctgccaggcccctgtaggcattagtggtgatggcccctgacctgaactgacattcataatggaaacttatttgatcatttcactgacttttttccaccagagaaacattaactgtacccaaccagcctttaacgctccccgcctccacacccatacactgtcaccctcatactctctctctcacacacacttaaaatattggtgtatatattaatatatatggctaagagtatggactctgacatccagtctcatcaccaactgggtgtgtgacttagtcaagttgcgtagcctgtcaatgtctcttcatttgcaaaatagacacaacaatcttattttacttgtataataaactttcatatagtacttaaagggccaggcactattgtgagcattttatattacaacttttaatcttcattagagccctgtgcagtaggaacggttatcattagtcccttttatggatgaggaaactgtggctcaaagcatcaggtcatctggcttcagagtctgtgctcttaaccatgttattttgtgtgctgcctcccgtggctttttgtgaggattaaatgaaatggtatatatcagctgcttggttcagtgcctggcacatcctatgggcttagttactgtggtctttgttaatgagaatgagaatactcctaatgttaccatcattatcatcacccatagaatatatttgggagaggcaaagatggaagtggtgggcctgaagggcatattgtggcagcaactctgcccacctgtggactccaggggtgatatggacacagggacaagggcaggtcccctgggacaggcagctgcggtagactcatctgtgcacttccacagtgtatctgtgtccgtttacttcagcatctgaacatctttatgtgagagagaataaggtgggaactcttcaggccaaggcttaatcacacgtacagatgaggatttattgccattgaggacttaggaaattgccatggaggtagatggaatgggaatggtttttacccacccatttgtatcatacagcacattctaatccagcacatggttttttctggtgtctcatagtaacaaacaatggctcagaaagcacatgatctttgcttcttccctgaaattgtgtttttcataaaggaggagaggatgaaatttgttttccttaaggactataagagggttattgctgaaatacttgactgatggtagttttcttctcttcaacaggggagtgtttgggaaacagggttatcagtgccaaggtaaggaaacatttttaaaaccatgtttcattttgttcctatgttaaaagaaatgattataccaagagaaaacagggtatcttcccttaatattgtgataaataactctctgtaggtcaaaggaaacccctgtgtagatacaactctttagtttggtgagatcttggccatattttagacaatgtaaaggggacgtttttatttctaaagccaggatacctaataaattttcattgtttaaagtcttgtctctgcagtaacatgagagtactaaaaggtaatgtgattttgtgagcatactcttaaattttgaagataaacttttgttttttacaatcctattgataatagatagggatgaaaagtagcacactgctgttttctctttttccccgtccagggaacataagctattatccaagttgttttttgaaatgttatgatttcaaaaaaaaaaaaaaaaagtgagaaatgttcaaagttaagctgtcagtgatcttgtaagttactacatgttatatttagttttcacaatctaagatgaaaccaatttactagtgtttctagcataattggaaagaaatacaatggcaggaatggaagaagagccctcagtcaggtggtttagccaggcccatcaggcttgcctgtcatttgggttcccccttaacctttgacatgagtatcatcacatagtttatacacatggtacctgtttcactatgtggatgattgataaaatagcaccacatatcctagagcagtagcctatgtgtggataagaaaatctcaccttctcttctggaagatgtgaggtaaaacattacttcccttggatggactgaataagacatactcttggatctaattttgactttactatgtatgaacaattccattgaactttcaaagttaggaaaaaacaaatatataatcaatatgacagcaataattgacctgtatgctgttaatctcagtcccaagtgagaagacagttcacaagccagaatcgctgtcactttgtggcatgggcctgtgagcacaggaatatgccctgcagtccatggtagcccatcttatgcacaccaagataagttgagaagctctggataaacaagattatggttttgagtttaaaacatgggatttaagatacatctctattgttattttatttctttttctctttgtcctatagtgcctggatatttgatggcctgattttcagtgggtcacctgctatgtaaagagcagggaagactattagttaggagacatgcagacaccactttggtgatgtctccctaaggcatataaaaccaaatgcctggttggagagaggtatgccattctaacactgatcaaaagcaaactggcataggtatttcagacagagcagacttcagaaaaaggaaaattatcaggaataaagaggggacaacaataaaggggtcagttttccaagaagacttaacatttttatttgttttgttttatttaaagaccagtgtagtagtacataacaatttttaacatgtatgtatgtacctagcaacaggaatcaaaatacatgggacaaactgatagaatcacaaggaaaaatgaacaaatccacttctatagttggagacttcaatatctcagtaattgatagatccagcaggcagggaatcagtagggatataggtgatctaaacagcattatcacaactaggtgaaattgacgtttatagaatacttcatccaacaacagcagttttcacattcttctcgggctcacaggggacatttaccaacatagaccacattctgggccataaaacataccttaccaaatttaaaagaagagaaaccataaacggtatcttcttagaccacaatggaattaaactagaaatcaattactgtaagatagctggaaaatccccaaatattggaaggttaaatgtcacattctaagtaacacatgggtcaaagaagaagactcaagagaacataaaaaatatttagagtcaagtgaaaatgaaaatataacttataaaaatatgtgtgatccagcaaaagcagtgctcagatgggaatgtatatatcattaaatgcatacagtaggaaagtagaaagatctaaaaccaagattcgaaatttccaccttaggaaactagagaaggaagataaatttaagcctcaagcgagcataagaaaagaaataatacaattagaacagaaatcagtgaagttgaaaataggaaaacaacagagaaaatccatgaaatcaaatgctgattctttgaaaggattaattgataagcctttaccaagctaaccaggaaaaaaccaaatacctcaaaaaataaagtatttctgtgtgaaggatggttttgagatcccctcatataaaaagaccagttctctgggcactttcaatttggttctcctgagaattgaatctgatgaaagctagatttgttttaaggtatgatgctatttactgacatgtcacctctctttatgtagttaatcctaaaaccttccacatgtcttgaaagatcttaagatgatatacatttttatactgcttcattgcatgtgtttatcctttgatgacaagctcaactatctgcagtatatcacttatctagatgagaatgaaaaaaatgttattccgaaagttctaaatatttcaacagttgattaagccattcagcaaacatttattgaatgcctcctctgttcaaggcatcatgcaaggaattctgagggcattacaaggctgggtggaaggtttgaaatgaaggggcaggctaagggttgtgggagatcagaggagggcaggtggtttcagtctagaagtggggatggggtagagtattttcatggaagagacattttctgagttacatcttgtcctaaacttaagatttggttagttgataggcaaaaaggatatcccagggagagaacagggcatcgatagtttgttggaagggtccaggaagagcaacccatgtagtttttactggaacaagtagatcccatagaagaaaggtgacaggtagcttggagcagcctctggagggcctggaacctgggtgggaaatttgaactttgttgatcggcagtgaattaccatggaatgttttcgattatgggggcaggactagagtgttagaagagtcctctggtggtgggtgcaggatggaataaagtcaggaaggaagaaataggcccaggacttgataagggatagtttgagcctgagcaaaggtctgtgttaggatggtggcgaaggcaataggaaggatgggcacaccagctgctgtcaagggggccagacgagtccagtcttgttggcacggtgcagccctggttgactctgctgtaactggctggactgtgagcttctgataaatgtataattgctggatttaatttcctagtgtgcacctgtgtcgtccataaacgctgccatcatctaattgttacagcctgtacttgccaaaacaatattaacaaagtggattcaaaggtaagaggatagcagtttgctgattaaatgtgcgtgtgtattgtgtatgctgtgtaccgccgtctctctccctccctccctcctttcctccccctcttttccttctccccgtccccaaacctctgctttcctccccctgccacctcccttccacattctttgaagccaagggttgtattagaatagaaatgtctctctccctttttttaaattatggcatttatatttctgtatttatgtggcatcatccctcctttgtgaggaccccattagtggttggctgggtataagctatatggattggttctacttatttggagagacttttggcagagtgaaaggagccctgaacttggcatctgacagcctggatttgaatgctgaatccagcctctgttagccatcttctctatgagctgcggcaaggcctacaatctctcttttcctcagtcttaaaacaggatcaatgtttccctcacacagtttttgtaagttaaacaacatagaattgatgtgatacatatgttaataactgtaaattatgtttcctaagtaaaaagattgctggctttctccagcctcttaagaaatttcagggaagatgtctctctctctctctctctctctctctctgtgtgtgtgtgtgtgtgtgtatgtgtataagcttcaacatcattcttgccactcatattgcattcatctgcaataggcatacattttaaattctagaggtaaaagcagatggagtgttgctgacatttagcagtagatttgcagaggcattggaagaatgactctggaacacaatggttctttatagtacacatataggattgctaaagagtatacctagaggtataaaccacagcttttccaagaaagaggccataaaagtttcaagaggagtaatgattgccctactccttgtcatgcatggatctgttgttatagcatcaaattgtggtatggactgcagagtacatgcctagtggaattatttgctggaaactgagatttaactcagattgtcagattgcaaatgccaggcaaagaaaggctggaagagctgaataagtagttactttaatgtcactttggaataaattccttctgtggttccatggcctctgagtctcttctttttatttttcttcccgtgacacaatgtctggaagaacttacagtgatagcaagtatatatagtgtataaaagacccatttaatcctgaagttaaaaggttctgggaaatagatgggggtgttaggggattggcaaggagagaaatatggcctgaatatgaaagatgaagtgaaaatcttaatttttatttctcaaaatggcaaatgatctaatgtgtttcccacatttctgtcttgtcctgttcattagaaaatgtgtttagtctggttcgtaagacctgagtaattaatcagggctgagtacagtaaaataatatacctagctcaggtgtcatagtgacactttgcatttgatgggctcctattacagtttttacaaaggacattggtatgacattttagctcttgtccctttatttccttttttacagattgcagaacagaggttcgggatcaacatcccacacaagttcagcatccacaactacaaagtgccaacattctgcgatcactgtggctcactgctctggggaataatgcgacaaggacttcagtgtaaaagtgagatgctgaggtgctgggtacccacctcttcatgggaacactatgccctaagctttcagaattctgtggactcagaatctgtcctagaactgatggttttagatatgttgtaaatcaacatcttagtcattttaaacttacatgtttcttgtcaggcatgtaaagagaacttcatctgatgccaacattttctaatcataggacattaagtcaaatggtatattcagtgatctagctcgctagctgacaaatacagcctagacactgtattttaataggtgtttggaagagaaaaagatgggatcttagtcagaaatggaagatggttgagtcaggtgagacactaaaaagaaaaaaataaataaaaatttcaaagaaatggaagttaggaggaggtgaggaggtgagatggccaaatgagaaggttggattaagagtaagaaatggcagaatagatctgatgatctcaccagaaatcagcaggaatggagttgtcacagcataaaaagagctgccctgggtcttgtgaaagagattggagacaggggtagaatgaaggaagataaagccttgattgtaagcttgcatctcaccagctgtgcccagtggagtgagagtttggagctttggccctagcaaaggctctgagtgggtgagagctgatccctgtcctgttaggagttagggagctgttggccttgtgccatcttgtatggaaatgtaatgatctgactgccgtggggtgcacctgaagcctttcttatcagacacaccccaagtcgccagttgaggagaacaatggtgaggtagaattggcatgagtatagccagacaacttccattgactgcttggacttacagagcctgcttctgtcaacaaaaaggggccagtcacttgtctttaagaagggcacattcttctatctctgtagaacactaataatttttttctcataaaaccaaaacagtagccagctcatggataacttgtagggcgttggtccaggtgcagcttgatcttagcgtgacggtctcacctgggtatgggttcccagtgggaaatccctttctgccttgcattgttgctgatgcgcagagccatgcatggggctcatctgcattgtcctcttccctagtggcctgagggtagcacacctgcagcaatccggctcttgtgatttttgcctttatggtcacttggtggttttgaaaggcttctgtaggctcgtgtgtcttacacctgtcttcctgagaggggtgggtttcccatgaagcttaagtctcagggctcctctctctcaagggcaccttccaaagccctctacttgatttggtgttctttttcttaaagaaggcctcctaaattatgtaaattcaggccccacaaaacctggatctgtgtgtgcttccaagatggactgactccataaaacaggaatgtgttgcttgtcgcttcagtttcacctcccatcagcagggcccatgtcaaaaaactgtctcagaatttattccagctgataacgcctcagatccttcattgtccccaggcagcttccggtgcctcaggagcttagctttctttgctcgcctcttcaactgccatttgtactctgaccttcagaaagttttaaaagttgcctttccccactatgaagcagttagaaccacaggctgcaaatgctgagaaccacaggctcacaggatgcccatctctgtgctgtgaggcctgcccaaccacaacaatactcagaaagaaagctgcagatagaggtttttcttgtagaaacaccatttccatcctgtttgaacagtgatctacatgtggcatttaaactgctaccttttatttcactgttgagagacagaaaaaaatacagttgacatgattctttgttatttaattgcctgtgaattgccgctacgataaaggttttaatcttagatcatactaaggcagcaatgcctgttacatgtgatttagatgaatgggtttcatcaaatcatggtggaaaaaatgtatttgaaatatattattctttagtatgcttgcctttctgcttctgcagaaaacagaaatagataaaatgtcaggaactattactagtgtgagcttaattttatgagaaaatgatactgttcagccggtataattcctctgttataatcttttaggctattaaagttctctgttgcagcacatgttgaattggttcctttctgaacatggattctgttttccttttccctctagtatgtaaaatgaatgtgcatattcgatgtcaagcgaacgtggcccctaactgtggggtaaatgcggtggaacttgccaagaccctggcagggatgggtctccaacccggaaatatttctccaacctcggtgagactttgctttttttccatgtctcgtaatttagaagttgctcagatgtgatgagcccaaatgagagcatgtggcctcatcaaagttcctaatcttagcaaatacaataaacagacttattgcctttctttctttctttctctttctttctttcttttttcttttctttctttctctttctttctttcttcctttctttctttctctctttctcccttttttttctctctctctcctctcctttcctctcctttcctttttccttccttcctcccttccccttccccttccccttccctgtcttcattcctttttgagatggggtcttcctctgtcacccaggctggagtgcagtggcacaattatggttctctgcagactcgactgcctaggctcaagtgatcctcctacctcagtctcccaagtaggtgggactgcaggtgtgcaccactatgtcagggtaattttttatttttttttttgtagagatggagtctcactttgttgcgcaggctggtctcaaactcctgggctcaagcgatcctctcgctttggcctcccaaagtgttgggattgcacaggtgtgagccactgtgtctggctgaaatagcatttttaatagcaatttgtttcacggataagattgtatatacagttatatgacaagaaataatgagcatgagcaacaagtaataaacagaaagcaaaagaaggacttttttcctttctttccttttttttttcttttttcttttttctatttgttttttgagacagagtctcgctttgtcacccagcctggagtgcagtgatattcgctcactgcaacctccacctcccaggttcaagcaattctcctgcctcagcctcccgagcagctggaattacaggtgcccactaccgcgcctggctgatttttgtatttttagtaagacggagtttctccatgttggccaggctggtctcaaacttctgatctcaagtgatctgcccaccttggcttcccaaagtgctggaattacaggcatgagctgccacgcccagcctttcttttctgttttaaaatcagcttcctgtcactgtggtctggtgaaagcctaaaacccaggatcctgggttatgcttttgtctggggaccaggcaggacaggtgaccagtaactatgggcgtcagcgtcctcacctctaaagcggttcaacttgaagatctcagaggctctgcacagccctggagtccagcagttctgaagttttggtttatggattgtgaatttatcattcacattcagcaggagacaggagtctctccctctggactctcaggagtgagtggagttgtgtcagttgcagtgcacatgtttttgtcagcactctccctgaatgacctccacctgctgtcatccagttgagccttggctgcttcccaagcccatgtcttactgttgccttcctggtcagcgtctagagatgggaaatagccatgtaagatctgaacggtgtagcttggtgtccagttcaggaaaattatcgactcaactaattaatctctgggtgctgaggaagggaagtgcaattactgtgagattcttgataatcctgaaaatgtcagcaccaaccacctcatttcctttttactgaaggactcctgcctagtagatcagggactttcattgacaatttttttttttttttgagacggagtctggctctgtcgcccaggctggagtgcagtggcacaatctcagctcactgcaagctccgcctccctggttcacgccattctcctgcctcagccttccgagtagctgggactataggcacccgccaccacgcccagctaattttttgtattttttttttttttttagtagagatggggggtttcaacgtgttacccaggatggtctcgatctcctgaccttgtcatcctcccgtctcggcctcccaacgtgctgggattacaggcttgagccaccgcgcctggcctattgacaatttattgaattgccactacgataaatgttttaatccttatattagatcatactaaatcagcaatgactgttacatgtgatttagatgaatgggtttcatcaaatcatggtgaaaaaatgtatttgaaacctattatgtaaaaaaatgtatttgaaatccggtctgtctgtcttgtgggtaggcgggcaggatgccaatattgtgcggggattgctaatgcatgggacagttatccctgaagagcagagattaaagatatcagcctgaactagggcttctgagatacaatgggaataagataagaataggaataaagatcatgcagcacgatctttaggaatggacagtgcacttgtcatttgaatcaagtatccttaatccatgacatccggtgcctggctggatgttagacttttgatctgttgtctagtggtagcttatcttataaatgtctcaaggtgggccagctgcaaaagtcaccttgcctttaggtagcaacatcctcaggtactcagtaggatggaactggaaagccaactgaggcaggcacacttaccttccattcattgtgttgaaactagaactctcatcatgctggtgagagtgtagattggtcagtcttattgtagacggtaagttggctgtgtatcagaagtcttcaaaattagcactttggcccaaggaattccatttgcaggaagttatcttaagaaactgaataatgataatgacaatacagcttaagtttattgaatgtgccaggcaccaatctaagtgctttacatgcatttgttcatttaggcctcctaatgactcatgtggcagatgctttaaccttctctttgtcagaagaggaaactgaggtagggagaggctgggtaggtaacttgctcagggtcttaggttagcttgcagagctgttattgaatccaggcagcttgcttgagagctagacccttaattactctgttttgaagatttgcatgaagtgtattcactccagtgttattcactgtggtgaaaaaggggagatgcctcatccttctaatggcaggggaattaataccttgtgagatatccatgaaatggatattgaatagccgttagaactcatattcttgaaagaaatttaaaggcatgaaaaatacccaggacaaatttttgaatacaaatgtatgttatgaaaccataatttgattatgtttttaaaaattaaccaagtataaaaacgtgtgcgtgtgtgttatttatacatggatatagatatctttggcagagggctggtgagattttaggtatttagatttttattcttcatgcttttgatcattgttctaatattcacattggacttttatttctcctatataatttaaaatattgattaaaaaacgttgcttcattcgtgtcctggtgctgaatgatgcttgaatctctgagtagacatgagaactgctctctgtaaaaagtggacactaggtggcgctcgtggaatgggaccttcccgtggaaagccaccgcagaaggcacccaagggaccacacaaggcattggtgtttccatgcacttccacttgagcgctaactgtaactccatggcttagacgtatttttaattgaccttttacacaaagcagtaagcacagattcagaagctgatactgagggagtttcgagtggcagaaccgatcatctgtcaaactgagttgatctttcccccacgttatactgggggtgagactgctcccagccaataaggtcttcttcgtgcatgggtgctccatgcttctgctgcaatttctgacttaatgtgttcttactctttcagaaactcgtttccagatcgaccctaagacgacagggaaaggagagcagcaaagaaggaaatgggattggggttaattcttccaaccgacttggtatcgacaactttgagttcatccgagtgttggggaaggggagttttgggaaggtgagtcttggctttaactgtttgggttgaagtaagtgtgctctgtgtatggggggtgtgtgtgtgtgtgcacgcatgcgcacatactcacatttctcatgtgccattctttcttcctgttgtgtgcacacaccctaagacccccaagaggactccctcatgctccctccttttgctttgccataggtgatgcttgcaagagtaaaagaaacaggagacctctatgctgtgaaggtgctgaagaaggacgtgattctgcaggatgatgatgtggaatgcaccatgaccgagaaaaggatcctgtctctggcccgcaatcaccccttcctcactcagttgttctgctgctttcagacccccgtaagtatgaatcacattcactgcaccaacagcctcttttcttacagagctgagacagtaagatactggagatttcataaagttgagtatcagaaattttgggggatgggctcccaaggcagggtcatatggaggtattggtgacttctgccaacctctggaggaaaaatggaagcttatgaattcaccccttccccttgtgctgtcctggggaaggagcaccgtgagggttgtgtgtcccaggattgaaaaggtcatcatacataaatcttctgtaggtgaagtgaaggtgaatgaaagttacagcagtctaagaacagagaaaatgccatgggctcattgtcttgatgaatttggctgtgactctgctcctaaatgctgggctggttctgacctgggcacaggagtttagaagaggggtctgagaggacccagagaggtaccttgatttggaacatcccagggcattgcttctggccttagcaacgaccctttgcctgaaaccatggactggtcttaagaattgaatctgtctgccctgtaatggcgtgcgtttaggaatgcttctggctgcagttaatggaacacttgaccagcggtggattaaacaataaatagaaaggatgagtttggttcattagtacaaactttttacttgttgtttcacataatgagaagtctggtggtaacagtgctacggttggatttgttgctcagtgacattggacatgtctttcccttggggtcccaaggtatttgctgcagccctagatgccacaccttggcatgatagcatccaaagcagaaagcataagggcaggggctgaagggcttcatggccagtccccttttctcagggagggaagatctttcctagacttgggtcaactgccctgtatgtctgttctcacattgctacaaagaactacctgagacggggtaatttatgaagaaaaaatgtttaattgactcacagttccacaggccgtacaggaggcatggctggggaggcctcaagaaacttacagtcatagcggaagggtgaaggagaagcaagcagggtttcacgtgacagcaggagagagagagagtgaagggggaaaagctacacactttcaaacagccagatctcatgagagctcactatcatgagaagatcaaggggggaaatctgcctcatgatccaatcacctcccaccaggcccttccccaacattagagattccaattcaacatgagatctgggtggggacacacagccaaaccatatcatgcccttagcaagggaggctggaagagcaaatatcaggccaagataagctggcagaccatgattggttcacaccaaccttgattcagcccctggagcagggcattctgcttttatttagaatcaggctcaaaattgggcttttggtatcaatgaagagggaaaatggccctggagaaggcaccaagagggagggtctgccacagatgtgtcagaatcttgctgtcaaaaggcattctgggagagtgaattctgggcatgttcctggcctgtgccaccatcaaggaagtaggggattccacgagagcgggataggggcatctgactggtcagggaggctggcaatacacctctagggaaggtaaagccatgctgggaccaaacgagtgaattagaattagttaggcagagaatgaaggtgaatatgtcatacagggtcaacagcacactatgggtctgctggtgagacagagcatcaggtgtgaaggaggctcagtacacacagcatatcgaggttgaacaggggccttgagaactgaggcagccgaggtgggccagggccaggccatgaagagccttgtaggctgtgttaaggggtttgggtttagtcctgagagcaatggaaagtcatggaagaagtggaagcagaggaatgacgtatcaggttgtatgttttaattatgaaaatctaatttcttgcgataggtaatataagtatcctccaaatattcatatcctttctccgaaagaaacaagtattgctcgttttatttatagcctttgagagaattttctgtacataaaagcatatatatacagcacatatatgcatacatgtttatctttaaaaaacacaaataatagtatactttgcccatgattctgtatttttaaaatttaattaatctattttttgagacagggtctcactttgtcaccaggctggagtgcagtgacggttatggctcactgcagcctcaagctcccaggctaaagctatcctcccacctcagccccctgagaaactgggacttacaggcacatgccaccacacctggctaatttttgttatttttttgtagagatggggttttgccatgtttcccaggctggtctcaaactcctgggctaaagcaatccacccacctcagtcactcaaagttctgggattacaggcgtgagccactgtacctggccactttatttttttaagacataatattaatagtatatattggaaattgttttgtatttctatataccaagctgcctcatttttaatggctgcatagtactccattttagaacatgacataattaatttaacttttcctcctctgttgctatgtattgtgttcctagtcttttatttcagtcattgttgcagtgagtccccttgtacttttgtctttgtgtgcttatgctggtgtttctgtatgacacattattagtagtagtattgcttggtcaaagggtatatgcatttcacattttgattgagttcaattgccccctcccccattgtggttaaagatagtgaacgttttattgtccatgtaccacacattgttctaagtgctttatgtctgttatttaatccttacagtaaccctctgaaataagttctgttattatcaccccatttcacagaggagaaaagttaggtacaaagaagcttagttcctaagtggcagagagcgtttgaagccaggtggtctgacggcagagtccaggcaggctcttcctatttgctgggctgcgtctctaaattcacactcccaaagcttgagtgagaaggtgcatttccccgccttcccatcatggcatgctctctgtcatttggatcatctcagagttagaaaaatggtatatttgaagttccaacttgcattcctctaactgtgagtgaagctgggcgttttcatacatttcagggtcactagtattcaaatctgtgttgggagggccacatgcagcctggagaatgggtggagcagagaagtctgggagcttggtgacaggacgcactgaaggagatacatggcttggactcccacgccaccccagcgttatcaagagaaaaaaaaatggggaggcagctaatggcttcgtgggcctcggctcccctgcgcgcctctcccttcccctctgctcctcattggtcctcagtggctcttgatggccctggagcccatgctgctcctgcccccatcctctgctttccctctgctggattggtccttggttcccctggagctccagttctccctgccccacactgctccctggagtagccttgaaacgacttccttggctgggcactttgccaacgtaaagcccctcccctgccctcacccccttgttgggctcttttcttggaatagaggagtggagttacagcttgaggcttgagagggatagctggtagctgatactggttgcccgccggggtttcaagcgccagcctcctgaacaccaccatgaacaccatgagtcaagccgcagagccaggtgacctctcagatcttcttcctagggcctgagccaaacatcacatggtttcctatgacatgaggttagatcatcttcaccaggtggtaacctttgagtcaagcagtcaactgatatttagtgagctcacctggtcttgcagcagcaatggttccaagttactactgctgaagcaaagaaagaagtatctcatacctaacaggggaatttgatctgtaaaaggaaattctggtgattataagcaaagatctcatcaacagatcatgttatggtagagtaaaatgaggaagtaacctggaacagattgggaacccaatcaatatagcatatgcaatcaaaatgttccaggaaaatgtataaattctacagtataccaaaattttagcggccacatgagattcccagtgtttagtgggtgaagcctttactagcattgaagtctatttttcctagtggaagttttatgtttgaccacaaggtggcagtcattaccgcaaagttacttttatttctccaccagagaaaccaaaggcatggaactgccattgcggtttaagatgtgtgtgttgtagtagatgtctccaaagcaaaggataaagggaatgtacccctgctttaggctaaatgataaagaagtagtgggaacccacttcaaagaagcaagtgaggctgggcgcaggcagcactttgggaggccgaggtggggcaatcacttgagcctaagtgtttgagaccagcctggccaacgtggtgaaaccccgtctactaaaaatacaaaaagtagcttggtgtggtggtgcatgcctgcaattccacctactccagaggctgagacaggaggatcgctggaacccgggaggcagaggttgcagtgagccaagatcgtgccattgcactccaacctgggtgacagagcacgactttttctcaaaaaagaaaagaaaaaaaagcagcaaaggagattttctaatgctgagatagaggtatacaattttagttttgctgtcgttgttgccttctttgaggtttgcaaggtatcggactccacagtacacatagcatttgctcgctgtgcattcgtctgttggaagtccttatttactgttgtaaaactatccccatttactgttggaaaactaactataaagaacagaaagtgttacttgctatgagaagttacagcagaaagatgcttactttttagctgcccagtgttgcaggccctggcttctcaagtaagatgctaatcagtgtgtaatgctgaactgtgacagtctcccctggagaatttaggagtgagagggggtgttggagccactctacctgcaaagcatttcattgtgagggcctttgtaaaaacagcactctcctcatgcagccctgtggaatcagtctctctgaagcccagagcagggcagtaactagccgaggatcccttagattgtaagtggcagagacaaagttcaagtttaggtcaggctgactctgactccatatgttgtcttattccgcatttagttggttgattcagcctcggcttaagcacctcctatctgtcttggctcccctccaacctgacaatatggaaatggcattgcccttgggaacagaaaacctgaactgtgttttagctttgttttccaccatctaaatggcttgagtctgtcctaaaattcctttgacccttaaagttcttatcattaaaatgaaaacaggatcgctgtgagggtcaaatgagagaatgcagaatattttgtacagtgcgaagtgctgttcaaaagtgagtcagttcaactgtggtgatgaccccctccatcctcacaccaaaggaaaaatgtcccagggcttcccaatggccagcccagacacccacatggaggggacagcaaacattgagaaggtaagtattttataggtccttttgttcttggcaaaaaggaaatagtaagcaaatttcaaatatttgataatttatcaagattgctacaaaggtttatgaacccatagattatttcccctttttttttataatcatatacactgcttacaagtatataaatgggcatccttatctgtttctgatagcactgcaaatcctaatagtttgtgactaatttgataacctgtactaaaactcacaaaatgtatactcctggatctgtttttctgataatctggactacaaaaataatataaagaataaaatgttattcataaagatgtttaattttcagtgctttgtttatatatatttttttggtcaacatctctctaatcctccagcctctggtaaccactattctattctgtttctatgagtttggctttatttgattacacatatcagtgagattaagcagcatttgtctttctgtgactggcttatttcaaataatacaatgtcctccaggttgatccatgttgcaaatgacaggatgtctttctttttaaaagctgaacagtattctattgtgtatatattccgttgtttctttgtccgttcatccactggtgaacacttaggttgattccatatcttggctattgtgagtaatgctgcagtgaacatgagagtgcaggcatcttttcgacatgctgatttcattttctttggatgtatatccagtattggaattgctggagcatatggtagttctattttaattttttgaggagcctccataccgttttccaaatgagtatactaatttacattcccaccaacagtgtacaagggttcccttttctccacatcctcttcaacacctgttatttttcatcttttcaataatagctgttctgacaggtatgacataatatctcattgtggttttaatctgcatatccccaatgattagtgatattgagcattttttctatacctgttggccatttgtgtgtgtggttttgttttgtttttttttttacttttcatttatttttactttaagttctgggatacatgtgctgaacttgcaggtttgttacataggtgtacatgtgccatggtggtctgctgcacctatcaactggtcatccaggttttaagccccgaatgcattaggtatttgtcctaatgctctccttgcccttgccctcccacccaacaggctctggcatgtgatgttcccctccctgtgttctcattgttcaacttatgagtgagaacatgtggtgtttgattttctgttcctgtgttagtttgctgagaatgatggtttccagcttcatccatgtccctgcaaaggacatgagctcattcttttttatggctgcatagtattccatggtgtatatgtgctacattttctttatccagtctgtcattgatgggcatttgtgttggttccaagtctttggtattgtaaatagtgctgcaataaacatacatgtgcatgtgtctttatagtagaatgatttattaatcctttgggtatatacccagtaatgggattgctgggtcaaatggtatttctggttctagatccttgaggagtcgccacatggttttccacaatggttgaactaatttacattcccaccacctgttggccatttgtatgtcttcttttgagaaatgtctattcaggtccattaaccattttaaaattgggttgtttcttactattaagttgtttgagtttcctctgtatttggatattaactccttatccagatatgtgttttacaaatattttctcccattccacaggttgtctcttcactctgttgattgcagaaactttgcagaagctttttagtttgatatagttccatttgtctatttttgcttttgttgcctgtgcttttacggtcatattttaaaaagtcattgcctatgcctgtgtcacagatttcttcccctaagtcatcatttggtaattttacagttttaggtcttacatttaagtctttagtccatttttcagtgatttttttatgtgacgtgagatgagggtctgtttttattcttctgcatgtagatatccagttttttcaacaccatttattgaagggacagtcctttctttgttgtgtgtccttgggatctttgttgataattaattgattgtaaaggtgtggatttatttctgagctctgtattctgtcccattggtctatatatctgtttttatgccagtaccataatgttttgattactgtagctttgtagtagattttgaaatcaggtagtataatgcctccagctttgttctttttggtcaagattgctttgatgtcgtgcattatttatagtaggaaaatattagaaacaacttcagcatttagcaatgggggtacacttcaataatatactatttgatgagaattttcagccagtcaagagataattttatgttacgtagttaaattgtcaggtaccgtcgtaagcacctaacatgtattgtttattgcacgtgattcctataacagccttataagataggtgcaattattatcctcattatgtcaaatggaaaagtgagacactgagcagttaagtcatttgcctaaaatctatcacagaaaatggtaaaaataggaggttagaatccaggaaataatacagaggttatgatgatgaacagtctgtatccaagtcaggttctgcccaagatagtgaattggcagacccgttcccctccccagcctcaaaaaagactgccaggaaattatgccagtaagctatcagggactggattaaggtagtggaattatgaaggatttttttcctatttaccaaatttggtaataggattacatttcttcaacaatgggggtaggaggaataagccattattaagtcagggaccagacccctggtctctcagaacctgggatacggcctagtacatgctgtctccctgactcatttatggcgaaattcacatcacactccttttatctgaatcagtgagggttgtgtcagcagctgagtccctggcatggatgtgctggaatccaggcctcccatcccccatccccggctcgcaggggcctccccttcggttctcctcctggagagagaggaacaaagactagggggtgagggatggaggggggctatcacaggaagggggagcagcaaagtaaatattggtctgaggctttgttcggagacccagtttatggaagcaaaggtttccatttggaaaacagaagacacttgtggccagtgcccgaaacagcctctcactagcaggccctgggactgggtgagagggctgagcgaagtactcctcattgttttgggaatgccttaagtttgagtttaggatccaccgctttcaggtgggctacaggacgctccgatgccggtcgcttttgcctcctcccgctcctctgcctgctggggcttctttacgatgtcagcctgcaaggatggagttcctggcaggaccatagctttccataagaaaccacttctcaaatggccaacaaagttgaaatcctggtttttgaaggtcagaatatcttggaatcttgtgaaataaatgccatcgctgcatacatgctggcacaaaatgatctcacgtgtgctcagtgtacctgcagcttgagtgcaaaggaacattctttcctttgtattactttctccattgttgttgtattaaatattagcgaagaagtgggagaggcagagagcagccaggcagcaaggtagtcatgtggccctggaattcatctttcagaattttcccaggcagggaactgcactgtgaccttcagcacaagagctctgagttctaattctggcttagctggcccacttgtctttaagaagttcccctgccttttattttgagataagcctctccacctaaatgtgtgttccttatttctggacctgttggccaacgtacctttagggagtgcccctccagctggcttcaacatgtggggtcgtagcggggctgcagcctgccctgtccagctctgatgcttcccagcgcctccagctcccctttcccttcctgaggcctcactgagcatttggctgagcccctgccagccgctggacgtggggaggagaaggcatgctcagaccctacagtggcattactgcttgtgctctgtgttgctgtgacacccagcgcaaggggaagaggccctgtgacagagggttagacaaggagaaggggaagtatagccgaaaggctgggagactttcccctttacaggcatgggaattctgaagaagcctctgttcatgccttggggtagttggttgattcctggggactgaatggtgcccactttgcaggaggggatgagcgaagaaggaaagggcagttcatgagaccctagcatatgtcctaggtgctcatattcattaccaatgtctatgaaactaaactgcacattggcattccgtaaatatccattgaacaaaatatctcatttaatacccaaagcatccagggaagagtatcatcctcattttaaaggcctagaaactgagatccagagaaattaaacaacttgccccagatcacacagtaagccagagtcagtgcatggattcctgacctgactgtcctgccaaataatatacaagccatttccattatatcacaaatagaagttttgagtctctaatatgtacaactgagaatactgtcattagatgggaatagaggcagttttccacaataggtggtttttggccttttgggaaatacctaaggatatttcctctgatctgtttggaaccaggtttccccctttccctgagcagtggctgctacaaatacaatctggtttgctgcgggtcatttgttgcagtttgcctttggctcagatcaaaatagaaaatgagccagaacatggtgtttcctgtctctgcatgttcctaccttattcatagtgttccatcttttttttaggttattaattgtggatttatttccatagtaagacaggatctgactttggggccaacatatgttggacccgcctccttctctgctgaagattctctgaagacaaaatgtgcataggccttctccaggatctggatttttgggggattatttgggacctttgcttctgtcctctccggctaccaggctttctgaccttctgtagctaaatagggccacaaaaatgaataggaataagagaacctgaagttcaagctgtgtctttggctctgtctctttggacgcgactgccaagatatttggtgtgacaaaaggatttgaaatagttggcctgtttttttcagtttgaggttgttctgttgtaactggtcttgtttttggtagccatcattatcactgacaacctagagactgagtagaccgccacctccatgtctgctaagatagtataatttaaatctttgatgtaaccagaacacaacccaggtcacactttgcccctgtgtctcatgatgactgaaagcttttggggtgatgattgcttggttatggttttcctggacccaacttggaacccttaaagcctgccaagttatagatactctggcttcagtagggccctgtattgaaacaccaagtgccaggactgctcaaaaggtgaaaatgagatgggtgttctgccaggtggtttagtgaaaaatcagtcaatccaggatcccactgactgaatgctaggcaaaagaaacagttcttttatttgttttcattttttgcagagttggaggtcttgctatgttgcccacactggtcttgaactcctgacctcaagcaatcctactgccttggcctcccaaagtattaggattacaggcatgagccaccgtgcctggctagaaacagttttttaaaaactcattctaattaggaagagaagaccaatacacatggaagaaaagtgtacagtagatagcatgtagtaaatatagtccttatgctacaaaaggaaaggtagttgaaaatgaacattgggttctaggggaaactcttaagtatgtgccagtctgtgctcagaagtacaacctgattggctgtgagactaaagccaactgatagctttaagcagcccctcgggtgtgggctgcagatggttccctaggaagctgggttgactcctgctgtgatgagctgggactgccaggtaggacctgaagcggctgccaaggggctgccaccccaccctgaagacaaaatcatgcagtctaaaaacctgactgctttggatcaaaatcataccctgtaatatgttctagtttttaaataacttgggttttccttaattacttaatctctgctgagaacccagctgcatccatctcttctaggtccggaattatccacagcatctcatgagcagaaacagccatgtcaacataaagttagcagactcgtcgtgtagagagttgtgcactggcaggttaggggggaaggtgttcattcattcagcagatatgcactgagtgcttgcaaggcatagggctcgccttcaagccttgaggacgcagcagtgagcaaaacagaaaagagtccctgccctcatgaaactgacattctttgggaagcttataagcctgaagctcatgaacagattgttcatcttatagtctcagctggtgaccctccatggcagctgctccctgtggcaattcctggattttcctttcagacaggctcagagccgtcatctgcttgaagagtctggggggcttgtctgaagctgcatttgcatatcaagtgctccgttatattttttgtaggatgcagtgagaatactggggggaggctactcgagtccttggtccttggtactgtctctggttagtggtgggttctgggtcactattataggggttgggaggtttaaagcaagaagcagaatggcaagagtagcagccccagtaggctgcatttgctcccgttgccacttgcacgatctttctcatcccgctggcaagactagtctgttcactggcagcccctgcatcaggctgtgaggacgccctgtctacctcccgtctccatccctgtattaacccatgtgctatcaagagcgactgactctttctttacaaggttctttttccttccttccccgtaagctaatagtttggctcaggctcgccagcagaccctccccttttttgctggagggctttggcatgccctgtcttttctttggggccacccagggagttcctgtttcctttctgtgggaggcttccaattcttagttatagcaaaagagcctgtattttttagctcactcctgcccacttctggtcttgaatgacttatggcttaggtgttacaaatgggagtcctggaactcttcccagaatctcttaattccattcttgtggtatatgacgttctaaacattaaaatgatgtaatatataactcccaaccaaaacaaaagaggagatccctgctagccaaattcttccctcctctccatacacgtttttccgtcgctgtgcagtgaatcctgggatgtgtttgtcagtcagcttccttgttcttctggctcctcactccccagggaccaccgagccacagactccacggttttctctgagggcatgcgaagtggaaactaacctatccctgcagccagcccagaccttctacaatcatatctaccagtggtgaaaggcagttcaagatgagttggacacaaccaagaaaaatagggaacaaatatgtcatagctcctctctgtctgctgtctatagaaggaggctaatagcagcagatctggtgagggccagtggcccatggacctgcctgccccaaggcagcaatcatgggagtggggtcaaggaaacactaaggaggtacacctgataggactttttaaagaggagtggccagggttctggccggtttgaagcctggagagaatggaatggcatgagttcagttttggggacattcagtggtaagactggtttctgttttctcttctggaagctcatagatacaggatctgctcattcacttgatttgtgcctcttatttgggcttcaggacacatctctggccaatcgcaattaaaacaccatgcccagttagccatcatcgccactcagagctgtctgctttaccgggctaaaaaaaatgatctttatcaccagttgtaagtgacttaaaaaaaaaaagtacccttccacattgctcagaactttgccgtcaccttcttgaccctcaccaacaggtcaggttgttttaataatctagtggctggtaagctttcatcctttacaattaaaaaaaaaatcactgatttgcataatgcagtgccatttgcctactttgttgggggtgggggctgtcctgttcattgtggatgtttagcagcatcccaaaataccagcagcacctctccagttataacaaccaaacatatcgccagacattggttcccaggggggaagaatctcccctggctcccttacatgactgtcaggtgattgtctttggtatgaaaagtcaaatgggttagacgatcacttttctttttatagaagccaaagccaaatgtgtcagaccttctttatgaaaatataagcgttattttttttctgagtttgtagaaaggcaaagttcctgttgggggctcattacagctgttggtgcctgcactgacagtggcattgttagggatggagcccctgagctcgggggagacagcggaagcgtgcagcgtctgtttaatgtgagtgagggctggcatgctgctggcagctctcaacagtgaagcctgctgctcgataaggcattattatcagagcctgggggcatccagggagcaaaagattagctgactgagcatatatctaaaatgggttatttttaaaaagcaagcagtacaaatactgcagcttgtcttgttttagcatttaataattacactttcactttaccagcaaggcattgagtcagtggcattttatgaaaagcatcctcccaaacctgaactttgtgagtcagattcccatcctgtgtgtggtacatgtggttggattgtacaaacagataatcagagttttgcaaaatgtttcccaaccagcatgggaaaacgtgctgatagcaatatgattgggctttgagggagagccacttgctggctttttttcttttgtttcccatacatggaaatgccatttcaacttgaaatgtggataccttaccagaggattgcttgagcccgggaggttgaggctgcattagcgaactgggactgcaccactgcattccagcctggatgacaaagtgagactcctgtcttaattttttaaaaacccacacacaaaaaaaacaacaaaacaaaaagtagaaccttaaatgctatcttaaggctgaatagtctctaaatattgaaagtagaccctagccaaaagagacattacctgtttctgtaatataatgaatggtattagtgtacttaccttgcattttaaattcaattctgtaaatgtttatggagcatgcattatgtgccagggatgaagacacaagaacaaaatgtggacctgccttttaattgcttacagtcaaaggtcatgataacaccatgtgatggagagaagaaagtcatgattgatcctcgtggaggttggaaggacttcccagaggaggggctgtgtgagctgtgttttgaagatgaatagggatcttatagtcacaagaggagggcatagactcccagacagaggtaacagcagtgcaaaggcacagaggcttaaaattgcaggatgtgcccaggaaaccccaaatgactagatgaggcagatttgtaagaagggaaatggtggtggttggcggcgggggtaggggggtggtgatgaagaagcaaagtcataatgggtctgatgtcctttgctgaggagcttagactaaactgtttaggtaaaaggagccagcaaaatctttaagtgagggagtaacataagatttgcatgttagaaggctctctctggctgctatgtacagagggaggctaatggcagcagatctggtgaggatgctgggcccgtgatctgggaacttgcctgccccaaggcagcaatcatgggagtggagtcaaggaaacactaaagaagtagacatgataggactttttaagtgggaatggccagggctctggccatttggaagcctaaagagaatggaatagcatgagttcggtttgggggaaattcagtggtaagatgcttgtttgtcagaaacacacttgagatgggagatcagtttggtgtcatccatgtcctcttggtaagtggaaactataatataaaatctttcaggccaggtgcagtggctcacacctgtaatcccagcactttgggaggccaaggtgagtggatcacctaaggtcaggagttcgagaccagcctggccaacatggcaaaaccctgtctctactaaaaatacaaaaattagccgggcatggtggcacgcacctgtaatcccagctactcaggaggttgaggcagggagaatcgcttgcacccgggaggcaaaggttgcagtgaaccaagatcacgccattgcactccagcctgggcaacagagcaagactctgtcttaaaaaaaaaaaaaatcaaaaatcttttagtagatgtttatagagagagaagagaggagacttgaagaaggaattctaagtaagggttaaggttgagtggaaaaaagaagaagaatcagaaggaagtggtttcatagtaggataaatcaagtgctgagatgaagtcagttcactaacagactcagagttctattggatatggcatgaggttcttggtgtcaccatcttaggatctgctcatttttggggttttaagaacctgtctgaactccacttagccaactgaagcttgccttcaaagttaacacaatgtgctttctcccatataaaccttttaagctgtttctgatgactgttcctcttcctgttagagctccacctcttttaatttagcctccatacctttagagtaaggtctgcaactttcttccttaattgacagtggagatcaatatgtaacccagattgcaaaaatggtttgggaacactgcatgttctcactcataggtgggagttgaacacatggacacagggtgggaaacatcacacactggggcctggcaggggatggggggctgggggagggatagcattaggagaaatacctaatgtaaatgacgagttgatgggtacagcaaaccaacatggcacatatatacctatgtaacaaacctgcacgttgtgcacatgtaccctagaacttaaagtataattttaaaaaaaatttttaatagtttgggaagaaattgtgggcatgtcatttgcttgaacagattttgttccccagccagaggaccagagaagagtttgtcatggctacagtggaggaatcaaactcagaatagcatgtgaaaggcacattccacacagaaacttcggcccgtgcatcagcactgcagacagggggagaggaaatgaattctcagccagtagattcccaggcatcaccttgaggcagatatggcatattcttggccatagtctctacttctctaactgggcaaagtgtctaatcaactataacccaaaatatcttcccacatggcataagtgtcgaattcatacatagatcagagggagaaatgaaattgtggttgtcttaaaagtttacacagtttagggatctccatcatgaaaaatgatctaaataaatgaaatggtatttttactctttatcctacaagccctatacaaactaagtccataaatatcctatttgatgcttaaaccaaaagctttataaagagaatttcactatgtgaaataatgacttgaagaaatcctattgtggatgcttttgttaagttgctaaaccttttttaaaaagtagataatcatccaagatatcttctttgtgactcttaagttttagtgtatttcaaatgtggatagtttttgactaggaggtttgttcaaacgttcttctcgaccactagggggtgctctaaaggttagtgatgtctaaatgattgaccaatcaattaaaacaccgtgcccagttagcaatcatctccactgagagatgcctgctttaccaggctaaaaaaatgatctttatcatggcatagagactataaaagctgtgtccttttattttcattaacctaattagaagtcaagctaattgtaggacttcatagaactggcatcgggaatagtatgcaactgttaaaaaaatcatggtcttgatgactaattatatcaggaaataatatgcaatataaatgaaaagagaagtgtatgttttttactttttcctttctgtttttaaaacatgctataaaatgttaagtataattaggacacaaaggaaaaattaaatctagttaacattaccttgaaaacttcttatttgccctgaaatctccagttctttggaagctaaaagcttgagacttctatatctggttgtcaggattagggtgattttatttgaattttctttattttcttctcaattttctatctatttactttgtaattacatttgaactatggatatgtaattagttttataaatagaaaaatcaaagctttataaaggaaaatatagcatcagcagacctgattgtcctacttaactcttccacaaactgttttaactatgggcaaggtacttcacttctttgccctttgcttctgtaaaatggttgggtgaaacgaatcttggcagtttgttccagctcttctaaagttccattttaaattttaccaggagacaaaaatggttcctattatgttcactcttgaagcatttattaaccctcacaattggccaggcactgtgcttggtgctattaaagatatctcacttagtatctgggctctgccttcaagggtttccggtcccccatggaaaagaagaccaagtgcacagatccatcccagccctacacaatgatactggaaagctgtatgtggaccagaaatgccaaaggaggttccatcaggaagaggggacttgtgctctgactctgctgtacccctgatcatatgttaccacttatttatgctttaaagaacatcctggcctggatgtttcacagtgtgttaaactgcaaggtagatttcctctttgtttccctggtctactgtatatatgccagtaagccttgtcaggtttcattatgagagatggctataatgcatccagattactaggaaaacacttggtctttgaaaagagctgtgtgtccctctaggtttgaaatgcaaagtcctaaggctttgttatattcaggacatatttcaccttcccaaagactagtctcagctcagacaggatgtatcttgcctgtgggcttgacacaggggttgctgggtgattgaattaacctctgacatcttctgggctgtgcaaaatgataagttcaaaaaaaaatgcagccattagactccttctcattgtttcttccttgaagcctttgtaatctttcttaatgtggttaaattcaagttatttccagttcagacatggtgcaatcagatttcctcatgcgggtgcttttccactgtgacctctttgacgtcagtaactgtttcctgtttatttgaactccctgctcaccctgtagatgactttgtctgagaaaaataataaagcaacggtacttaggagaagttcaacactgctatctgttacggagatttccttctcctttcccccagccgtcaatagcactctgcagcttttcatacagcatgagcttgttattcatgtagaaatactccaaggcagttcttagaacttgggtaagtaagaatagatgtggctcccagcttaacattgccttaaagcaatagctacatttttcataacttttacgtgttatgtctatctttgaattatttccaaaaggtaatctgcatcctcactataattctgagtatggtggctatttcctactgccttggtttctggaatgatacatcttcaaatgcagtctttaaatcatagagacaacagattttttctttaaatggagacaaatctttgcaatctggttctgagattgaatcaactttatagaaaggaagaataactgctataaaaagtctcgcttacagtaatatgtttttagtacataaggagggcatttgttttgcaataataattattataaagcccctaaaatagaaaatatgaattaccagtcagtgttagaaaacttatcagaactgaaacctttgttagtatgttttggttatcaaatctagttttgtaaccccttgcttagcaagcatttcccagaaagaaaagtccttacccggtcaaggccattaccatatagcatcgggaaacatccctgtgtcccagcagctgggctaggactccttccacctccttcgaccctctatacccttgtcccacactgagggttgggggagctgctgcagttgctgtttcggctgctgtttcattcctgtccacttgtgagtgtgtgtgtacctccgccagtcttggaggtctgtgaaggaggcctcgagacccagtgcatgcagctcactgccacgtgtgccacagccacagccaaggggccttcctatgcctcatgcatcaggccctttggagccctgggagcagacggccatggcggctgaagctgcagtggatgcactcatgatgatgaggataataatagttgctaacatttcttgagcatttcacttatggtatgccagacactattcaaagcccttagcttaaatcatttaatcctcacaaacctgtgagttgggttgtcttattatccccattttgcagaagtgagttttgtgagagagaagctaaatacagcacagcaggagttgctcttggacctcaagcatcctggcccagagcccaggtgtcgccactgccctgggcttcctcttagtcataccagggacttgggcactgggcacaaaatctcctctttatataatgtagtggtaccaatagcttctattgattgagattcttttctgggcttggcactgtatgaggcacttggcttctggtttaatctttacatgatcactgtagttatagatgttattatcccagatttataaataaataaggaaacttcttaccccttaaaaatgggtgtgtgtgccatgcatggttgctcacgcctgtaatcccagcactttgggaggccgaggtaggattgcttgagcctaggagttcaagaccagcctgtgcaacacaaagatacccagtctatacaaaaaattagccagatgtggtggcacaaacctgtggtcccagccgcacaggaggctgaggttggaaggatcacttaagcccagaagttcagcgctgcagtgagccatgatcctgccactgccctccagcctgggtgacagagcaagaccctgtctcaaaaagaaaaacaaaaattgtgtgtattttagctgaaattctcctggtagcagaaaatttacttcaggtagtaagaaaactttcttaaggctatgcaaaaaaaagaactaaaaataaagattcagaggtacaacggatgtctcatgcaacccaagggcaggaattggccagctctctcggctgatctgaaaccagaaagacatgaggaaccctggcagttttgctcttggctcactcaccctccctgatctcttgtctctgcctcactctatgtttctgcttcattcttctccttcacccacccacctgtccatccacccacccagtctttctccactctcttatacccaggcatttcccacgtttacactgcaaaagcagtttccgtttcctaactcatgtttcctcagttcctgcacacagcctagactaaattaaaagctttttacctcagtttcagttttctggaaaagagactctgagcaggtgcagcttgatctaactggctgtgcacagatgctgagcgtttacccatgcggccaggctggagcatgggtaaatgctgaggaagggatcaccatgagctgagcagatgcctccaaagatgtttgccccagtgaccttacaggatcttgccctgcctggtccatgctcgctctccagtcactttccttagttagtatcatcttgtcactggtaccatcctggcatagcactttcatccacccggatgttatgtctcttgttcatacaaattgcccatcagctttaactcctatcgaacagcccttaatgagggggccttagggaatgcaccttacttatactgacagccattattcgggggatatttttagccccttgggcctggggaaggaatagttctgaactgatagccagggcagagagtggacccagactgcagcaggtcagtggcatcagagcaagtgacgacaggaattctattatcaccaggcagcagctcctctgcctcccacacctgtaactcacaccaggtgtgggacaaagggatttctgagttgctttcactcccaccggtgttcatcaccccatgttaatgacttgtacttgtggttggctgaatcagggacaaaagagaggagcagggacaaagggcttagccacttggctttagaagtgatgttaaaccggtctcctggccttgagatttcctaccacacaggtcagggcagacttcacctgacagaagccaaaagcctcaggtaaagctgtacagatgtgcaggctcagtttctaggaaaatggactttagaaaaaccaaaatggttctatgcacaggtttaaatacagaaacagtcatctttgccatctctgtctagagtgggatttgggaaacccctctctgccataggagtgactcactacaaccataatccatcttccagtacttccctaaatgcaggatttccaaaaaatgcttcacctagttgcttcacaattgaatttgtgaagcatgatttggtgtttgttgagtcatcagtgatactaattcttaaatagcacagactgagagtagagctgtaggtgagaggttatcttttgcctccttttagagcttcaaatacaggtctttgctttgtaaagggcattcactaaatatgagaagttttactcctttggaattaattttgctggagtgatttgcttttgtagctgatgttgttttattctatgtggcaagttccaacattactggagtctttttcaagccaagcaccatagctgcacctgttttaccccaggcactgggcttataattctagtagagactggtagtgagtgatcatgtttattaatggcagcagagaccctgcacttctcatttgtgggtgacctgtgaaagcacccctaagtagctttttgctttttctgcatttcattttgaaaacagcagtacagttacagcgaagcctcacactcacccactccagcgcttgacaacctgcctgccttcgcagtccctcccgtctgcctgacatcttacacttcaactgcacagtcttcctgacacctcccacctcagtccccactccagcctgacttgcataccctcatccttctaggctggggaattgactcctctcagaagcttccccccaaaccccacctgccaaattccacctccacctccaggctgctcagatgccctgctcggtgtccccataacaccttctgtacctctccactgcacttaacacactgtggcgatgtgctgtgtctgcatgtccatgagcttactgagagcagtgtggagtcatattagttttaggagactgggtccttacccaggccctggcgtaccacgtgtgtgtttagtaaacatttgtctttgttcagaaccttaaaggaaccaagaagatctctgcaagctgtagtagatgtcgtaaagcctgcgcaccaggctccaagtggagctgctgggacctgaaccagagccagccgattttcactgtggatgccattccaacaagcctggttacctcaggcagcagaaaggccattatgggacatgggtggttactcgtgtcccttaataatgggcaacaaggatgcaacaatttctttttgtagctgctttctgactcccattgcctaaacaagggctctctcaaacagcctcacaactgtgtctttcccatgtcttatcttccatctttcagatgaaaataagaaaaacatggaggaagcacatgtgactttagtttgcttctaattgcaagagtaatacacactcatcatagaaactttgaaagatactgaaaggtagaaaaaagaaatgtcaccccgatcccacaacaaaaaactgacttctgtcactctatagccatcttttttatcctttctatgcatctgtctgcatttttggctataactaaaatcatcctgcacattcacgtttgtgatctttttttaaattgaaaatacctacatgagagcacaagcattggcagcttcagcagcagctatcacttactgcacacttgcccgaagggacctgaggacatacttaatacaattttacttctgatgatgactcctcaccccaccacccaccacctgatgatgtgtgggtcttctttccttttcctttttttttttttttttttttttgagacagagtccccctctgtctcccaggctggagtgcatggcgcgatcttggctcactgcaacctctgcatcccgggttcaagtgattctcctgcctcagcctcccaagtagctggaattagaggtgcatgccaccatgcccagctaattttcttgtacttttagtagagacggggtttcaccacgttgcccaggctggttttgaacttctgacctcaagtgatctgcccgcctcagcctcccaaagtgctgggatgacaggcatgagccaccacgcctggcctggatcttcttttctaaacactagagattttttgtcgtttatctccttctcttcaaaagtaatcttggagaaattgctgccaaatctttgcctctctgcagcaaacattttaaaatggggtgaacagaagtgcaggtcaacagagggtttcctcacagcaaaaacattttgcttgttgataaacatgtctttgttttttatacctggtgacgttatttgaggtctttgataggatggaccagtactctgcattaagtcgtcgtcgtgtctcagctggcctgtgtctcctgcctgcttcaagagttgctcataacctgagggctgtgaattacactctgtgttccaggtggtgccagacaggaggttagaaatgagactctgaatgaaaagaaacaggtacagcagaacccatctttctggaattctaaagcttatggtccctcactgtgtagcagaggtgaatctgccagagtctggcattatctgagaatctgcctccagggctgtagatggggctgggctaaagcaagactagagggcaggattttctccccccagatctggaatttagcccacagtctggcttttagattttaggctttcgatgcctactgccttaaaactcttgccaagtgcgccacttatagcagcctaaggaatggccacttccccactgacccagttccagtagccaggtgttcagagcaattggaattcatgtgactgccagtcagatccacgaggaagatgaacaggctggttaacgaaaacatgtaagactgacctccttgcccagagatgattcagggtggctttttgtcttagtcttcctcaggccatcagtggccatccctccaaatggacagatacagcattggcataaaaccttactatgcagatgcagctttttgggatgtttccggtgtgtgtatatcctccgcccaacctgttgctaacctgctaattctaccttaatccttcccatttagaaaatacaggacagccattgctcatcaaagcttgtcccacccaattctgcctctccccttgtcagtcaccctcaaatgaaggccaggagcttaggcagatggcttgctgtatttacatagtttgcctgttggcttacattggccaacccgaagagttgttttggtggtggtggtttttgttttgtgaatcttgccattccttcttcactattaaattcttgcttcgcttttagcagaaagaagtgtttaataaattcaggggatttttttttcttctaattaaggcgttagttaaaatagggcataggaggtcataagccgtgcttccttctgataggggtctgcgtggttacaccaggcttgcaatgggagctgagcaggagcacgcaccctgctctgcccattgttcagctgtgaatgtgtggaaacaccctgtgcaaagccggtggcacttacaaccacaaataaagataggttcaaggctgggtgtggtagctcatgcctgtaatcccagcactttgggaggttgaggtgggagtattgcttgagctcaggactcgagaccagcctgggcaatataatgagaccccatctctactaaaaatcaaagccgggtgtggtggcgcacgcctgtagtcccaactactccagaggctgaggtaggaggattgcttgagccctggaggtcaaggctgcagtgagccaagatcgtgccactgcacttcagcttgggtgacagaatgagaccctgtctcacccaaaaataatgataggttctgtgtatctgcatccgttggtaaaataccactttcctcgcaaaataatctgcaatcccacaaaatggtatcacggggtcccaagtcgatggcactcatcctgtgggccttagctcatgtttcccttgctcagagacgtcgcctgacccccaggcaggtgaccagatatcacgcttcctctgcttttccttcacaggatttaccagaatttgtcaatctgcttgtgtcacttttttttttttttttttttttttgagtaatgtgtttctcacaccaaactctgtatggggagaggctgtgtctgctctactctctatgggatcgcggctccgaactcagcaccagctaatcaggaatttcataaatgtcacaggaaggagtgaggaaacccatttatcttagaggtgcttgaagcaaaacgttttacacttagataaatcttggatcactttttaaatgagacctacacgtttctttcatgaagcagtcatgatttccatagcactttattcacactacttgcatagtatttagtacactgcatagtgacttttaagagtccacttttacctgctaggttgagagtcacttaagggggagatggcatctcgctcatttctacattccgactcttgactcaatcttttgaaggactgagtggtatttccaatgtggatgctactgtgaggctgtcatttggcttcctttttttttttttttttttggaagaaggagtcttactcctgtcgctcaggtgggagtgccgtggcacaatcacagctcattgcagcctttacttcccgggctcaggtgatcctcctgcctaattttttttttatttttttgtatagacaacctcttgctatattgcccaggctggtcttgaacccctgggctcaagggatccacccacataggcctcccaaattggtaggattacaggcatgagccactgcacccggcctccacttctgtttggctgacttgtctaaaggggtgttctttttctgtgattgttctctgcccacttgtgagaactagagcacctgctaggtgtcctttactttgggtaattaaccccacatgttccagattaaaggcatttacctttcgatttacattctctctccaggtacatgacctttaaggtacagagctggaactcgagtcaaaggtttctgatgccttctgtacttttgatttcatgtagcaattcaaggctgtgtgaaatgaactacaggagatccaggtgctgctctgcccaggggatctaatcccaccagaccggttgcactgcaccctgacccatggtcaggatgtttcctggaatacatccacttgacagtctcctctctgtgccacagccttaggcaatatgctgctgatggagctctaggttaattgctacaccacattgggccctctcttgtgtttgtatccaggatcgtctgttttttgtgatggagtttgtgaatgggggtgacttgatgttccacattcagaagtctcgtcgttttgatgaagcacgagctcgcttctatgctgcagaaatcatttcggctctcatgttcctccatgataaaggaatcatctataggtgagttttggttgctgccctgtcttctaattcactgcctcttccctctcctggcatgatccatccttccacttctcatgataatcagttgaaaccttttttggaattaaattcacagaagttttgttttggtttttgtttttgagacagggtctcactccatagcccgggctggagtgcagtggcgcaatcatggctcactgcagccggtccatctggacctcccaagtagatagctgggactacaggcacgcaccactacacatggctaatttttattttttattttttgtagagacaggggtcttgcaatgttgcccaggcctcacaaaggttccaaggatccattaggataaattaataacagtaataaacactgcctgcaatctaaaatttgcctcactttgtattcataaaataggcccgacagtctcagaagagactgtttattcatgaattggttcagccccagtttgctaagaacctgtcatagccaagacctgcagggtgctaaacacactgttgttctctttttttcattttaacatttgaagtgaatcccttaaccatgattctattccattttaagaatctacaccttaactaaagggtgtggctaacctgctctaagttacaagaattacagtcatgtggagcatggctcaccagtcaggagctaggtgagccacttgtgagcagtgtcctgcatgataatatcttccgtgtgtagccccctcccaaatatttgattctccattttgtgacacacaatcttttgatcataatataccatactttgaatggactccgaatctgcttgatgttgttaagtctcagaattcaacagatatcaaatgtaactttagtcagagagaaggttggagacagtgagaagtgtaatagtgaatgttagataatttttattctcacattttcctgtttttttttctgctgttagtgtcctcacctaattgcacatatgctcttttttcttttttattgttttatttcttttctttctttctttctttttttttttttaagacagtgtcttgctattttggctaggtcggtcttgaactcctggcctcaagcaatcctcccaccttggcctcctaaagtgctaggattacaggcatgagtcaccacacccagctcacataaactctttttctcttgagatgcaattgttgctttccttagagaaaaattttcgtatattaggggcatgaatgccaaagtaaaggatttcctgattgaaatttgctatttattaaccttgttaaatgcagttcctatcataaactcatgacagtattgacatcattattaaattataagagctttaaaaacagtgaatattcttaaataccgtgggagtcaaaataggaagagaacaagtagtaactctcttagagagagtgcagtaagactggtgggtggtgctggagataagtgggaacgcaagcactgcatagcaggtgtggcaggtaccacagagacacttctctaattcattctcagtgcagatcccctagacctcaactccatacagtgcatttatcacagcctcacggcactgtgcaggagggaagagggtgcagaactgggaaccagcctggataaggacagtgggagccacctgtttgaaagcagtctaggatctctgctcgttcttaggtcacggggctgcagcaggttgattaggcagcttgttttgagctttcttgaccaggctgtggggattagatcacagcatttttttcccactctccactttctttccagtgtatgctttgtggaggttgctggtatgatctctgatggtgaagggagttaagcgtcgtcctcatgctatcagactccaggcagtaaattccatttttgttctcctctccgcggctaatccagccatctccactccgcttgccccaaagagagacgtttccacatgtagttttaaaaactacatgtaagtaatgactcccctacttgacagggacttctgctgcagatcaaaataatattaacaacaagacctaactgaacacttggactgggtgtggtgactcacacctctaatcccagcacctcggaaggctgagcggggaggatcgcttgagcctggaagtttgaggccagccggggcaacataaggagacccctatctctacaaaaaaaaaaaaaacatatacatatatgttaaaaaattagccagccaggcgcggtggctcacgcctgtaatcccagcactctgggaggccgaggcgggcggatcacgaggtcaggagatcgagaccatcctggctaacaccctgaaaccctgtctctactaaaaatacaaaaaattagccgggcaaggtggcgggtgcctgtagtcccagctactcgggaggctgaggcagaagaatagtgtgaaccgcagggggcggagcctgcagtgagccgagatcgcgccaccgcactccagcctgggcgacagcgagactccgtctcaaaaaaaaaaaaagaaaaaaattcggcaggcatggtggcatgcacctgtggtcctagctacttgggaggctgaggtgggagaattgcttgagcccaggagattgaggctgcagtgagctgtaactgtgccactgtattccagcctgggtgacagagcaagaccctgagtgtcaatcaatcaataaatcaataaaacgagcacttgttacaggaccagcacttcccttgcattcgtctattgattcttctaacaatattattgtataacaataatagtgtccacactgttccgatgaataattaggtcttccaaagacttcatcaccagactgctaactggtagtgaagtcagaattcaaaccatggttctaaccactgggctacactgtcttctcaggagagacttgaggatttagagtaccattacagtgtcagcttcttagtcctttttggtgataggaccacttcaattcctgaaaataaggtagagtgggcaaaagcaattcagtcttatctcaagctttcttgaatcctcagaggctttgagttgggccgagcagcaagcttcctttccttcattggatattaccgcccctcagtctacttgtctcatttgtctcaaaatatggtgggtagacactgtaacttgatgtggtttctgatgaagcagtgccagcccccatcttgacaaattttatttcaattcatggtgtctgtggttcagttctgagaattgattttaatttactcttggacttgaatcccatgttcaggctctaactgatatggttgactttgaagggaacacagttaattaggatagattcaaatgctatttttatcccttggatttatttcacaggataatttaattccattcagtatacaggctgggaacagagtcttaaggataagactttgaaagccaagtccttggaattcacacacagtaaagggcacatttgggtcacagagggtgtggttttgatacaagagcccagtgagaaacttgggagtatcaggcagcctcttttatcatacatgtcccagaacgccctttatcagagctaaaataatcccccagaagatgcctctgacctatccaaacagagctgttgtttgtctgtttggattctttgagggaggggagggagagaggtgtttattttccagcaggttacaaagatgataccatatgcaagtcactgttaaagaaagcttcagaaggtagtaccttaggctcctctgacacaaatttcttctttagctgcctgtgcctgtgcaagaggacatgggccagttacgtttgcacgcattccgtcttgtgttctgaccctgattctcagatgtattcacttgtattttgtggaggaacagaagcccagttcctaggagactcagcaagggaagggcctgcctctctgcctttggttggagggtctggaacctgccatggcccagaaaccaagaagagtaggctgggaaggaggcagtcatcaagtcagttctcccaaggggaaaaaaagaagactattcattcttttgtcctgggcttcttggccgattggaaggccagacagtgctcatgaataatttactcatggtgttgacttttttccggagtcaagccctacagaaaagtaagggaaacaaaggggcatgcatcccattgaccagacatctttcagcatgtttcatcaactgtattaaagggaaactcagctgtcattgacatttcaaccccaaactcctgaagccagccagcacacatttgattggctgtttttgacaaagtgtggaatactgtatctgaaatatgttgggtgaggaatagtttatagaagggcacagtttaaatttcacttcctcctcaccatgttacccctgggcacacagcactttccaacacatgcttttcgactcatgagtctgactgctttgtgccttatgcagctgttggcatgctgggtgcacggtaattagtgtttaccctgaaagctccaaatgcttcccgtggtatttcgccatcccattttgcagatgtggcccacagaggaagcttttgccccacagaggctcactgccaagtctgacatgccgccttttactcccatgattacgtggcacatgaacttttcaactttgagctgctgatttctcctcagattgagagaaaaatgtctacttaatttgactcttttaaaaattcagaatttgggaagagtagcaatctcactcgcaagattaagccctgttaagctagtctctgaacatagttgggggatctgtgtgaatataccgatcaccaacatcatctagctcttgtttctcaagaatcatgagggtccacaggtgcctcgctgactccagataactcagctgggcatagccttgcttggcaagtggtctcctctgtgagcaccacttcctggtctaagaattcacaagtgatccgtttccaaatgaatttgtgtgttggggccaggcacagtggcctatgcctgtaatcccagcattttgtgaggccaaggtgggcagatctgttgagtctaggggttcaagaccagcgtaggcaacataaggagaccctgtctctataaaaaatacaaaaattaggtgggcatggtgtagtgcacacctgtgtagtcccagctactcgggaggctgagatgggaggatcacttgagcacgggaggtgtaggttgcagtgagccaaaattgcaccactgtactccaacctgggtgacagagtgagaccctgtctcaaaaaaacaaaaacaaacaaaaaaaaatggtgtcttgggccagtgatggattttacatgcctgagttactgtgcactctctctctctccctgcagttcttcccctctggaaaactgtggcaatctctctctgattcccacctcctaggacctctcttactcctcagtatttcttatcagcagactttgagtccccagatgtctttcatttgagcctggagttttgggctcttactgtcacctcacctctattggaattcagttctgtatttatattcattctactcattctagtgaggaaaatctttttagataaagatgaaagtaaaatttaacagctctcttttccctttgtcatctgctggcattattccttctgctgcaagaagtaggtctcttctctcttgatttgcatactgcagagactactacaaattgtcatttgttgtttgtatagtccttgtttattcagtacatgccagccatgggaatgctcagtatattagtaactttcacatcagactttggctgtgagccctcacctgggactgatactggctctttgagctttttagtcatgtgcttgtctcttctcttacttagcttgtcatgccttgctgtgccatggtggcctcattcagtgactgctcttcaactctcaccagaaagtgaccaccattcctgacttccaagatccttcttcaaggatatgatggagagctcagagctttccagcttcttagagtagctcagcatttccctcaaatggggtcttcccttttcccgtagtgaaactcatcagccactgttctgcacccttgcatggcctctggagatcttttaacaagtatttgttgagcgtcacccttctgccaaggatatggatgtaatggtatgagcaaaaacaaaaatactcgccagtggagggtatgatccagtgagggagaaagatgtcaatcaaatgattataccaataaaaagtagcaaccatgactagtgctatgaagaggagaaatacaatgcagtgaatgagaacctagaatagggtgattctatccagttagggaaagatggaagatttttataaggaagtgactcttgggctgaggtcacggtaaagagggaaggaaggaacatttgagacagaagaaacagcaaacgcagatagatgcccagtaacaggaaggagtgtggcaaggtcaggggtttttagagcaggccagcctggctggagtctaggaagcgcatcttacttcacttggcattttattatcctacagtgttcagtcagctgatgacttcaagattttattaaacactccttgtaaataatttatttgaaggttaggtaaggccggtcatgttgccaatccctggaggagccatctattcacagtgagttctctgtgtccaggtctgtgcatttatactcaacaatgggtttataaaatattagagccagaggagacctcaaacgttgctaagggccaagttatcttttacagatgagggacttcaggtgtgaaacgtccaaaaattgtttctcatagtggatattctcttcggatgactcatctgctgtttgctttccatctccaggaaaacaaaaatatggctagaaaattttgtttcagtcttcaacttacagctggcatgaagagcaaatcaagacattttgaggcattcaaccctgtttactccattgcagtgagaaaaatccagttgagatcagaacatatttcctgagctgccacctagtgccggatgttgcattaggaggtgtagatacaagatgagtagatgagatgtctgccctttgaggcgctttctgtggggtgagagagatagccattaataagtcatggcagctgggttccaaaattggagttttcccagggtatcttgggagcagacagaatggccacttgccctaagatggatgttcaggcaaacttcctggaggaggtgatgcctgagctgagtgtgaagagttaaaagctgaacaaagataaggagggtgtttaggtaggggagcaagtttgagcaaagcagagaagtgtggtgaatgtgtagttaaagtggaaaacgacaggaactttggtagcactggagcctgaagttggaggcatgggaagagggaaggctagaggaggctgcagaaatgaagtattaagcacttactgttcttgagatgtttgaattctgggtcacttaggactttgctccattgcctatcacaggaaacataaaaatgacagtggcttaagccagatggaaacatagtgctctctcacatgaaaagcccggaggtaggtagtccagccccgccatggaagctccgtggagtcatttgcaacccagatttctgtgctttctgttctgctgtagacagggtcacctccttgtctaaatggttgctgaagatctaggaatcatctctctattccaattccatgtagtaagaagggctagagggcattcctccaaactgagtcagctccctttaaggggcctcctggaattccacacagtacttaccatggaattggccagaacttgatcatatggctgagtctagctccagtgaaagccaagaaatacagtattacaagtggccatgttccagctaaaaatcagcattccattattaagaagggaaagaatcattatttgatagaaaacttgcagtgtcagacacaaattccatgccagggagtctgggctttatggagcaggtaacctttgaagaattctcagcaggtcttatgacatgagtggatttatattttacttttacgtgcgggtggggggcatggcatgtgtggacatacccatggtaagtagcagccaggttgcaagggagaggttcattttgaggcagttgcagagttccaagtaacaagataatgaggacctgaactaagacagtgatggtagggctgatgagaaaggcataagagataatagcaagtaaagctgataggacttagtatttgggtggattcagggtaaaaaagaaaccggaaatcatttccaggtgtttagctagaaggttgagtggatggcagtgccattagctaggagagatcatgtgcctaggaagaagtctaggcaaaagaggaagaagttttagaaaggttgtatgacaggtgcctgaggtatactccagtggagatgctccatggataggggcataggagtctgaagctcagtaaagaggatgggctgaattaaatatttggaagtcatcaggacatagctattagttgagaccacgagactgaatgagatcacccaataggagtctcttaaatggaacagtgtgagtcaaggacagaaccctggggaaccagactccattagaaatctgcctaaatttggctccagggttatagaaacaattggtatgttcatcatttagagtaagtatccccaaagtgccagtgtattaaaaatataattccataaaagtatagaaaaagatcacttactttagagtatgtgtgtgatgctacatatattcttcctactgaaagaatgctggacatggttttcagaagccctgcatgctagacccagccctggtcctggggatgtgggcaggttgctgaatgcccctagccctttggcccatctgtacagtggaggtgccattggcacagcttcccagcagggtccttgtaaaactcaaatcagatggaagtagaaatgcgaatgctttttggaacatgccgtgtcaatataagaggttatctttgcatatgtgctgtcacctgatttgggttttcttggtatccataggcataggcagcaattattctcaagacactgcctgaataacaggtaattcttcatagaaattggagttttagcttgtaaaaatcaaccttctgaagaccagtctctatagtaaactctggtcatgcttttctttgaaaccaaatcattttctctgtattttcacaatattttgaaattgcaagtgattgatatacttaccatgaacttaccataaacccttgagataattttcttaggaagtcctagggcatatgtgacaggttgtacaacctgaagactatactctggcattttgtttcaatttcaacagtttctaatgtttaggggaagcagttgacctcattttgagtttacgccttctggtattaaagcagatgtttgatggttaatttgagaggagattcaagaaccttttcagaccattagtggagtgaacatcctgaggatgtaatcccagtaatgcagtttctcaaaggacctaactttataacagatagacatttaagccctgggacaccttgatcatttttctgtacttcatatattaaaccagaatgctgatcctggcatacctcctcagggtttggccttttcatcagtgaaggctgtgactatttggaactaattgataaatgtgttagtggctttcaccagctaatgaaaccaggccaccagttttgctcttcttcccaccaaattgaccaagcaaccaattgcttcattataattacagagaatcttggatttatttgctgaacaagaaaaatacagtcatttaatctttatgtattaaatgaacacaaccatttgtaaaaagtaattgaattgtacagttcaacaaatgtttatgaaaagtctacccaatgcaaacctttgtcaggctcttagggagtaaaagaagaataaagacaggtcctgccctcgagcttggggtgtttgttctttccgttaacaaataatttttttgttgttgggcactcactgtgtaccagacgctactgtgagctctggaaaaatacaggaaataaaacagacaaaaccccctcctctcagggagcttaacttctagcacaagtagtaggacaaaatatagaaagaacacaaaagtaggacaaaagacaaaaatatattgaatgttagggtgattcagtatatggataaaaaacttggtaagagcaatataaaattcagtaacaaagatttactgtttgacacagagatttttaaaagcttctctgataagggacatttgagcagatgaacaaagacctaaggatgggaggaggcagctccatgtgaatatctgggagaagagtgttctaggccaagtccttggagggagagtgcgcagtgggatcaaggagcagcagagggaccagtgggctggagcagatgaattcgggcgtcatgggcgtcgagggcccaagcctttttgttttctttctgcaatacagaatgctaaccacatgtgttgagcatttgtcctgtaaggataaactcctctgtttaattgtatcttctgtatgacagttgcacaaggtaagtggcattatccttattttgcagacaaaggtcagtgacattatcctatatttaaggctctgggaagtgaaaggacttgttcaaggtcacacagtatgtggtggaatctacaattccactccatgatatccttttgaatccatgcaggtgctgagttccctcacccatcaggcctttccacacgtttccctctgcttagaatgctcccccatctctttgccaagcttccagctaccaattcttgcagtctcatcttagtcatcacctcctctgataagcctttcctggactcccctaccctccagattccatctaggttaggtgccccctctgttcccatggcatcccatgaaacccttcccttagtgctttccataggctgtgcccctgtgcatatgggttcatgaaggcagggactgtggctgtccaagcccagcccctaggacaatgacaggagtgttaggtgttcttaggtgttcatggaattgaccaaggcctcaaattctacgctttttttattttaagatgacaggtcagggctgagaatatattatgattgctaccatttattgaacatctactacgagccaggctctattctgagctctctgcattaactcacctactcctcatgacagcgctatgatatgacactcagcttgggaagagctgcccattgattgtcttattctggcccaaacccatgattttctcataactcaaagcagtcttttttaaataagtgaaagccttctggaaagtttctctgattgaccgaaaaggatgtttgcacatctgtagtagtgatgcatttatatcctcatacatatttatttggatctgacttcgattctttccttagaacagattcctggaaaggcacacaaattaacgacttttagagctggcattgtggataagagctggggctcctgagtagaatggacctgggtgtttccagtcttggttctgccacttctctgttgtgggatcttgatcaggttactttacctctctaagcctcagtttcttcaatgataaaatggaagtcctggaaatactcacctgagggtggttgttagaattaaatttgtgatgtggaggtgcatgtaaagcctttagaccagagcctggtatgtagtacatgctcagtgatgttcacttttaaacattctgtttgctaccacttttgggaaaagcatcaaacacatgttccagtgacgggtattggtgccatttttctagttcccctcatagatcttaagtgcacaattggataaattttgacatatgtacacattgtgtaatcaatactccaaatactatatggaacatttctgtcatcctagaaagtttttagtgcccctttcagttagtccccaaacacccccataggcacccagtgattctgtgttgatattataggctgtggatatccacattgaaactattgagtgtcttcaaagtagaattgcttctcaggagtgtccttttcagtataagaggatgggctctttaaactgactacatgagtgtaatggcagttatgatcagaagagactacccaaagaaagacttcatcccatcagtcagttttactctctgtagagaaaagtaattacaggaggataaacaccagcacatcaacagttgttgtctgaggtaatataggtgatttttattttctttttgatggttttcaaatgttctgtattgaacaagtgttgtctttttatcattaaaaaaatgccatcctatttatttatttatttagagatggagtctcactctgtcacccaggctggagtgcagtggcttgatctcagctcactgcagcctctcctcccgggctcaagcgattctcctgcctcagcctcccaagtgcctgggattgcaggcatgcgccaccacactcggctaatttttgtatttttagtagagacggggtttcaccatgttggccaggctagtctcaaattcctgacctcaagtgatcccctacctgggcttcacaaagtgctgggattacaggcatgagccaccgcacctgggcagaaatgctattttagaagtgatctcatgtgatactatgtttttcaacatgatgtcagaaattggtaacctgctgttttatcagttaagttctgtcaagccccagcctcatgctgtgaccactccttgtctgtgaaacccagttctacagaagtcacaaagccattgtcttagtctgctcagtactgcttagtctgctgccataataaataccacagactggattccttgaacagaaatgtatttctcacagctctggagactgggaattccaagatctgggtgctggccaatttggttcctcatgagggctctcttcctggctttaaggtggctgccgtcttgctgtgttctcatgcggtgaggggatggagagagcacaggctttctggtgtctcttgttataaggtcacacattccatcatgagacctcacctttgtggcctcacctagccccaattatctcccaaaggccctacctccaaatgctatcacattagagcttagggcttcaatatatgaattctggcaggacacaaaacattcagtccattacagccattcattcatacacgtgtttggggttttcagttacattaagcaacatgttttgcagctacttggtttgatagtgccaaatctacccggaaatgatttcagccctaaggaaaacagctcctgctacagtggaacacacagtagacaggcacgagagaataaccaaggattagaccgaggcgttgtcatgcgtttggctcattaagccatgcatgttaggcttggagctctattttgaggtgtgttgagaccaaatccttctcctagatcccagtacttaagcctggcaggaaaaaaagctgagtacactgtggttttagagtgtaccttttgataaatagtttgcagcatgtccctgaaaggggaattttttcctttgtcttgcaaatgtcaaattgtacttttctgtaaactttgtaagtagaaatgtgaagtggtacaagtgctctgttgctttttggtgaaaatgctcacacatgatgaatttctcagttcagttgcaaagagaagttagtgaaacctgacaggcaaactaccccacaccctggagaacagtgtcctgggggtgtctggtttgctaggtgtgtggctggtgcagcaatgggaaggtggcgctttgactgcctggcccctcacatcttgctcctcccttttcactgctcctctggcctccagagtagccatgtaagcctgtgctttcacgtacagaattgctgctctaccctgttcttggcatttgcgtaaaaatttactgtgttccgctgacaaaattctagaatctcaaagctggaatggagttcaaagttatatacccttcttctttcaaagcatgaatatccaacatctgccgagcagtcatttttttctgtacttaaacacctataagcaaagaggaacttacttcctccactttcagggatgtacggcttttggaaatttcgcctttctgttgactcaaacattgtttcccagtagcttcagttcactggttctggaccacctataaggggtagacttaaaaaaaaaaaatacagctctcttacaagaaagctgtggagatatgtgaaggcagtctgggtctcccaatctagtttacctgttaacaaaggaaatactattagcctgatagtcgctcgttctagctgtttcttcaggattactgatttctcagtaatccataaaccatccatgttattaggcattctagatacttggatcaatatccggttgacttgtcacgttcttctcttacgaaatcagaactatctgaactagcagttggctaactgaactgagttatgttattatagctcatgttacttcttttgggtaagacttggtctttttttttgagacacggtctccctctgttgcccaggctggagtgcagcggtgcagctcactgcagcctagagctcctgggctcaaaccatcctcccacctcagcctcccaagtatctgggactacaagtgtgtaccagcacacccagctaatttttgtaatatttttagagatggggtctcgctatgttgcccaggctggtctcaaactcctgggctcaagcaaccctcccactgtggcctcctaaagtgctggaattacagcttgaaccaccatgcccatccttggtctttaactggatattgttgatgctgactatagagtagcaagcacggtggaaagttaattggtgtggtgatctcaaaaaaggatatttaaattttcctgttgtaaggatctcaggaatttaattcctgcatccatttgagagtatagcttcagcctgtatgtgcacatgaaaatagagaaggtagtcataaatcccagaactgaggatctctgtgcacagcccactctgcaaaggtggatattttcctctcaaatcaatctgtgacttgctcaagggtgaattaccaaagatgaaacatgggctgagcacgggggtgggatgggggagacaagaaaatcacctttgggtatgtcaaaatagaggtacctatggaactccttcaaatggtccatctcaaagttggaaataccaggataatgtttaagactggccacagactcaggttgattgcatggaacagcatgaaaatgagacagtattggcttacagttaagaacgaggctttgaagtcaaacttagatttaaaacttacccccacaatgtactgtaattctgtgatattgtaccaactctttaattctctaagcctccgtttcttaatctacatgaggataacagtactatccattccatggagttacagtgaaaattaattcatgtggcttgcttattccagtgtctgacatcagcaaatcctccatatacattatcagttgttaagaagaaaagtgatccagggaaggaaattaaacaatgaatttacttgaaagacagattccataaggaaattgttgaataaattatggttatacccgtactgtggaatattatgcaacaattaaaagaaagaatacattagatctacatatattgacctggatggtttgtccctgatagataaataaatgaaaaaaagagagatgtgtgctcattttaatcccattaaaaaaaaaagcagtagcgaaagctacaccaagagtctcatacgtttcctcatttgtcatggctacataagggcttgcatcttgagctcttttttgttcatttcatttgttatccctcaatttctggcacagggcatggcaatatttcttttttcttgtcttcatttctgttttatttctagcaactgagccaacatttgtctgcaggaattcatggtggggagtaagtgatgagaagatgggtggaaacacagtatcatttattgactaaagagcagtgtcactttaatttaattttaaaatgtaaattaatgcatatacataaaaaggacacttttagctgttctaaaatgattacagtgaatgctaaatcctcttcatacccttgtccccagtctctcaattcctcttcctcaagacatgtccttatatgtccttccagaaatggtctatgcatatgcaagctctgcatttgaatgtctcctgttgaaaaacaaatggtggtatattatctacctgaagaacagagattttttcctaagtctttagagagatgaaatctaaatccttaaagaaaggtagtaggtaggcaatcttttcttttcttttcttttcttttttttttttttttttttcgagatggagtctcactctcactcaggcaggagtgcaatggcatggtcttcactcactgcaacctccacctcccaggttcaagtgattctcctacctcagcctcttgagtagctgggactatagcacatgccaccacacccggctaatttttgtatttttagtagagacgggtgtcactatgttggccaggctggtcgcaaactcctgacctcgtgatccgcacaccccagccttccaaagtgctgggattacagacatgagccaccatgcccattcaatcttttcttttatcagaagggtctatgggtgacagttcaagtcctggaaataattctgctatctcttgttggagaaagtgctggttttttcagatcaggcaacaggcttataaacgtttattgcagttacaagctacaaagaaagatttctttccagcactactgctccaggtagagcagttgcaccagtcattatttataactggattaaagagtagcagcacatacttctaccgtggttatagagtgccttctgttgtacagagtggactgcttattcaccagggagttctcaaacacctttctctatgggcgctgtcccaaataatgtcaagagagaaaaaattaaaaatgagctcctgccctctaagaacagatgggagcagccccaaatcttgcaaatgaagcaagagggggtattcagtctttaatccaagcagctagaagcttgcctttcccaagttcacccagtgaggattttaacactcctttgacaaagaaatggggccgagcagcagaggaaggcaggtgacactgagtcatggaattcaccctttcgagcccttcctgggggatgtgtggctcttgggttggttcttgaaggaaaggaatgaatgtaagagaggaagggaagcaggcttttttttttttttttttttgactcctacacagaagatggaattgagaaaaatatactgtggcggtgaaatcaacttacaaaactgaggaggaaaattttgacaaaagcaaacccaaaatctgattactgtggggctgtccattttattgctgcaccaaggagcagggtagatactattttggcctaaagaacactgaaattttgttttctcatttgcaaatagacaggttcaaacccgtcagaggccgtaactgagtttccctgtgactgatttgtatgtgtgttagtggttttttttttttttttcctgtaagaatctggttgagtaattcagaaggttaaaaaacaacaaaacagaaataagtgagaaaagttaactgaggtctgccacatatgccgggaaggtgcccacagactggcagaatctgtgcagtctttgtctgtttctgcctatgcaaatactaagccacgctcaacagagcttgagcgttgtatctgttcaactgccatttaagaaataggactctgttctcaacagcttattccttggggtttcagaatgtaaaatattaagtgtgtataatcacaggccaggttcccagcatttctcggcatttcagctttggcaggaggaatgggaaaaactgaagtttttatgtccaggaaggctgagtgtaatctttgttctgtggcactgggaaaggaagtgaatctgttacaaagcgctttacctctgaagcatgtctcaggggcagctgtgctttgtgccatgtattctgttttcataaaaagaaagaggtagagtcgagggcttaccatgaagagtattttcacagtatctcacttgatatatcatccagggaaagtgacctgtgttatactttgtgttttaagatataactctagaatcaaaaacttaccagagaagctcaagatactttactttgcaagaattaattctcaagataaaaactcatcagagttcaagataagaagggttcaattaacaacacattttaaatggaagaattatttaaaaaattgttttaactttgaatgagcttagattaacttacctgttgcagaggtaggtcagaccccatgtcatcatttgcccagaaaagtcccagtttgctcccataatcccccttcatgacccattttactctcagaggcccattttgtttattgggttttttttcttgagagagtctcgctctgttgcccagactggagtgcagtggtgcgatctcggctcactgcaacctccacctcctgggttcaagccattttcctgcttcagcctcctgagtagctgggattacaggtgctcaccaccacccccggctaatttttgttatttttagtagagatggggtctcactatattggccaggcaggtcttgaactcctgaatttaagtcatctactcacctcggcctcccaaagtgctgggattacaggcatgagccaccgcacccagccgtctgaggcccattttgggcggtacactgcatggtcatcatacaaagaggtgtctgcatttctacttttttttctttaagatggtagaaccaaacaaaaaagggtgtttttacaaattgagaggggtccctctgtaggaggggaatttctccagcattttcctttgatggagtattctcctctcgttcagaaataggaaatttagtaactaaagcattaagaacagatttattttttaacatcagtcactaccttagtttcagagacacactgggggaaattgcctttcccttacgcctcttgttttatgtcctttatatgagatgttaatatatttacatgaggtataaatttgtctgtaactttataggtttgtattcatttattaatccatccatccattcatttactcattcaacaaatgttaattgagacctattttttgcctggagatataatagtgaccacaataggcctgctccctgcccacaggaagcaggcattctagtgtaagcacacaaacaagtaaaagtaattaccaattgtgaaagttacatggaaggaaataagtgagcttttatttgtggttttatttcatagagctgaaggaagtgaagagacagatacctctctccccacttctttcattgctgaatgtctgaagtatttcttactccattggactactatgacagaacactatcgattgggtggcttgtaaacaacagaaaattatttctcactgctctaaaggctggaaagtgcaaggtcaaggtaccagcagatttggtgtcgggtgagggcctgtttcttggttcacggatagctgccttctcactgagacttcacatggtggaagccgtgagagagctctctaggatttgtcttttcttttcttttcttttctttttttttttttttttttttttttgaggtggagtcttgctctatcgcccactgcaacctccacctaccggcttcaagcaattctcctgcctcagcctcctgagtagctgggattacaggcatgtgccaccacgcctggccaattttgtatttttagtagagatggggtttctgcatgttggtcaggctaatctcgaactcccgacctcaggtgatccacccgccttggcctgccaaagtgctgggattaggagcatgagccaccacgcccagccggatttcttttctaagggcgctaatcccattcacaagggctttaccttcatgacctagccacctcccaaaggacccacttccaaatacagtcacattgaaggttaagtttcaacataccaattttggggatacataaacattcagtctatagcagtattttatctggggtttcaaactcaaataccttcagagtagaggccaatggggacactcctgtctcatggttctaaccagaggggacttgcatatccattcacctaaagctccgttaagaaaggtgaggagccccgagccagacccacaggaagtgtccccaggttgcatttggctctggtcacatattcactttttccagagtccccaaggtatactttagttccacatcaatgcctaccaggcctggttcagtcttacatttcaataggtccccttgtgggtctcggagaaaaagagagcagcattagaattttactaccacagtgagtttttccacttcactttggaaacattgagctattcctacgcagtttggatgacagaaatactgtgctcagtgcaatctactggaaaatctgagtgcttggaaaaatgtcaggaatactctcttttgtcatggaatttctccatattgcggcggtacttcagtgtgagtcagcaggaggaacttcggtgcaccaagcaggcctcacatcagtggggttgtgcgtcccagctctgattgaagtcaggggggtgggtaagtgatgtcctggccagtccagggatgggggctatttctagtgtgcaatgctggccctcctgaaccaaatgtgaacccccctggactctcgcatgagtttctctggaaagctcgtcttctcttctttacccaacccctccccctaccactcttccagaaagttgctcttcagaattccatgaaggatggaagcagccctgaactaactgccctggggctctttattctcaggctaccaagaaaagaaaaaaatgctaagaagcagggacctggctgcctgatcttccctatggtcactggctcttcttgaacaggcatgtaatgaaatagtgtggaacagtaagaaagctcctacaggcagaggccatccatgaagcctcttctcaggcaatggagtcttcaaatggaatgaccacagactgttttctttgaaggtgaatgcacatgtctaagccctaaattgccctgctaaaatcgtcttcccttggacaccaaaagcatagctgacaaaagcaaaaataagtgagagggagtacatcaaactaaaaagctgctgcataggacaggaaacacttgacaaaatggaaaggcaacctatggaaagggagaaaatagttgcagatctgataaggggttagtatccaaagcatataagcaacttatacaacccaatagcaaaaactaataataataacctgattaaaatggacaaaggacctgaatagacatttctccaaagaagatatgcacatggccagtaggtttatgaaaagttgctcaacatcactaaccatctgggaaatgcaaatgaaaaccacaatgaaatatcacctcatacgtgttaggatggttatccaaaaacctgaggacaagtgttggcaagggtgtggagaaaagggaaccctatgcactgttggtgggaatgtaaattggtgcagccactaagcaaaacaatatgtaggttcctcaaaaaaattacaaatagaactatcatatgacccagcaatcccattcctggatctataaccaaaggaattggaatctggatctcagagatgtctgcactctcatgatcattgcagcgttattcacgatagtcaaaatatggaaacaatctaaatgtccttctgcagacaaatagataaagaaaatttgctatggaatattattcagccttaaaaaagaaggaaatcctatcattccggacagtgtggatgggcctggaggagattatgccaaatgaaataaggcagacccagaaagacagatactgcatgatctcactcatatatggaatctaaaatagtcaaaatcatagaagcagggagtagaatggtggttgccaagggtggttgggggacagagaaatgggaagatgttgatcaaagggtacaaaatttcagttatgcaggataaataagctctggaaatcctactgtacaacataagacctatgattaacaatgctgtactgtatacttaaaattttgctaagagagtacatcttaagtgctcttatcaccaagaaaaaaacacaaaggaggcaggaggaaacctttgaagattatgtacaggtttattgcactgacagtagtgatgattttacaggtatacacctctccaaacacatcaagttgcatacattaagtatctacagctttttgtatgtcagttattccttaataaagcagttatttttaaaaatcctcttccctttggtcccccagcctttaacatggcaattgacatggcaattgacatgataaaagctactgtatttccttgatttaaaaaaaccacagctcacaaaatgcccatgattgctgatttgattaaaacaactgtactagcagctggcaagtgtttttttagccactagttttaaggaacattcctgtttcagaagtatcaaaggggagggagcagcacagatcatagaatcaaagtgatacagagattagagttgtgttcccctctaggtagtgatagaggaattgtttcctctctaggcacagtgatagagggtggcttcgttaacagtattattaaggccatcttactgacagcaaaagggaaacaagacagagtcttgatagttgggtaaaaggatcagttaaatttgaaagcgcttccttttgtatgttccggtcagtcttctgcaggaggaggatgtataaagtccactgtgtcagaaaagcagtcagtctacccctccccagtttccatctgggtatctttgtgctcctggtcatttctttcccagaaattgggggatctggtctcagataagaggagtgggtttggatgtcccaatatcacatatggtaaggatgaaaaacatggataagatgattgagtttatcttgtatatgaggccatgtgttgtaaatggtctttttttgctaactttcttgactctctagatgtatcttgaggagtgaagcatgaggacactgttttactcagtcacaacctagagtcaagtttttttctgttattttctcaagacagtgctaccaattagattgtatgcatcccatttgtcctcatttgattcccatccatgttctcaccttctccaaggtgactgttattctgattaatgttcagattcctgtaatgcattgttagcattgggtgctggatctgagccagtccagggtctggagagctatgcagagatagaagtggactccagaaagaggcccccgaatcctgccattccctctccaaggtgccagagtttgcagtttccaggaattgcatgtgatgcagattgtaaattacgcgtaaatatgtatttgtgtcttaaatgacttttttagtttggagaatgcccttcaccctatgactggcataccgcaacacactcattagccctttgttggctgacactttgaaaacatgcagcctcaaagaccattgttaagtcatccatggggtttgtttgaccatgaaggagacttcttcaccattgagttaccaggttcaacaggtcctgggcatctgctttgtgctgtttacctctgaagatcaaaagataaatcagaatctttgctctcaggatttagtctactgggaattctaaacacacataaattgacgatgtaagatatggtaccataaatgctcagagtgaaatgcaaacagaatacagtgggtgcttagaaaaggcaactatgaatgttggctgggtgtggtggctcacgcctgtaatcccagtactttgggaggccagcgtgggcagatcacttgaggtcaggagttcgaaaccagccctgccaacatggtgagattctgtctctactaaaaatacaaaaataaataaataaaaataaaataaaataaaaactagccatgcatggtggtgggttcctctaatcccagctacttgggaggctgaggcaggaggatcacttgaatctgggaggcagaggttgcagtgagccaagatcgtgtcactgccctccatcctgggtgacaaagtgaggctccatctcaaaaaaacaaaacaaacaaaaacaaactatgaatgctgatggagaggttcagtggaggccttgaggagatgacacttgattctgatatgcaagttttccattaacagtgaaacagggaagtccatgctaggtagacatagcgacagggacagaggcgtggaggcagaaaagcgtcctgtgctaaggaatcatgaggactcggtatgatcagaggaccagagcctgggaaggagcagggcagagctggcagctgaggtagatgggggtgagaacctggaaggttttgaatgttgggctaggaagtgtgggctttattttatttgcctttcaatagaagccaacagaggtttttgaggaagagactaacaggaaataaatgcagtgtgttagagtaagtaacagaggagtaagcctggaagccaggagttcaagtaggaggtcttctcataggtcaggcaagaaacagtcacagcttggggcaagccagtaatggtgggaagagaaaggaaaagaggagggggagcgattcacatcgaagggagtctgatgatgtggttgggggaccaaggagtaggcgttaaagatgactccgagatttccagtgaaggagcttttaactgagtagggatagcaacagagtacagtttagtttttgtttttttgtgtttaaagaaacacttctggtagttttgcccataaagcagttagagatgcggcctggctctccggagagaggtgtcaggatagggatttagactggggagccatctgtctaagggaatacttgaactcacgggactcaactgcaaggtaaagtgtcaagcagggcaactgtgcacaactgggcagattgggccctgaacaaccctagggagtgccaccgtatcctagtcattgtagatttgtgcaatgattgaattttctggcagatggcagtcagatgtcttgagaaaggggcacctttttctaatgtgcacaaaggtaccatatggtgtggcaggaatgctggaagtaaacccaggcaagagccaagaacagaaccttagggaaccagctatcctataagggagggtggaggaggaggagcctccggaggagacacttaggggtggtgagagacttaggtaggatttaagtgtttagttgcctccaatttgcctgaaaatagagtcaccacacagtgaactctcatcttactttggtttaatgactcaagtagagcctctgctcatattatccatcagttcttccttttcacatagccggtgagttttccttggcactagcaagtgggatcattaactgtctccatttggttcggatgtagaattattaaacctgtggttctggtcttgagagccaatgcctggcaggtgactgtggcccagggtgaatacctgctgcaaagcctcctctagaaggcccactgcagagcctgcctggggagctcctaggagggcaaagggcaccctgccaggcaagtcacctgtcacacctggctccagccagctaggagtcagattggggcagccccccacccagaactgccagagcctctcggatggctcaagtcctcacctctgagggcctggcagggtgaagaacgctccttgcctcctgaaccatataagaaagaaaaggcatctccagagctatagcttggaggcttggctcctttatggcataaactacaaaggcgcacagcctccccgatgtgtgccaataagatggcataaatgcttcttgtggaagagaaggcttgtgccctgccttggcacatgatcctctgcccacacatgcttgtcattgctgcttcctggcgcttgtgacctcctttgcatcagtggaaagttacaggaggagagatagcaccacctttctagtcaggaatctgtcacgcaacccagatcaaaaacttcaagttcacttctgtgtcaatgggatcccgactctgtgggtggatagaacattgtgtggaaaggctgtaaaactcagagtgtaactgcagtttttatctgagtggctggaactctagcttgtttattacctagatcagacaggtaaaatgttctactttcaaataattcatgtttttcagatcttgaattttggtaaatttttttcatcagttgattctgtttcttaatttgaggaatagagttccttttctaatgggaaaatatatcacttgtcatgtctgtggtgctttcttgtgttctacaaactctacgtgagcataggctgtctggctctggggatcagaagcactcagggagctctgaggacaggatttcatatactacatcctgaaactgggcagatgatcacatgaccctttttttttttttttttttttttaaagcagggctcagaagcagagagagaaagagaatttttccacagcctcagagagaaaatccaggaaaatccaggagtagaactcatgaggctgaggttctggaactgtgttcccaaactgccttctctggaaaaaatgcagagggaaccagccgattcctagtaaaaaatttttgacttactgactttcaaaaagaaatgagttccatatgatgggaattgcattctttgatttggacttaaaggattttctgagcttttaaatggtttcctatgtaatattccatctcttctggtttgggagttttccatgaaatgcctttttaaaaaatacccaaagcatcaaatgagcttttcagcttgatgaagaacttaagaaatttcatcattccttttcttcctggctgaccttttaattttacgcaagatatacaggagtgatttgtcttgtctggtttgtaaggatttttaatcaccagccacacacattagtcactggcttttgtacgtacaagcccaattttctttgttttgggggttttttaaataagtttgtttgttcatttatttggagacatggatcctgttctgtcccccaggctggagtgcagtggcatgatcatatcctcaaactcctggattcacgtgatccttccacctcagtctcccaagtagctgggactacaggtacacaccaccacacccagctagttttaaaaaaaattttatagagacagggtctcactgtgttgcccaagctgacacttacagtaacagtaggatcagactgagagctggaaaaggaacagcgcaatgggattggtagcataaaagatttaccaccagatgcagaaagcagttctcaccattgcttcctcagttccttagcatccaccacgcgcagaactttacactttacactcaaggggtgtatgaataaagggaatgcaaccaaagtttaaggtaagaaactcagagcttgttcagttcagttagtacttaattggctacccagccttgtgccaggtaccttgttctggggctagagagctgaaataagcatggagaagatctgcagggaaaccaacagatgcaatcagtgcaagaaatgctgtcattagaagtgtgtaccaaacaccattggagcacaggcggagagacaccaaacttggcctaggaagggatgcagaggctttggagacagagaagcttcagttaagagtgaaaaagtcagcccaggagagaaatgagctcttccatttatctgtggtgataaatcaatgtgttttaatttttcctttttcagtccgtttaggaccaatactttttataaaatgtattaaaagtaaattactagaaaaatgaaatttccaaatacatataaaacagaagaccacatttttattattagattcagcggacttatattgtcatgtagtatgacagtatgatagtttgtcatactgtcaaatagtttcgaaaaactctgtgcctctacttttacctcaccatgggtcagcgccagtttgcagacgagcggcagtttgtggaccacactttgagtagcattgccctgggcagaggaggacatatgtgaggatatagtgattgactgatgtgagaaatgtggagggaatatcatcgtgtcccatcccatcgttttacagatgaggaaactgaggcccagaaaggtgacagagctaagaccagagtccctgctttctaactcgagacagttcttcttcttgtcctttgactaactcacctgaacagtcaccagatagcaccagcattccagcctgcctaccctgcttcacccacgcctactgcctctgaagaaagggaagaatctgtgtccatcagaacatgccggggataccaggacaccagcctgctgcccaacctggctgacccgtctgctcacggaccctgtcttaatgacagaagccactccaagagttcactgtgtcctgcagtagccagttaaattcatgtaaatcctgtttgggcagtcagtggaatttttaatactcttctcctttaaaaaaaaaaaaaaaaaaaaggaacaaaggtttttctcatctataagccaaacatgagcaggcagtcaccaagcagggcaaattgttatctcttggaatcagtttggttctagactggtcttgaaggattgacgcctggtctggggtggacttgagagccacagagtatgctgtcctggtcttaggtcatccccaagacaggggacctctgcaggcaatagcagcttcacgttggctgtagaggtcccagatgggtcccagggtcccagcacaaaccagaatccacccagctccccccacatcctccctaatccttcctcactgcggtctcctgggaacctggccaaacccaatggtcagggagggagttgctgttcagattaatagccatttattatgggcctggtatttgcaaagcactgtgttaggcactgaagggaaccccgaaatataaagatatagaaacgaaggcaatgagtctcctcatggatattgcattttaggtggagaaataagtcatataacagcccagacgggattttgaaatttgttctctctgcctgcctcttttggtccccatgaccaaggaaggcaaacaccagtgcagtggcattgatataaattcttaaatgtgaacatggcacttggagttgattgcttatttgtgaaaatacatgataaaaatattcatagattcagacatgtcaaaaagattccttcatttatcacagagttgtttataacagtgaaaaatttaagaagtctgcaggtggccttgcatggtctgggtgttatcacaccactgagtgtcaaaccagcatctgctgttgggtatgggtcctaagcaatagacagggagggggtgaagaacaaggactggctgtacagttgaattttatttgattacgttgtgaagtacagatactgtttcacttcctgggaattttgtgttttatttctggagatttgaaattctccagaatggaaataaagttctccagccactgtggtggtgtggatggcaacagggttcagtgacttcccttatcctcgttcaacttattctacctagcagaaccagtcacctgtggtgaattcagtggcgtttgacagtctaggatgaaccgaatgaacctcaacttaaaccagctttttgtcattgtactgacctgggcacttgacactaaacagagatcttaattcctgtatcttcatgcatcagaatttggtcttagtggagatgtcaatagacgacggtgttgtggctggttgggtttaaccagttctggaggcattttgctcgttgcccaaggtactggtgccagaccatgtcactgtatgacccatctggctttggctcctggctctattacccagagagcagtttataagccagatgtgtcacttaatagtaggcatacctgcccaaaatgcaaaagcttacagtagttatctagaatttacgaagcttgtttttactctttatcagtgttgattcttataaaaatcatgacagtaggccatgtagatattatctttcttgttgatgaataaataatagccaagggctctacagcacttaatgcattccaggcgctatgctaaacctaattcacattaagtaactcatcatttctatgaggcaggaactgttgttatctacatttcttgatgaggaaataagcccagagtggttaagtaacttgcccaagatcacacagctagtaaaactaaaactaaactcggctaatcaggctctaaagtctgtgcccgtagcctcacaatatgctgcccattgaaatcagacagacagatgagatgtggtatgacctccccaagccacttgggtaggggagggaagcagattgagggaggcaactgtaaaagcatggttgggaagttgtccttggctcatctctctatatggcacagggctccaaactgaaatagccactattgggtcaagattagtccagcatttaggcaagaagaatgttagtccagtcatctgctacttttgctagcatgtatggtggtgacactttttaaactaaaagtaacacacataggctaaaaaataaatttttcctggtttttgaattctgtttacttttaagatcttaggaagttataatgactcacacttgcacatttaataatgacttttattaagaatgctatgacacaaaattagaaacattcttcagacagtgtctccacgtgtaagtacttaaagaaaacaactaaatggctatttgggaaaactgggccctttggttgcaaaaccaagtgctggggccggagtgagtgctcaagaagtaccagtgagttctcccaagggaaatttcttaggggaaaatgtgatgtcttttgcacatgttactatgatgtgagtccagtattggtaggaaatcagtaaaattccctgaactttactgtgtgtgttgccgtcttgtgtctagcccgtgattgacattctagagataatatgagaaatattccagacctgaccttagagtttgtaatccagttgggagaaacaaagccttttatgcaaaacataattagagaaccaagcaatatcatctataatctaaaagtaaaatgtgaggtatgtttttaattccaagagcctgtgagtggttctgaagtgcaagtgtcttcttgtgtttttcagaggtttgtgtttagatggctcaggtttaatctctaatggggatagcagggaaccagatgagacctgctgaggtggccacagtactgattctagtgggcaggctgcctcccctctgatactgtgtaaggcattactaatgctggcaacagtttgcatatagccaattgccaaaagcagcctgcacatccctcctgaggctggtcccgtaaattcttctctttcctgtcgtaaagcattcctcatcaccacctcccttttcacactttatgcaaggccgtgcactgggacagcaaatggctgcaactttcactgcttgcttttcccaagtcgaagaaaagttccaacgctggcaaagcaaggacattgctattttctgacaatcgaatgtcttcgaggaactagcttcagtgctgatagggtctgtgttcctctagtaagaatagcactgtttccattagaggggaccaggatgggtagacaggctaagacgtctgattactctttgctctgtgtatttgtatgacagctcgggtgtctggcttaccttcctgaggatgagagccatagcattatccatttaataacagccacagtgacagtgctgataatggctagcatttacctagcactgtgtgccctagaacatttaatagtttcactctatgaactcgtttgttggtcttcgtgccatgtgtccaacataaagctagcaggacccatctgtccttgcccatgcttattctgtgccacagccacccctggttgtgattaagatattaatgttaaagagggaattgagttctgatttctcctcattcaaaaccattctgtcatcttcatgcacatgccctgcaggcagccagccagtaaggggtccttcatacctatcctgttcctggctggtggctctcagaatctgccatggctctttgatcctgtttgtcctcctgcccttgagtgactggctatcagaaagccttcatttccttgttggattctgcctccaggaagcaaagccgacccagtggtttctgtgggtcagctgcacttggctgtctgcactggggaagagacttggcttgttggctgttttatgccctttggactgtcaggtccaagtgtactgttggccgcagcatccagtctgtgctatcagagcaaggcgctatggtcaggagacccttagccaccaaaggtctgttgtctcctggtgtctttgcctgaagacttctggccttcttgtgtttcatcactaagtgcatctataagctgacccgctgccaggtatcatgtctgagcattttggcaaggagagtcggtgagagaagttttcttggcaaccataaaataaaagtactatcaggagctgctaaataaatttgcaccgcttcagccagggaatttcagctctcctgggtgggatagtgataggggatgtggaatgcaaaaaaaaaaaagaaaaagaaaaagaaaaaaaattatgaggctcagctgtcagtttgatggctcatttatttgatggtcctaaggagatgtatgattggtacactgaggatgtttatcaaactcatttcctcttgtatttgtccagagagtcagcgaatggggttttttgggtatttttttctaccgtgagacaaagtgaggggaaatctctgagtccctttgctcaacttaagttggtcctgtgtatctgcagtggtgatggtgggaacacactgcctacatgtcaagggcatcaaacacccagaacaggatgaagaccaacacctagtctatgggaattagtttgtgagtctgtgccctgtttgtttgtttctttgtttcattattgttttttgagacaggatcttgctctgttgcccatgctggagtgcagtagcacaatcatagctcagtgtagcctccaacccctgggctcaagcaatcctctcaccccagcctcccaagtagctggacctacaggagtgtgccaccatacctggctaagttttttaaaaaattttgtatagctggacacaatggctcacacctgcaatcccagctctttggaaggctgaggagggaggatcacttgagcctaagagtttgggaccagcctgggcaatatagcaataccctatctctacaaaaaatttaaagattagccgggtgtggtgatgtgtgcctggagtgccaactacttggaggccgaggtgagaggatcgcttgggcccagacggtcgtggctgcagtgagctatgatcacgctgctgcactccagcctgggctacagaatgagattatgaatgaatgaatgaatgaatgaatgaatgaatgaatgaataaataaaatttttgtagagacagggtctcactatgttgcctgggatggtcccaatctcctaggctcaagcaatcctcccaccctggccctgttttaaagagggtgaagtaaccagattcaaataggagtcatttttgtcatttctcatcccaggtagctgctgggaggaggtatgagggggtagtggggaagagcctcagaagagccttggcaacactttctgggctggaaattgttttactgactttcttcattataaaatgaagtattttacattcagcctcataatgatgaatgttcacatcttgtatacgtggtcttcagcaagatattccaataggtcagcctcaggaacaccagattaagtgtctgtgaggagaaatggcatagggacctcatttaataattaggaatgctgctgcttttagtaggaaattcattttcatacttaagttcattcagacttcagggacacattgtggggctattgaaaatataaatgccatccacgacaatcatagacacttagtagacattaagtaatttctgtggtaaaaaaaaaaaaaaatgagctgatggcaacaagttcaattctaagtctacaaatgtgcaggttctctaagcaaacaggatgtttttttccaacattcccttggagcctgggttccaaaagaaatcctttgcactctgaccaatgggtccttttccctgcacatcttccttgggaattatggccttaaatactacagaaaccaaaaaaaaaaaaaaaagaaagaaagattaaagctagaatatgtaaacacattttaatgactttttcctggttaacaaagtaatacatgattcctgtaggaaatttagaaaatccaaaacagaaaataaaaatcacccataaacatatcacctggaaatagacttttatgtttttcctcatctccttttttcctcctgtctttcctccttttctttatccctctctgtcacaattgtaacaaattaagagaatattgaaaatataattttgtatcctgttctttcacttagaattgtatgagcctataagtaagtcatgaaacccagaagctgtgaaggaaagattgataactggactatatcaaaacaaaacttcaaccaggcgataatatttacaacccatagaaccaatataaaaaattattactatcccataatatgagcttcttaaaaaaatcaaaaagataaacaactcaagtttttaaatggttaaaccatgtgaataggcaagaaaaaattcaaatggccattaaacatatattcttcttaaagcttaatctcattaatagtcaagaaatgaagttgaaacaatgagctcatttttcactggcggtttggcaagaattagaaggatgattccatctagcctgaacaaggaagccaaaacattgacactttcatgtgctactggtgggaatataaattgatgcaacccttttggaaaacagtttctctacatctgtttaaatttaaaatatttatgccctttgatatggcatttctacttctaaaaaaatgtatcctaaataaacactcccacaagtgtgcaaatcatgttcattactccattgtttgaagttgcaaaaaatttaaaacaacccaaatgtttatgtagaggaactggttaaattgtggtagatttttatagtggaattgtatgcaaccattatagagaatgagccagaggcataggagatataaatatgtccaagacaattgttgagaaaagtattttactgtataatattgtgttagtgtagcattgagaagaaaagtttgaaagactgaacccatcatcattttctctatacctttttcaggaatgatcaattttatataatgaaaatattacttttataatcaaaaaaacattttcagataacatttaaaaattctattataaacatttccttacatttttagtccttcataaaaatttggcagctttcataagattctgtcatagaaataccattatttatttagccattccacggttgatacataatttagctttttttcaaattatatatgatgcagcaaccaatatctttgtaaaataagattcttaattttacactcacaagagtatcatatcacatagcagagattgagaatttaacctgaaaataatccattgggtgattctgaatgtacaagattgatgtttttctaatctttttattttattttattaattttttttttttaagatagagtttcactctgttgcccaggctggagtgcaatggtgtgatcatggctcactgcagccttgacctcccaggctcaagtgatcttcccgcttcggcctcccaaagggctgggattcaggcgtaagccactgtgcccggccttaatctttttaaagcttacctggactataggtggcccatatggaggcaaaagatttgggccccactctctaggcacacagctctgctaccctactctaagtataatttgtcactagtttttgtagtctcagtgtaaaaaagagcagagatcttggcctcaggagatcctcttcccaaggctcagtcccaggctctctccttatttcattccttctcctgaggtgaactcatccacacccaggtaatgactctcaaatttatagctccgaaccagccttccctttgacatctagccatgtgtattcagctgcttaaatatctccacctgtatgtctaaaaaaagtagctcaatctgtccaaaataaattctgtgatccagaacctgctgatgcctccttccctttatcctttacatccttccattgctaaatcccattgctttcccccagtagttcttgacacatctagttctctttaccttaccaccctccctataccaggccaccatcatttatctcctggatactctagtagcttcccaaatgatctcctcatgttcattctcaactcctctgatatggagtcctgtaaaatcgaaaatctaatgccatccctctcctgagtcagagttttccatggtttattgggctaaagactgaaatcctcactggcccctgcctcatctggtccctgctctctcctgtctccatgctctcttctctcgccacccaggactccaaccacactagtcttcatttcttgactgaaccccctcacctctgttccttccttctgaaattctccttaccctcactttcccttctttctgtctcttcacttggttaataatcttcacagctcagttcaaatgtcactttcctgggaaatcttcccccagtgctaggtcaggccatcccttgatctattcccatgttttctcctcattgcactcatcacagttgataattgtaaatttagttgtgtggtgatctgtctgcttctcccaccagacattaacccccttgtgggtagagatggtgccccctttgcttactattgtatcccaacatcctggcatatggccaggctcatggacaatactaaagaatggttgggtgggtgaagggatggatatctcgtgtcaggtgatgcatgaatggcactactgtctaactcacgatgaaaccaaatgttatgcttttgctaattcagtgacttttcaaaagtcttttgcccatttaatacaatccatcttgctttgaaaaaactttaagtataaacccaggcactcaaaacacaagccagtcctaagtagttttattctaaaattaagaccataacccacattcactcacttggcagatgcccccttttcacacttacctacatgctagttcctcctcctcagtggaaggcagcaaatgatctgcacatttgaccacttgagagatttgctgtgcactcccctatgcctgtatcctcaaggactctgtaaaatccattgaactctatgcacaagctaagaaaaaaaccttgctttgcagtatttcgattatgcatttcatagtaatatgcataaaacatccctctatcatagtgccatcttagaatatttattgattccctcaggtggttcttgtttcaattaaagtccttttgggaaacaatctatccgggggattggccggtgacactgctacatagaagggattgggcctggtgtagtaagtcacaagcccaggccttggaggtgagcagaagtaaatctgaatcctgattttacccctgtctagctatataatcttggggtagagcctacttcatagagttattttgaggataaaataagaatatagataaagcacttagcatttgatgaacattcagtatatgttaaccactgaagacactgttattcttgttattcacaaaagcttttttccaggttttctagacagacccacagactcaccacccccaaatgagcaacagacaaatggcagtatgctgacaatcataaattgactgtgtattttatgataatgggtatcaaagttgtactctattaaagaattattatctttgagattcagatattaaaatgtgtatagatgaaatagctcatatcctggatttgtttcaaaataatctgataaaagatggatcagggagggagggagtcgatgtagcgagggagcatgtttggacgtgcattggcaggtgccgaggctgtgtgatcagtatgggagttgtgtcattctccctacttttgtctgttttgaaatttcccataataaaagttgaaaaatatgttaaaaatagttcatataaatagcctcctagattcattcttgttcaaggagccagctctcaactcgctttcctttatttcttttggaagagtaactgattctagtgatctaagcagtaagactcatgtcaatctgttttattactctcaggatagcttatggtggaaacaaaataaatccaatttctgaatctcctttgtcttcaatcacttgggaattctctctgaaactactgtgggcattttaagtaaccctgattacccagcaagaacaatgtagctttcagacaagcacagaggatagaataactctttctacccttctatgcttgcatgacaaaagctgtagctattaaataccggtgctcaatgagctaatgaatggcaagccggtaactgtggttttggcattttagtatttgagcctctgccctgtatgaacttgtaatcttcattgtgtagccttgttaagttcagctgctgagttacatgttggcataggaagctgaggtactcctaagccaaaaactgacctctgcatatttcaaactaaagtcaggaggcttagggtgacttcttttgctttaaaaaaaataaaggcatgatttccctttagagtggaagctgaccatgactgtaaatggctctataatctttggctttgtttgagtcaccctctccatgttctgctcttccgtttggatgcaagccaacacgaggataagtgttctgcttggtcctcgttgtttaataattgacccttcaaaaccactttctttctccagcttcatcaaagagaagaatttaaattttgatttcaggtttcttcttttccctcttgagtctatctttaaggggtaaaacatgtggctttttataagtttaagtactttggagcaaagtttatggagtgtccttccatcccctaaaaataagataggctctgagttggccagggcagtcccattggggtccatctgaaatgcttctgtttatccctttggtcagcacctcctgccaggaccatgctggagctgctaagaaggaagagaggtgcacagacagagccttctggaatacagtgcggggtatgctatcatagaagtataaactgggcaccctaggagcagagttgatattgctatgactgtctggggacatcaggacagacttcatagagcaggtatgagatacttgggctgagggcagcactggtagcctggaattacattatgctcttaattgaaccctcttgggatcccagtttgagtgatctgtcttattaaatagcacttggtatgagaacagccatggcgtttcctttacagctcatacagttctgagaatgcctaaaattagattgaaatcaggattaaggtgtctaacctgcctttgtggcctcgggcatcctgtgaccaggatgagtcacatccctgtcttgcccacttgcgtcttctgagagctgcgtcccaagacttccccatgcagagctgattgtaatagttgactgacaaaactgatggcccagcactttctctccctgcgcgattcctgctgcccatgacagcagctgagtaataagcagtcagacctcttacctgggacattagtcacaagctcttaagcaactgcgggtcagcgcttgagaccgttttggatttctgttagcacttgtttctgttgcccaagaagatcctttccaagacttcagcaggcatactggcttcgggaaaattcagaaactcagtgaccttgtttggaaatgtgagtgatagtgttctgggctcaggtccacacaggcctggcttgtcaggctaggacacagtgtcgataaagctgggctcatgggctttgtccccccggccgtgctctctcctggggctgcagactagtgtgtctaacctcagccaggcgcctctctactgtgtgcccgcagtcccagaggagccaggcacccaggccttatagtgcctcccaagtcagaaaacacttgtggaagaactgagagtggtggcctccttcactgggcaggaccacgatcatcctcacccctgctcccgtcctgcgctgctacgattgcaaccttttgtaggttaaactggctgtgctcatattgtatttatgtggtggggccaggggaggaagcagcttccacaaatcagcccactgaaaacagtcacttatatgggacatgggattctgcgtggagaagggctgatttggagccaggactgggtttgggttagagacacagaaagcttgcttcgctgaagtgggtgcacaggtactcagcatgcctttgccttatgcccctgacacccggggaggctgctactaagagcagagaagtctgttctatgttccattgatctgtgccatgaaagctttgctgctttaaccacacttattggggattcctggaataccagacttggtttccattcctgggcattttctagtggccattttctgtaagacctgtatggccaggctgtatcaactcacaggacaccgtgtggaaaccagtcatgccagttctgtcatcacctacctcctccaagccagcaacgtgatccaggctggacagagaccaaccttttgccttgggccatgcaggccaacagaccttgattctcacactgaggcaagaaaatagaacctcgagtgccctgacacaacccacagtgaatatggcactccagaaagagcagtcagctgcagccactgaggagacgccacagcgaggggggctccaggcggcccaaggccatggcagcctcccacaatggcagttaaccacaaagctccaggccacctagcatcccccccgtgacctgcagcctccttgtcactgatcagcctatgtgggttgcctctgagcatattgttcctttaaaaaccaaagtgtaaatgtctcacccaaaaggccaagctgttgctctgtccagtctagactgtgcctgtgaggctagcaatgccaccctccctctgtaacagtgccctggggtatgggtggcaacaggacaaccaggtgcttgtgctgggaagcgggtttttttaagagagcactgccttttatttacagacagctttatcagtacatggccatgttcctgccgaccttgaggactctttaccaaacaatcctgctgctgaatattcacttccttccacatgaatttgctcttagggattggaggaggggtggaaatgctttcaaccagtctccataatctactaggcttcttgtgcacctggggtacccacaaacaaaccctgttctcactctggttttccttttcctgattaacatccccacaaacctactggatttaagacaaacccagaagtcatcatttctgctgcttctctctatccgtctatctctaagtgattatcaagccttattactgattttgctttcaccgaagccctgcttcctttcccctgactaactccttattttccattccattcatcactgtcctggttcaggtcttaacatctcttccctggacggtttcagcctcccccaactgatcttttcttgtccagccaggaatctgttactcccttaatgagggagcatcaatgagttccttttgcctaatatgtaaaaatcaaaattccttcgtgtgacattcaggacccttcatggtttgaaggacttaactttcctctgtagccctgagatttttcatggccccagcactcctctgtcctgtgctgcccgcccctcagcctcctccaccatacccagggttctctgagtccacctgcacagccatactgctgggcttgctgccgtgtccctgccccatccgcctgtccatggcggccttctcactcccccttctctgcctgggagactctgactcatgctatcagacccagctcaatttctgcttctgctgtgaggctgtctctctctcctcccactagaaggaattgttctctcttatgtttctctcgtagcacttggttcataccttcatcgtgccactaggatgatacagcaattggtgtgttccccctccccacccctcctggtctatcctgtccatgtgtgtgtgtgtgtctgtctgtatatgaaatatatatctatttgttttacacacacacacacacacacacacacacacacaaagtatttctttcttctcttttcattttagagacagggtctcaccctgtcgcccaggctggagttcagtgatgcactctcagctcactgcagcctcaacctcctgggctcaagtaatcctcccacctcagcctcccaagtatgtgggactacaggtgcatgccaccatgcccaactaatttttgtatttttcgtaggttgggatgttgcccatgttgtccaggctagtttcaaactcctgaactcaagcaatctgcctgcctcagcctcccaaagtgttgggattacaggcacccagccgacaagtatttcttaagtacattatgccaggcataatggcgccaggcataatggtgaaccgcataaacacaatccccgccgtcatggagcttctagcctagcaaatatttgtctcccattacactgtgagttccttgcagatgaagatcagctgtactcctagtgcctgtcaccaccccgggcacacagtggccacctcccctatgggtgttcattctgactctgatgggtagagatgggtgctagagtggaggatggggtataggctgagtatgaggtaagtggaaagcctagaaaagccacattctgccctccgtttttacaggacagcctacattttcctgtggtcagcccattcttaatgggcgcatcatcttggagccatgaggcaagttctgagacttgatctaaatgtgtcatccagatagcacagagaagtttgttccttttgacgtgtgtacaggaagctcatgcggccgcatgtggccgcacgtgtgtgtgtgtgtgtgtgtgtgtgtgtgtgtgtgtgtgcccattctgagaggtggatggtttggggtctggctgccctatctcgtgctgctctttgtatctttcagagatctgaaactggacaatgtcctgttggaccacgagggtcactgtaaactggcagacttcggaatgtgcaaggaggggatttgcaatggtgtcaccacggccacattctgtggcacgccagactatatcgctccagaggtgagtgcagctgcttgatgcagctctgaaatctgagctctccagtaactctgaccagaaatgccactggctgcttttatgcactgcagctttggaggcagcattgaaaggtgtctagagccgacacctctagactcatttatggctcattgggtgaatgatggctgaaaatggcctaagtccctctaataagaatttgagttaaaaaagaaaatcatgctgctataaagacacatgcacacgtatgtttattgcggcattattcacaatagcaaagacttggaaccaacccaaatgtccaacaatgatagactggattaagaaaatgtggcacatatacaccatggaatactatgcagccatgaaaaatggtgagttcatgtcctttgtagggacatggatgaaattggaaatcatcattctcagtaaactatcgcaagaacaaaaaaccaaacaccgcatattctcactcataggtgggaattgaacaatgagatcacatggacacaggaaggggaatatcacactctggggactgtggtggggtgtgggggggggggagggatagcattgggagatatacctaatgctagatgacgagttagtgggtgcagcgcaccagcatggcacatgtatacatatgtaactaacctgcacaatgtgcgcatgtaccctaaaacttaaagtataataaaaaaaaatatatatatatatgtaaactttgcagttgctttgggctttagccctaaatgaagacaaagtgtacgccattcatggctatttattttcctttttgtctctacttagtgatttaatttcagcgtcatttagcagaactaaagaaaggctcttgaatccttgaatccttcccgtatgagtgagtgaacccagtccccttttttttccagactgatatatttccagaaccctttctgtttgggatctgcacgagcccatcacagtggcccaatcaggccataaatatttgctcacctagatgagaaggcacctctgagttgaccacagggaaaacagaccactctgtagaaatggaatgaaatacgcttgctagcacaggagactttttaaaaaaaactttgatatttcctaatgcatcaatttccctagttatgaagaacacatttgttaatctgatgtatgaaccaccttctcacgctgccccctttgcacagatcctccaggaaatgctgtacgggcctgcagtagactggtgggcaatgggcgtgttgctctatgagatgctctgtggtcacgcgccttttgaggcagagaatgaagatgacctctttgaggccatactgaatgatgaggtggtctaccctacctggctccatgaagatgccacagggatcctaaaatctgtaagtttggcttacccagctagcttctgatgtattgcaaaccagcttgtttcatgtgctgcttgagtcttttcagtacctcccaccagtaaaccactagctctaactaaaatttgtattgttctaatctaaagaatcaaagaaccagagttctgtcaggctgttaccctctcttatgcaatagaccctctcttatgcagtagttattttggggtcagtttcaatagcccttgataactttgtttgccaaatagcaagtatttctagcacttcgtaactttagttgagggcaggtgatgtttccccttcatacagtcaggccacaccagagttttgggtcaagtaaatgccattcccagcctgttattatatcaattgtgtttctgttggcatcttcaagttgcaggatgaagcggtcgggtctttctcttagggctgggagaggagaaggaaggttttccaaacctctgcagatctattttgcctccatgttattcttatgaaagccgggtgccacgcccaggctgcaggtgcaatgttgtaatggatcatgttgagaaagtcttttctgtgtgtgcatttaaggcactgtgctggatgcctttgaattgaggataaacatgtactggacgcctttatgttgaaaataaagtacatgtaatttgggtcagttctgtaaccacattagttgagctccaaaatcatgtattttcacctactatatgcagaggggttgtaaaggcaaataaaagatcagtttttcaagaagggataaatcagaacaatctatattctgttggatagtatctatggcataagaattactatctttaagttatatcctttcagtaatttgagacaaaagcaaaatgtgggaaatatttgctatcttgttgaaagacttgtttctctttagaaacttctagccctataatcagtgccatttcagggacattttttatgtgggtcactgtgtactggggctgaaggcttgattgtccctgagaattctctacatcgctaaaagagaaataatcacagaaatccttctgaggcaaatattaccaaagtgaatcataacacatagctcaatcctcaagctgaggtgtcagtaccctcctgaaactgagaaagcactaatttcacagaaataaaagcacagtactttgggattctaccaaatatctcctatctaacatgtttttgtaagaacagttcatttgttatattagtagaaattttagaggaaaccataaatatggcttttataattttatggaaaaaaaaagtcacagagaagggcttgtcttcgtggatttgtgccatgaagtttcttaacttcctgaagggaaatgtactcacctaggttggctgcagccaattttgataacataaaccatgataacacagcctcatcgtgctgcagacggaggtgtactttgcatgatcactttcctacttccatggcccagcacctggctttttgtaaaaaagcatgccagccttctgtggcctgcaacagccaccttcatcatactaatggttttccatgctccacatatttagtccaattactgtagctgatttagtagttttaatatttagatgaaggaccccacagttcataattcaaattaaaatactggttcaagccataaaaaaaatgcctgttatcagcattggtgtataaaggtcactaggcttggtaccatgaagggtaggaaataaaagtcagtctatgcctcaataaatttttatattctctaatataaacactggattagcaatccagatcagtgtttctctgatagataccctatgccttttgaatctaggtctagtagaaatcttaagaggccacatcaccatttgagttggacattcctaattttttgtctttacatttttagaagtcctcaacctcattctcgtgtttcagagtcctcttgagagaatgctttccaactaaatctgaaactaggtatcatccccttagcctagaacctaggacaagtactaagcaaggttaagattcctatggaatttttaagacttgtttctttttaaccgggtgagctcagttacttcaagctatatcttttatgtaaatatggatatttttggtaacgagcagatacactgtccagtaatagcctcatggtctttcctccaagaggaaacagcctctggtgcctaaggagaatcacatccagtggagactgagttgttctctctccttgcaggttcacttttgggaagctacaagtcccttcacttctctttatttcagctcctttctcatgccagctgctccactgatggaggcagcagctgcgattgttacatatcatgcgtctagcactcattttcctaaataacactcgacgctgtctctgggtatcttccacataggaaggagcaggggctctgggctcacagtgccgggcctgcctcccagtcctgttaccttctggctgagtggccttggtgagcctctgtgcctctctgaatctcagtgtccttgcttgtaaaatagaggtaataaaatccataccatagggtgattgtccagattatatgaaataatataggtaaacttcccgggcacataataagcattctgttttttcctccttcaaggcatgtaccttcaatgtaattttcttaaaaacacttaaatgttgtcagataaaattactaaaaaaaaaaaaaatcactaagaggatttctgggatttttttttttttgtgtgcattttactctccatgcctaaaaacaagaagcttaaatggtatagatgaaaacattcagctagtctttgcaggggactgagacatttaaatagaaatgtgatcaaagagaaaaaagaaatgttcagagcactcaagacttgaggagacacactgaggagggaaaggcatcagaattgggttggttaagaacctgcctccagagcagagctgcctgggggcagatcttggctctttgactaataggctgtgtgaccttgggcaaatggcataattcttgcatgccttagtttcctctccatttccttgggcaaatggcctaattcttccatgcctcagcaggtggggtgtacaacccacagggctactgcgtggttggcatgagataacatgtgtgggtgcctgaagcagtgcttggcacagggtacgtgcccaggaagtgtcctgcactattactgctgagagctgcatgcatgaaatgatttttttacactctgcccttatctctgaaaaagtatttgtcatattaggaggagggttcgagatagcaaggtgtgctatgccaaccactcaggctgctttctggctctaattgcaacttgatttaattaggccaatatagttattttactaccagaagaaaacttagagattgtcccttccaaccccctcgttttatagatgaggaaaccatgaggtactgagaaattgtgactcatcaaaggccatttaacacattacttaaatcaattggggcctttgtgcactgctgatgaggatgtaaaatggtgtggataatggtatggtgggaggttcttcagaaaattaagcagaattaccatatgatctagcacttctacttctggatatttacccaaaagaattgaaagtgggaactctaatagatatttgtacacccatgtccatagcagcattacgtacaatagcccgaaggtggaagcaacccatgtgtccatcaacagatgaatagataagtaagatgtggtacgtgcactctgaacaagcattcatttggctgcacagggccagatcaaggtatactgtgttctttaccaatattgacttgacgcctttttccagaattttgtgtccacctaagatcaggctttctgggagcttggtgacttcaagagttcctcatgtgaatagttgaatccattggatggtgttttgcatagttctaaaaacagtagggaaatcatgagtgctaagttttgaactgtaattatttgtctttgcccttaattttatagagctttgtgatcattagaagcataaacacagaattgtagagctggaaatagtttaaaaatattttgtccacatttcctcatctgtagatgaggaaacgggcccagagagatgaaggaactttacatgttagaatggaaagaacacaccctagacctcatgtgacttctgccactgattttcagtctataaaggtgtgataataacacctatagtgcccgcttcaaataaggcagtatacatgaaagtgttttccaagtggaatgcacgatacaagagtaagtgattagtattgctaacttgtgagtagtaatttcacaacacacttagagatgtcattatcctcatcttctccttgaacagttcagcaacatcatcaaggttattaagtgcttaattttacacaaggctgtggtaggcttttattcctaaggaaattgtatttttgtttttccaggagcttttaaatcttgaccaaagacatataggtggggtgtaaatagccaaatagatattgatctgtttatttatataataggcttatatcaatgcatatgtgcatagcaggcatgggttctgcaatactcaggttctgtgcgaggtgccaggaattcagtgatgagtgaggcaaacatgatcctgctcttgtggaatttacagtccagttggggtggggagggagaaagaaattttaaagagaaattaaacattaactatatacttacaatttaatgagaaaaaaataaaatccaaggttctttgaaagcatttatttaacaggcagatctaacatgacctgggccaccaaaggaggccatctggaggagatgacatttaataaaggctgaagagaaatgaggcttgaaagtgtgcagaggtcttgagaaaggagcagtccatttgagtagctcaatggcaggcgggttggagtgtgatgagcaaaggggtggggcagtgagagcttcaggtgaggaggctgagggaacagtgagagcccaaaggacatcctaggtcacgcgaaggagtctacactttatctgaagtgccaacgtaagtctttgaagaattccaagcaagcatgagtgatgcaatcactacttcatgtgtaaaagatcaccctggctattgtataaggagtggaccaacagactggagtatttgctgattaagtgacttctaggatttctttcaaattaatccaggagttgtggggaggaacagatgaaacaatattgggcatgtgtcagtaaccatcaaggctgagtgatgagtacatgagggtctgtgttactgtcgtctaaaatttccacatggaaaagttgttaaaaccaccatacaaatgaatatcttttataaacaagctcagcgtgtgtgtatgaagaaacatttctagcctgtatagaaaaagtgatctccatcttcacaaatgaagggaaatggtttacaatacaaatatacagaaagagcaaatgatgtgagccacatacaagctcccctgtggatcctggccacatctcttaaatccagtctcgggttcctggcctgggagtctatgtcaccctcatgattttttgccacagacaaaattaaccagtggttttagcacaactcatttcttcagcatacctgaagagtatctatgccttctcaagaagtgtccttcaacctccagggtagtaatgaagggtaccccaaagaagcatttttaacagaaaagagaccagagaaggagagaatcctcactgttggactttgccccatgctgcctccttgggaccctgggagatcctttcccggcctgctggatctgccctttccccctgagaggcaggaagagctgagatctccaagccagaccttcacagtgcctctctctacagtcttagtgtgggaggggcatctttccatggcttcctgagatggagatttatttaagaaggaaagcttgttgaattccctcttacctttttaaatgaaaggtattattattattctatatctggggaaactggtcagacacctgtttatgttacatgccatagagttacagatgttaaagacctcagggcttcatctggcgtgatgtcagcgagggcctacattcagggttggggagggtgtgtactgtccagcattcctctaaaagtgtgtgactggcaaggcaggctccagcatcttctgaccactaatctaatattactgtccccacaggccctccctgtcatcacctttaccactgccctctccacccgcaacacccccgaggttgtggacttgtgagttctttgtgtatagctgttcaaacatttcctatagacgtgggtagtggacaaaggacttgcttgtgagaacttttcccatggagtgcagaatcagtgggtgcgggggtagtttgagcacacttagtttttagcccaggatttctacttgaaaagaattccccaaatcattaaccagtaatcgcacatctaaaagtaactttatatgcacccaaataggcacactgggaagactatttttcttgcttccccttctgtctttctcatctttgcttcaaatgtttctgttcaatacttaacgtgtgcttgcctcaaaagcagcctgacctgcgactcgcagagaatggagtattcacactggcaggatcctcagaaattaacacaaaaaaggcatatgacgatgacacacacatttgtgtaaagaaaaaataaaaggcattccagctgttatttcttaattttttttaacttggtttgggaatatatactacctgttttctggtgtcaacatgccatcaggtttcttaggctgactaaatcatcccaaaatgctgataatgatgggacaaaagaaagtctatcatttttttagggcttctgaggttccactgagttttgccctcatctaggtccagaagggcttagggaagtcccaggcgagtcagcagagctcaggaagctgaatccttgtctcagaggttagtgctcctttgctgaatcatctccagcaagaaatcacgtgactcagggtctactcaggtgaagtcggcacccttgtctttgagctcacacaggtggctgagctaaataagtgctgaaaggagctgggtgcactctcctgagtcacctttgttgactctggaagcactgtaaacttggcatcagaaggagattataaagtgcttttgttcctaagctttataaagtgtgtgtgtatgcatgtgggtttctctgtcatccagcctctcagatttcatcatccgagcattgtctgcaggaatcctgtttgcctgtacgcacaaaggagggagaaccacagttaattcggggatcctcttttagccctgagtgtgtcccacatctgtcaccaggcagtgaattccaggagcattgactgtcttcctgttcatttccctactcccctcctgggagaggctggaatgttcaaggaagccagcaaaggtggtcagccaggagaaggctggggaagaggagggaaaaatgggacccgagtaacgcagaggatccaaccccagatcattagggctggtttttcaaacactgttaggggaaatccaaagaaagttatcaaaagatccttgagtaagaggagtggttaacatgcaacctggcagactgttgccaggactggaatacctgtctgaggaaaggaaggtgccccacaggcctcttaccaaaacccctagtgaggttaacacccttcagaaaaggaaccgtttgctcacagatcaaggccagtgtctgcagaaaacagaaaaacactgctcttcccagagattttgtatttgggtctttttaagtcatataattttactaaagttcttgatctctacttctttttccctcattaaattgtaagtttcctaaggttggaagtccttacattttgatagcagtgtaaaggattttttaaaatgtatttttaatagagtactcatgctgcatgtctcatttatctccatccctgccaggaagataaagatgtcaaagcttttgtaaaatgaccacggaaacttttcctgtgtggagatttgctaaccggtgtctgtgggtcagaaaagctttttgtttcgagttagaaaaactcttgtcaacaaaagtatttgactttgttgttttttgtttgtttgtccttgccaactatcaaaggtcagtaatttggggcagttgatcattagatttggtttggatgccaaagataatgcgcatccaggataaagaagggtactggccttgatttcatcagaggaggataaaggacattgtatagtccccactagagaatctttgtttagcactcacttctcttcagtagctacatttggggaatcatacctggaaaaaagtagttcgtatagcttgggcatgtagggtagcagcagctttttcttaacacttggaagtcattggagagcattgaaatccgccccatcagtcagagctgcttgagactggtttgtcaggaatagaagcatgttgtctaacaacgggcattggcacaactgcatgaccttgggtttccatctccgagacttgcctctaacctttacctacggttaatcaacattgtcccatgaccagaaagaagatacaaggaagcaataatgattataaaacccaggaaaggcagggtgttgggagccttggaaaggaattgagtatgtgcttatgaagggctgctggattccagtcacagacagcatggaaaacacagccagcaaacccaccacggatttgagcactgcccctgcccgctagaggaacagtatagggcatttagtgtactgagtttcatcgagagaaaataaagtacactgtgtagtgtgtctctggagatatcgcacagaatattctgatgctggtcagttacaacctgccaggtaaggcactgacccaccggcattctcaaatatacccacatgcccacttcctccatcactggctcagggagatcagcttgagcaagtttatttcactttatttttaataaagaaaagcccatttcagactcaaggaaaacaaagcatctgtagctgagggaaggacaatcttcaaaatgccagctttttttttttcctcccagagtttttagtgataaatgcaaaaatagaagaaagaaaagagtcccttgatatgggcacagactgtggaggccactggtgtggccacccacccacctgacgccggacaggccagtccggctctgcttcacgtgttttcaatgacacaatgctgttcctgccagggagcactctcatcacttaatggtactgagtattacaaccacattacgtgttttagtttttcttatgatgtatttagatatgctgcctttaaattccactccctgaacttatttctccctgaaattatttctcatctaatccctcttctggccgacagctctttgagtatttgaaaattttaagtgtccttctatcttttccagcaaaaagaccctcagtagtttgaaataaaaccaggtgtcaggctgaaggatgcctcggattttttccagccctattacttttctttcccttcacttaccacctgcactgtatgtacttctcagcccttctccttccatagaatcagaggaaaaagaatgtcacatgagccagcaaagaagtacaacacaaggaaacacacagagtgcgtgaattctcatcagatgaagtcctgagtgtcatttattaggtgaaagtaaagtaaactgtgtaatgattctcctcacctgtcggtccaagtatcttaacccagaatccaaataagaagattggtagcctcaaggggaagtctagcgtagggactgagagcaaaggcctgagttcaaatcctgactgtagcactcccaaactgtgtgacaggttacagatgggtctgtttctcagtttcctaatctttaaattaggaataataaccacagttgctttaaggattatatccaatgaatttggaacacttaatgcctatgcaacaaaggagtatgcagcatacatatatggcagtaatggctaccacttcttaagctgtaacttgtatcaaacggtatcattctctactctctccactcctgcagcttcccccttctcaaaccagtctggatacctggcagggtggtccattgccatgagtgtgcaggtaactagttccagccctccccagcaaattccatccagatccaatcttagcaggatagagcacctctccttctcttggctcgtccagtattccatagcagcaccattcggtataagaacctagacttgggaagattacagtttgtttccccagagagattcaggaagtctgttgtctgtcctttccaccctaccaagccccatcccacccccagtggactgtcatcagccccatcttgcatttaaatgtctgtcactgccttctcctatggaaaagtgacttatcaatgccaggtccaagcctggtgtctctcccatactgtgcagccacatccctgcatgaccactgccctgagctggagggtgctgctagcacagggtgtctccagatctccccaacagctggcaggaggggtataaaaggagaaggttggtcttcataactgggtcagaatctgcgtgtgccagcagcatccttcagacagacacgcgcctgcaacacgcatgcgtggtgtgcttctcgtcagccccaggtggccattagggtctatggtcatggcgaggttgggtgtcatggctgtgaaccgcactctattctgtgtcctgtgctctttctctgccctttctccccaggaccctctctagagccataaaatgccttttccccatttaggatcatcgctctggaatattggcaggaaggttctgtggcatagtttccttgccttctaacttgccagcattagctgctaactctctctctgccctttgtttaaggtctgaaattgaatgaatggagaaggtcattttgtttgcccaacagccacatccaaccattaggcagaaaatacagtgttctctggctcctggaagaaaatcttattagactaattgctttatttatataacttgtcctcttcctatgaaatcagacagattttgaaagaggaaaaaaatacttgtggccattacttatattttagtgagtaaagtacatttgggcccagttatttcaagactcataatgacacagcgttaaactctataatctggaacatccaacaactcaaaactgaagctgcctcctgtgtgcccacaagatgtgataagcaccatacctgacaccagatttgcaaagaagctgctccactgcacccatcttgctgcatttagtttctctgtcctattgttaatgcagatatagttgcacattaaaacctattgtttgtaggccgggcgtggtggctcacacctgtaatcccagcactttgggaggccgaggcaggcggatcacttgaggtcaggagttcaaaaccaggctggccaacatggtgaaaccccgtctctactaaaaatacaaaaattagtcgggcgtggtggtgcacacctgtaatcccagctactcgggaggctgaggaaggagaattgcttgaacctgggagggggaggttgcagtgagccaaaattgtgcaccattgcactccagcctagacagcaagagcgagactccatatcaaaaaaaaacaaaacaaacaaaaaactattgtttgtattctcgttttaagattgtcttagaaaaggttttctgtcaggaaaaaaaaaaaagttttccaaatagggtttggtggtatgtgcctataatcccagctactcaggaggctgaggcaggaggatcacttgagcttaagagtttgagaccagcctgaacaacataggaagatcttatctcagaaattaaaaaaaagcaagaaaaaggaacattattttccaaagaccattcctcccactgcactactggagcctaggacagtgaaggcagaaagagatcttgttctctcttacctggctgtagaggaacagggagagccagatgagcctcagggtcaaggctgacctcagagtgtagtctctcagcagctttctatctgtgcccctgccttttagtagaacaggatggacttacaagtttggcatttgggtcccattagggacataagcaaataatggaagtattctgcaaaagaattatgctgccactgttcacagcggtgggaacagagtgtttagggacagtctattcgagcctaggacggcaacaagatgttcattaatactatcatttcttgagggctttctttatgccaggcgctttacgttaattctctcattgactcatcataactttttaaaatataggaaaatcttcatgttagagttgagaaatctaaggctcagagaagttaagaaatttgtccacagtcacacagtaactcagtggtgaaagaatgatacaaacacaagcagtgacactgcagagcctgaccagccctccatgtcagagaagctgttagttctttcagccttccctggcttgcaggaggcctcccaggacattcctatacaaacttggcccaaatcctttacatgtccccttagaactagcgtcaggagggagcatgcctgcttgctttcccctgcagccacacctcctctgtagtctgggaaaaaaactgttaagtgtctcattctcggggccaggtgtgcctctgattccttgagtatcctctagttcagttccactgtaatgagggccacagcaggaaggggaacataaaatgagtccctgagttcttgacccttctctttcccctgctctccagtcagtttgagacttacacttggggtagaatccagattttccaccctggtcccctcactcactctgtgcagcttataaagtgcttttcttggccctagaaaacattctgcttcctttagtaaatgtgtgcagaatatttcatgaagtcacattattttcctctttggccgactttccctcttggatcacagtcagggagaaagtcagctgaggtgaggcaacttttcagtgtgaccttaaatgtggatgaaagtgatggccccgaggagcacaattgttaacttactggcatttgggtcccattagggacataagcaaataatgaaagttttctgcaaaaggattatgctgtcaccattcacagcagtaggaacagagagtttagggaaaggcctgtgcccagcctaggatggcaagctatccacctccaactccacaccatctgcaccaacgtgaactgtgaaagatttcaggcctgggactaatgttaaatgttcccttaactcctcatctccacatcactggacgggggtagtggtagaagggccaccccaccaccaccacaacacacaaagcttctacccccttagtatcaccccggaccctccttctcccggtcctggtttctgtttcatggtattcatcctcctctggcctcttcatggcatcctccagctgccactctggctgcttctcaccctacgccaggggtcaggagccatgaaagtccgtgagtgataccagccaggtgggaggtgatagggagtggtggggcatgtgactgactgggcatctggtgccccatgaaaagcagaagcccctgctcaactccaggccgtttctatgagaggagtgcaggcccagtgttcccgagtatctcattttccacgagaagttggaaaacctgacttttcatgtgatgtgacatttcctagcgtttaaatatttgagaagtaattaaaattatttcaaaacacactaggtaggccaaataaaatgtgtctgagacctagggctggtatcagttctagtctgtctctgtcactttccacaatctaacctgccctcccagcttcagtggttactcaaatttcaatgtctctgagcgttagatggccagccctggcctgcaccccagatttaccctagaattcatctgcatgtgggtgcccacacacctccaatgcaaagcggagcccatcagcctcccagatttggcagactgtaggatctcagtaagtgtgagctatttttgtctttgttccactaacaaaaatactactactactaacactgctactaatactcatgctacaaagaataatctcttgcccctcttttgttccatttctgttactcaacaccactgccccatcaggcagccagggaggaccctgtgatcttggactcttcactcccattcccggcagttagtggattgtgtttattcttccacggccctctagaatgtgcttccaactcttccttccaattaactagaaactctcctagttgctgaacttgtcatgtgttctcagctattgtctcagcctctaactgctcaccaccaggcgctacctctgcatttaagatttattcatcacgctgtggctagtgtcatcccctaaattgccgtgcagctctcatcactcacctcggatggatcccaccggctgccccccgcagttcctcagccatccctgcatgccagctgtaccaggcacttgtatgcctctgcatttgtgctggctgtgtcctcaggcgcattttcttccttcatgcctactatgttaattctgttcgtcctcatctctggtcaaatgccacctcttccacgaggctgtcacttgccttcccaccaccagccccagtgttatttgccccgtgcctcttccaagctctcacagcacttgatctaagtctcttttcatttcatccggctgtgtattatgaagtttgcttgattcttcccccttctcttgattagctcctggatgaagagacactgtctttgtcatctgcgtatccccaagaaacccctagtgtgctgccttacatgtagtagacaccttgaaaacctttgtcaattgaatcaaagtttgtttgtgtgtgtgtgtgttttgttttttcttttggtttgttttttttgtaagttgaggatggctgcatctaaagggctcaggccaaggtattaaaaacaaaactgcttggttattcaaaaggatttatcagaaccccaagaggctaagtatcaagctagtgaaagggttattctgcctgtccccaattccaagggtgcagtttttagaggacggacggtcgtgtttggtctacttgtcgtcaggcaaggcctcttccacagtgccccatggaagcttgggttcagtgccaggggcagggaggaatgggcaagcctcttggacactggggcttcagccaccctggcatatagagtcctgcactgtttgtcttgcccagaagaacaggctgtacccacccattcacaagatgtcctctctcacatcattggcaggcctgggaatttcccacaggccatctgggtgtgttctgccgtcctgtctcccaagttttttgcagcattgtttcttgttaattagctcttagaatagcaactgctcttccatcaggaattgtatcccgttgactttcctaaggcaagaatctactcatttcttttttgtaagcattttcccccttcctgcctgcattgcacaggcttacttagtgagagcccaagcagtgtgaactaactcctagctcttacagaactgagttacttataatatgcatctcctgaatcctgggtgaccactgtaagtgcctgaagtggcagctgctctgactgggcctgtgcagctctgaatgctgcatttacttttgggtcctgcctccaacccagaaccacctgtggcctttaattcctgttactaggagagaggagaagcgattaaaccctgtcagtatattcatttattagctgccctttgaagcttttttgaaagcattttacaaggtatatcccgtcaggttgcttaggaacttttgcagcctccttcttcaacattatcattttcatttgaatcaacactggcagcttgacacctctggacacctggcatggcagtgggaggtacctccaaacactgtctttccgtgtctgcaccttcaacaagattttctctgtaaattcagctccaaaacaatttttataaacacagcattacttttgtgttgttcacaaatcagatttggaaagaggtgcttggggactgtcatgagtctatttaaagataacctgatttaaataaaaacaaaaacaaaactttttatccaaggcaattttctttcaatatgggaaattaaattagcttcagtgtctttgaaattgagaaccacactccggccatgaaaagtgaattatcctgtactaatccttgctcaggaagtgatcaaaacacctttcctggctattttgtgaaagcagatttagcccagcatattttgataggagcccagcactaaggaagtttcccaactgatggaaatacagagaatctctatgcacacatcgcttagctgtgtggcagcgctcgttttagtttttggtctatggagcaatggaatctcagtcattgaacctacttcgaaacagcagtggtggggggaacatcttgaagaaaagcctttcatctagagctatgatatcttcgctgcataaagaaaagtggccaactttgttttttctagagccaggacacagaccttttcagtatgtcacctttgctgcttcttcacacagatcttcaaaaataacgactctctctcctctctgtggtctcgtcagagagcaggaatcctggccagctggtcaggtcactcagaaaaatggcacagctgtttctgaaagtagccccattcataagatgtctgctgcccacaactgcagtgttggggaaaggcacactgttataaagagcttcttttctttaaagaggaaagaaaaatacatggtgtttacagaaaagaaaactggaccctcctgctttcttttagtggccatgtctgaaatggaagtgggaaaagccataaatccacacaggcaatcgcgcctataaggcatgattcatactgactgtgctgcctgtgatggaaaacccagctagttaagcaagacctgccagaaagtctcgcacagctcctctgccatggctgatgcctgctgtcttgtgacgtgctggttgtatgtgaatgaatgattgacactttctctctctctcactcagttcatgaccaagaaccccaccatgcgcttgggcagcctgactcagggaggcgagcacgccatcttgagacatcctttttttaaggaaatcgactgggcccagctgaaccatcgccaaatagaaccgcctttcagacccagaatcgtaagtgtcccaggctgtcacagagacattcctttcttcagatgtcacagcattccaccaaagtccgtagaagagctggatggcccctgtgggtgacagaccagaaattcagctggatactgcacagggcagcctcccctggggggaatctgggctccttgtccatgggacaacaatgtcttcatgtgcccacattaattcttaccaagtttcacccctcgtttacccaatctccaacttctctcaacctaaattaaaatcttgtagggtataagaggcctgaaactttccaggtttccccaaaagagtttggctaattgagaaagtcattgttctggccaatttcctcatgctccttggggcactttttgtgccttttctaagcccctgagaaagcagagtgggtaggagatgttgctcacttcactgagcctggcctcttggcttggagagcctgggtctgtaatagctgctgcagtgcagagcccaggccaggccaggcttctttgaccaaagaaatactgggatctccaggggctcctctccaagctctgcagctgaggctggtggccttcctgagcgtggtcccgcttgtggtctgagagctgagctcgtgctcatctgtgggtcaagagctccacaggaggaaggcagagaagcaaggctagcgatagatcaagagtgatggggagacctggcgtggtggctcatgcctataatcccagcactttgggaggccgaggcagatggatcacttgaggtcaggagtttgagactagcctggccaacatggcaaaaccccatctctactaaaaatacaaaaaaaaaaagcctggtgtggtgatgcacacctctaatccctgctactcaggaggctgaagtagaaggattgcttgaacctaggaggtggagattgcagtgagccgagattgcgtcatgcgctccagcctgggcaactgagttagactttgtctcaaaaaaaaaaaaaaaaaaagtgatagagaaatatcattgattaaggtaagagcagtgagatgtgtgatactcacttagaaatgatctttgcagcgtttgtttatacagatataaaatactcaacttttaaaaacatacagtgcacttaatcactaacagcctactaggctgttggacaccaggcacccagaggtaaagccgttccttcaatggtcagccccctgccagcgcccctgggattagggagagcatggccttcagaggctggagcctgtagtcctaactgcacagctggtccagcagggcgtaacgcatctacctagagagtaaaatgaccaacagttgttccctaagctcagcacttgcaagaaatcttttgggaagatctcttcaaatgtctagaactctgcgcaaacaataggtaggacaagtgtgaacctacccaacctctgttgacaaatacagctgcacacccctcagcgaggcctgctgtgaaatgccaccttggtgaaatgagaataaagggtgagtgagccagctgcttttggatgaccaaattaattcttagcctcccattaagacaggcctgctcagcaagattttcatgggattagtgaattggtggttgccaaatgccataataatgcaccatgcagtagacttgctgtaaagcacagtttcatcataacaataactgtaaataatgctactgaacaagctacagagcactcctctgaactcactggaatgggctatatcccatgcaagatgagtaagcctcaagcgcaaaaatctcacccttgtttcccttttttttttggcagaaatcccgagaagatgtcagtaattttgaccctgacttcataaaggaagagccagttttaactccaattgatgagggacatcttccaatgattaaccaggatgagtttagaaacttttcctatgtgtctccagaattgcaaccatagccttatggggagtgagagagagggcacgagaacccaaagggaatagagattctccaggaatttcctctatgggaccttcccagcatcagccttagaacaagaaccttaccttcaaggagcaagtgaagaactctgtgaaggatggaactttcagatatcaactatttagagtccagagggagccatggcactagaaatagttgataatgaaatgagattttatgaagtataccgctccacctatgagcgtctgtctctgtgggcttgggatgttaacaggagccaaaaggagggaaagtgtgaagaataaagtagatctgagaaattctgagccaatcaggcttcttaattcaagagacaaaccaagacgttctgtcaactgtgctgtgctcttctttaagccaatgaaccccaattcctggcagtctacaagaagtctcttaatgctaatgaagaatttaaaggtctttttaaggaaatgaagggctttccaaatagaatgatttactctgaagaaacaaacaatggtatctctgaaactcacaacctaaagcccaatcttgaaaatatgttgtgcaccaagacgactgcttcagcttcttctcttatccttactttctttaatagatatttattaaactgtccagtgaaaaggtgccacaatgcccagtattgtaaacaacaggtttgcattcatgaagctttcattcattctggagtctactaatttacctgaatggtgtttgcattctgtgaaatgcctctccacgttgcatatgtcacacttttgtctgcacataactcttttttcacaagaagggtcactgccacaacagcacagtcagcgggtgaattacaggtgcctgctgcctgcctacctgggtaatctgatcttgtctgtatcgccgtgtgctcatcactgaagaattgcaggccactcatgtcagtgaccagatttgtggcttataaacattagcagtttatttatgttttaagatgcaaagatgtgtgtttgatattcactttaataattagaaatggatcttgtaaacagggcatatatcaaagatgaccttataatatgtacccgaatatacagttcaagaattttgtctgactggaaataaatgcattttgtagcaaaaggaagtgttttgactagaatgatttgtctccttcccactaagacagtagatttccaatcaaaataaaaccttgagcagaatgggtagaactcaactcacagaaaattcctgagaggagaggttgatgtaagttcttctgtgattctctgaagtagatgtggcctgtctcttactgaccaaaacttctgtcctgaatgagggtgatgactgctaagcatagctgtaacagaccaaccctcaagatctcaggggctagacaccataaatgtttatttctcattcacataaagtagcatgtaagttcaacaatcttcctccatcttataactacactatctggaaaatgtagctttccaaagtctccagagcaaggaagagacatggagggggcgccggctgcctgcctgcctctcctaggagggacacacctcacctcttctcacaatgactggctaaaacatggcttccctctaactacagacgggataggggaattatagagcagctgaggagtagctggctagtactgacagtctcttctctgtcataggttcttttttttgcattccaatgcgaacacttacttttgaatgaataaagtagctaggaacttccctttccatttgtgtagcacttaccactcatagtcatcactctcacccacatcatgccactagatcttcatgacgtgcccactattcccactgatgatagtgtgagtactgcagtacatactacaaatggcaagagaggctcagagaagttgagttcattggtttcccaaagggttcaggcttggtaaagagtagatccagctctagggtctaaatctttgatgctgtagtctgggaaagggaaggatcattctgactttgggacttttttggccttcatagctcctccactttgggtcttctattgctctgtgggattgattaactttttgttatggttcactccactctggtaaacaaccacgaaaaataaagcatgcctcctgtttcattcacaaaactcattatcatagccacgcagagccaaaacactgtctttggtaagtctgtgatcactcagcagcttccttcttcacaattgcttctcaagcccactacctgggttccccagtttgggttgagtccattcttttgaggctatttattccatgcctatcaggttattcaatagctaatgtttatatctgagaagagagaagatacacaggatatttacctaaagctcaaatgagtcttcaattcctggttacaattctacttcacatctttcttcagttctgctagacctggcatccccttccaagggatcacaaggctgtcttgcccacacttcctgaagaaggctggcacacagcaggtagcgagccattcaggcaactgggccagagtccactggggctgctgggttccctcagcacagtgggcagcatggaggtcaagacgaggtcacattgggacctttcactccctcaggtccatcttaagacatcgtcaggccttatcatcccactgtccttcccagccagtcctcatcccacacccatttgctcctgctctcccaagctattccacggtgacctaactgaattagacacatggccttgagtgtttgaaaggacaataacttcaagcctttgctttgggatgtgggtcagcctttgactgccaaagttgctttcacttaatggctaacatgttgcatgtttattacatgtgaagccctgttctaaatactttaagtgtatttacttattcaataccccccatgaggtgggtactctcagtttcattgtacagatgggggaaagtgaagtacaagagattaagtcacttgtctaaattcacacaactaaagcagtggggtcaggatttggatcaagcagtttaactccagagtccctacttttagctcagttcagtgaggttcttctatgaaagcgaattctatttttccacctttgtggggttggcaggaagcaccaagataaactgccagctgggcaggacagtattagccctcccctgggtagaacaatttatcagcagtgggactgcatgatttgcatatcaaggggctggagctgctaaccccagttcttggaactggggcaggccagggtgatgcaatcaggacttcaacctccctgaataggggaagaggaagtagtctggttctctctgaatcccgtgagccccatctgaacccctggggtaacttctgagccttggtggagtttccagccctttctcccctcgtagaggagccacttcatgttttagtaactcttcatcacccaccccgccagctcatgcagcagcgtcaggaagaaggtgcgcagcctggaacctaccttggcagctgcatgtttacagctatgaagctgagctggtgtaacatgttagcaaagaaaagagcaaaaatagaccaggcacggtggctcacgcctgtaatctcagtactttgggaggccgaggtaggtggataacttgagatcaggagctcaagaccagcctggccaacatggtgaaaccccgtctctactaaaaaattacaaaagttagccgggcgtggtggtgggcgcctgtaatcccagctactcaggaggctgaggcaggagaatagtttcaaccctggaggtggaggctgcaatgagctgagatcacgccactgcactccagcctgggcgacagagggagaccctgtctcaaaaaaaaaaaaacaaaaaaaagcaaagcaaaaataaaagcatcccatttgtcatttattgatcttaattgaatcctgacctcagatgatctgcccgcctcggcctcccaaagtgctggaattacaggcatgagccaccacaccccggatcttaattgggtacacattgccttgaaaatattccagccacggatttgaccatttcacatgccaacatgataaagctgttcattattcccaggtttggtcatcctggttgcttaatctagcaatgttgacttaaaatgactagacagcccacagtgattgcccccggctcagggtcacactgggccctgtaacttctcattttacatcatccaaggataagactccagtacaactgtagtagatgtttgtgatgaaaatgagccctttgctgagatgttcctctgaattgagttgcaagttggccaaagctggccagagtgcagctgtaaagggagctttgtagtctccttttgttcctttgttgaattgtaaccaaagctaagggagctaccctgggctttatcccgtccccacctcttcacctccactgccctgccaactgttctttccctcctcctgcttcctggctctttactcccctaccgagtacgtcggttctgcactctctctccctgcaccacttgattcttagagccaaactgttatatagccagttttccaaccatcaagatggcataaaattttgatttgcatatttattttataggctcttttagagcccagaaatggcagtcacctttcccatgtgtttctgcgtctttggcatcaccctgtgtcagcagcactgagtgcctaggtgagccaccctaccctatgctgcccgtgcagtctagggggcaagatgtcacatgggtaagagccctggctggtaagagtagtgggcagccctgggggctgaatccacacttactgaatgttcttgagaaaagctagttctttctccaatttcaactttctcatttgtgaaatgggagtgagcatagcgcctgcctgccttctgttaatactgcagggattaactgtgatacattgtcaagcgtttgccacagggctgggacacagaaatgctcaatcgatgttggctattattatcgtcagctctcccacagagggctaagggaaggttgcttgtgatgtccatctgaaaatggacagagagggacactcgtgctctccatgatgcccatccctttggatgccgatgccatgccactccaatttggagggatttcacttttctaactggctgcagaacctcctcaggagaccttattcttttcctaggatgttttgagtccatcctgccccaactgacatacaggttcagccttaagtttgatattctgctgctctcctttgaggccaagaaatatccacaattttcccaaatggcttttcttaccagtctcaggaattgttttgtccttccagatctaacacaaaggtacattttattcacttctgactgaataacacagggaccacacccagcatcagtacctgccgggcacccccagttactcaccatgcctgtgcgccagttcagagaagaaaggacatgtgtcaagatgttcagtagggtctggcatgcctaagaatttgaagccaatagtagaaccaagaaccaaaggcattttcttcctaatttaaggtatctgtgaagaagtttctagtaaaacaagagtctccatagtcctgtgtattcttaatggaaaaggcctcagcactcctatccccttgcaacagcccttccagatcacccaggtctgcctttcttatgccaccaaggcagttcttaccccacagaggcatcattcttccaaggccttaggccacagttagaagaatttaggctagacaaagtgaagattgtgtaggcaccgagtgtggtcagacatgcaagtggattgcagagggtgagacaggaatcttctttggatacatttcaaattagaaaccaggatagtctagtagtcatttgacctgaaagagccagaaataacttagatgacctctcgagttcttgtagccttgtactcatggctaaaagtgaacagagggatatggtcagttggtctcccctgatagacgccaacccacactactcccaccatatagaaaacctctgtcactcgaattttctccctgtccatctctgtacaacctgcatgccctagcacacctatgtgccttctctgcatgctctctcaatcccaggattcccttcaggctcacatagatcacttgtccctcaagtcacatacttgacaatatcttatacctgattgcctttcatagttctcatgctcattcatacgtggaaaacaggaaaactttacaaagttaaaatcagcacaagaagttcacaagaaatataagcccccttctgacaatagagcatttgtggatgaaagagaaagcaggattcctcaactctgttctttttttttttctcaaggagaatgatttttgagatgaaacaagtacaatactcactgataaaaatgaatcgtagcccaaagtaaataaagggattatacgaagcattcaatgagaataggcagaattgcagaacaattattgaagcagtaatttatgagcactggaagtggtgttgatcattagggctgtgcaggggtttataaagaacaggtcttctaagtcgaatctcattttcttctttgatggttcctggactggttgatcaaggataggtgaacatttttgcatagctgaacttcagcgacatacatgacaaagtctcgccccatttccttatggccaagctggattcaagacaccatggtactgaaaatgtggggattaataggttagtgtcagtctggaatagtggttctgccaccttgcgtaacccctgctccccttggattaacagacaaatttcaagtcttaatcctatttgagatttcataccgtcaacattatgactaaacacaaaaattaaacagtgggacaaagggctactttgttttcaagctattcatgccctcccagaagactgtgatatagaaaagcacatgagtttagagagtcagacattcactaaactaatatttattgagcatctattatatttcaggcatattgtggttgctggaaaaactagagtgaaaaagacaccaaagatccctgccttcgtggaatttacattctaatcaagacatgttatattgtttacccaaattaacccaatggtaaggcagccctgtggtcggtctgtcttcataactgtatccatggcacctggcatattgtaggtgcttaagacatatatggtgttgaacgataaaatcagagctgggtgtcagacacacactttttgactccaaagataacactctttcatagctgtatgccagaacaaatggaagaaataaactgtacttgggtctgaaaaagctcattatatcaggatgagatggaggcaataggtcttgacagcatgagtaaaaattaggcagaggcaaagagaatacattcaatatatttattcatctgacaaatattaggatttatcagaaccttttccaagtgatagggccagaacaatgagcaaggaagtcatagtctctaccattctggagcttagaatctagtgaatatacaacagggtgctgtggctgccaaaaaaatataaaatgcaatcttagcctccagggttatgagtgtgatgcctcagatgtggggaaggatgagctccactgagctttgccgtggttaggctgtgcctagaaaactgaactcagctctagataccaccacagagagatacaaacctggatcatgttcagaggagagtgaactgagtgatgaagggagcagaaacatggagcacagcaagtgaggaggtaacgggtgagcctctggagcaaaggcaagtggacagcataaccaccttcaaatatgtgaaaagctaatgtgatggttattatttttgcttcccaactatttctagctccctgcctcctgagcacagacaggtgaggtcgtatgaataattctagccaacaagtccagagcagaatggtatatactacttgcaagccagaacatttcagtgctggtgagacactctttttcttccagtgaacggcaatgatgagaggtggtggctgggctctgacagcctgggtccctgagtgattaacatgaataggacccctagcttaccctcaatggacattttgaatgagcaagaaatactagttgctgttatggtttttattactgctgtttcatggcgctgagattacgatcggtgtttgtccctgcagcataacctagcctatcctgactgataggcgtgccatgtgtggagggaccagtctgacaacatatggctcccagggttagaactaggagcacctcaggctgtagcaggagtcatagaatgtgttatggcatagcataaaaatgaacttttccaccaaggtccctaaatatgtaatagacttcctttggagggaagatcactggacatcttcagtctacaaccctcgttggggatgatggacctggaccggagggctctcccaaccctgagaggctggcgtaccacagtgtggaatgggcttagcaagcacactattattgtggcgtttgccctagggggcccactggggcaggcctgagttggcttaccatcatgtttccactggccacatgccaggcccctgctgctttcactgtaccacacagtcatgaatctgtgcatagcatttctgggggctcagcagggtgtacaaaaggcatagcagctcagatggcaatgagatcaaacgaacggcaagggctctctcggcccactcttatgcagaatgataagtagtcctttggggctcatgcttgcatcattagcaacctggaggcattaggaaacctctgaagttcacccctactgatttgtccctcattatccttattctgccctctaggaactagagctgagcacctttcctaacagtgctgaatgccagtgtaaagatctgctctggggaggtgtgtgttcagagaaagccccggtagggggatgaaggaaaacatgtttttagcatcaaagaccgggtttgagcacgtgcccccttttccaatggttggctggagttggatcacactggctcatgagagctgattgtgcacatctctttcaagttagtgctcggagagctcacagtggtagcttaaaattggttattgtgggaatatttacaccatggacattggtaagtgttaaaagtcaggccttttttttttttttttttttttgagactggatctcactctgttgcccaggctggagtgcagtggtgtgagcctagctcaatgtagcctcaaaggcctggatttcctggactcaagtgatcctcccacctcagcctcctgagtagctggaactacaggctcctgcaccatgcccagctaattttttttttttttttttttttttttttttgcttttgtagagataagctattgctgtcaactcaggctggtcttgaactctcttagcctcaagcgatccttcttacctgggcctcccaaagtgctgggattacaggcatgagccactgcatccggccaggacttttattagttttattatttagacagctttccagcacaaccttgcaaatagggaaatagtgagaaaatcatggtctttggaaccaggcaggaccagggtcaccctgactctgctcagctgttgtcattgaagggggtgtggagatactgaaacttccgtgaaccttagtttccttgtctgtaaaattaagaaaccttagtttccttgtctgtaaattaataactaaaaccaaaatattaactacctcaaagggtagtgtgaggatcaaatgcgataatgtccacagattgctaactaaattaagctccttcctttggggcacatagagaacaacttccagggagaaaaacaaaacacccctgaattgcagcttttttgcttttagctgtggaaaacattcccagaagcttcgcagcctcgcatcctcgtaccccattggccagtttagcgtcacatgaccatccctaacaccaatcacttggcaagggaaaaatgacagccaagccacagctcctgagggagccctggagcccctgttggcgttagtgggatttttaacgccccctagatggttccaatgcgcagtcagaataccgaaccaatggctgagagtctaagtctcggacaaaaccttagcccccgggggctggagagaggttcattctctcctgaaggacaaggatagagaaccaagtcagggttccgggagtgtgggatcggggaggaggaaggatcgctgtttatcaggtaatcaaaagtgcagactcactctccattcccagctactggacaatcgtggggcaaagagctcagtgggaaaaatcaaaggcattaaaaatggttattcttagagataaggtgtataactattggaaaacagaaataaagtcttgaattaagctttgagaaatggttctataatagtaggtgggagggagagagttaaaaaagcatttgcaacttatctgagagggtaagacatggccagtgatacttaactgaagaggactgtttgccctgtcagttctgaagctcctgttacagcactgagttaagccctgtgaacacaacatgtgtttatttattgtagacaaaccctgccacaaagccacaggcacagcacacttctctgttaggtctgtatctcttagaatattaggaccctaactgggattctagcaacttacttcctgaggctcagagctgcctcctggattcagagagcctgtcaacagcgtctgctgagtatataacgtggactgtgagaaatatggacttggaatcaggagacatggatttgaaacttgatgcattcatcctgggccggctgttaaacgctcccaatccttgttctcttcctctattaaatgacaatactaataacgatacccacctcataagattgtgatgaagataaaaaaggataagttggctgggtgcattggctcacactcctaatctcagcactttgggaggcccagggagaaaatcacgttaggccaagaatttgacatcagtctagtcaacagagcgaaacctcatctcttcagaaaacagaaaaattggtcagttatggtagtgtgtgcctgtagtactagctgctcaggaggctgaggtgggaggatca

SEQ ID NO: 343 - skipped

SEQ ID NO: 344 - protein, 41 aa, Homo sapiens
MALEIVDNEMRFYEVYRSTYERLSLWAWDVNRSQKEGKCEE

SEQ ID NO: 345 - DNA, 2396 bp, Homo sapiens
aaagtcccacggaggaggcagaatggccagtcgaggggcgcttaggcgctgcctttccccagggctgcctcgactcctgcacctgtcccgagggctggcctgagacgggactcccggttctcccgctgcgaagcagcgcggccccccggggccggggcagcggcgccggcatgtcgtctggcaccatgaagttcaatggctatttgagggtccgcatcggtgaggcagtggggctgcagcccacccgctggtccctgcgccactcgctcttcaagaagggccaccagctgctggacccctatctgacggtgagcgtggaccaggtgcgcgtgggccagaccagcaccaagcagaagaccaacaaacccacgtacaacgaggagttttgcgctaacgtcaccgacggcggccacctcgagttggccgtcttccacgagacgcccctgggctacgaccacttcgtggccaactgcaccctgcagttccaggagctgctgcgcacgaccggcgcctcggacaccttcgagggttgggtggatctcgagccagaggggaaagtatttgtggtaataacccttaccgggagtttcactgaagctactctccagagagaccggatcttcaaacattttaccaggaagcgccaaagggctatgcgaaggcgagtccaccagatcaatggacacaagttcatggccacgtatctgaggcagcccacctactgctctcactgcagggagtttatctggggagtgtttgggaaacagggttatcagtgccaagtgtgcacctgtgtcgtccataaacgctgccatcatctaattgttacagcctgtacttgccaaaacaatattaacaaagtggattcaaagattgcagaacagaggttcgggatcaacatcccacacaagttcagcatccacaactacaaagtgccaacattctgcgatcactgtggctcactgctctggggaataatgcgacaaggacttcagtgtaaaatatgtaaaatgaatgtgcatattcgatgtcaagcgaacgtggcccctaactgtggggtaaatgcggtggaacttgccaagaccctggcagggatgggtctccaacccggaaatatttctccaacctcgaaactcgtttccagatcgaccctaagacgacagggaaaggagagcagcaaagaaggaaatgggattggggttaattcttccaaccgacttggtatcgacaactttgagttcatccgagtgttggggaaggggagttttgggaaggtgatgcttgcaagagtaaaagaaacaggagacctctatgctgtgaaggtgctgaagaaggacgtgattctgcaggatgatgatgtggaatgcaccatgaccgagaaaaggatcctgtctctggcccgcaatcaccccttcctcactcagttgttctgctgctttcagacccccgatcgtctgttttttgtgatggagtttgtgaatgggggtgacttgatgttccacattcagaagtctcgtcgttttgatgaagcacgagctcgcttctatgctgcagaaatcatttcggctctcatgttcctccatgataaaggaatcatctatagagatctgaaactggacaatgtcctgttggaccacgagggtcactgtaaactggcagacttcggaatgtgcaaggaggggatttgcaatggtgtcaccacggccacattctgtggcacgccagactatatcgctccagagatcctccaggaaatgctgtacgggcctgcagtagactggtgggcaatgggcgtgttgctctatgagatgctctgtggtcacgcgccttttgaggcagagaatgaagatgacctctttgaggccatactgaatgatgaggtggtctaccctacctggctccatgaagatgccacagggatcctaaaatctttcatgaccaagaaccccaccatgcgcttgggcagcctgactcagggaggcgagcacgccatcttgagacatcctttttttaaggaaatcgactgggcccagctgaaccatcgccaaatagaaccgcctttcagacccagaatcaaatcccgagaagatgtcagtaattttgaccctgacttcataaaggaagagccagttttaactccaattgatgagggacatcttccaatgattaaccaggatgagtttagaaacttttcctatgtgtctccagaattgcaaccatagccttatggggagtgagagagagggcacgagaacccaaagggaatagagattctccaggaatttcctctatgggaccttcccagcatcagccttagaacaagaaccttaccttcaaggagcaagtgaagaactctgtgaaggatggaactttcagatatcaactatttagagtcc

SEQ ID NO: 346 - protein, 683 aa, Homo sapiens
MSSGTMKFNGYLRVRIGEAVGLQPTRWSLRHSLFKKGHQLLDPYLTVSVDQVRVGQTSTKQKTNKPTYNEEFCANVTDGGHLELAVFHETPLGYDHFVANCTLQFQELLRTTGASDTFEGWVDLEPEGKVFVVITLTGSFTEATLQRDRIFKHFTRKRQRAMRRRVHQINGHKFMATYLRQPTYCSHCREFIWGVFGKQGYQCQVCTCVVHKRCHHLIVTACTCQNNINKVDSKIAEQRFGINIPHKFSIHNYKVPTFCDHCGSLLWGIMRQGLQCKICKMNVHIRCQANVAPNCGVNAVELAKTLAGMGLQPGNISPTSKLVSRSTLRRQGKESSKEGNGIGVNSSNRLGIDNFEFIRVLGKGSFGKVMLARVKETGDLYAVKVLKKDVILQDDDVECTMTEKRILSLARNHPFLTQLFCCFQTPDRLFFVMEFVNGGDLMFHIQKSRRFDEARARFYAAEIISALMFLHDKGIIYRDLKLDNVLLDHEGHCKLADFGMCKEGICNGVTTATFCGTPDYIAPEILQEMLYGPAVDWWAMGVLLYEMLCGHAPFEAENEDDLFEAILNDEVVYPTWLHEDATGILKSFMTKNPTMRLGSLTQGGEHAILRHPFFKEIDWAQLNHRQIEPPFRPRIKSREDVSNFDPDFIKEEPVLTPIDEGHLPMINQDEFRNFSYVSPELQP

SEQ ID NO: 347 - DNA, 43901 bp, Mus musculus
  misc_feature (1)...(43901): n = A,T,C or G
tccgagaatagcttgcagagtcggttctcttccaccatatgggtcctggggattgaactcaggtcatcagcttggcagtaagtgcccaaggcccgagtatgtttaatgaggcaacagggaacagagatacctcgaggcggaaaactggaaatccagttagactccacatgtttagatgtcgagaaatgtttacagccacgtctgcaggacagtcatggaaacagaagatctctgcctacggagaaaacaggggcctctatgctgaggccggcacgctgccctgagcctccatccggctgagcgtgacaaagccctgacgctctatgtttgaaatgaaccggcagtgctgccgtatgcagtgacatgggcagcgatgtagtagtcacagcctcagaagcagcttcatggctctcctgagatttggagaaatggaggatcagcttactccccaaacacagaagtggattaggaagaaaacaaaagtcctggaacgctgtctctcagaaaagcaccgtgaccattgtgtgcatcgctttctcccagactacttccctgtgtgcatacttagaactttacggagtctcttacaatagtgtcattttgaaaatcaaaatggtattacagataaaatctgtagtcttgccttttcctccttcatgcccattaacatcagtttcaacaccatgaaagatgacagtaattataggtattaattatatatgataataaatgttattataatttaaagttctctcttagtcacgtgtagtggaacatacctttatagcaggcgaatctttgtgagttcaaggacagcctggtctactgagtgagttcaggacagctaggaaggactacataatgagactgtcttgaaaataaaaccaatcaaaaacaaaacagttctctgttgggagctaaactccttcctgtcttttgctagcattgtagtacaatgtgtagtgttaaaggcccgggcctcccagccatttaactagttgggaaactctgtcagtcttacaagttctcagttgtctgctggggaaagcccaggttctgagatttgtttaaggatcctgtgacctaacactggcttgttttagaacagctcccaacccatactgactactcggaagtgttgactatgctcttatgaataagacaagcattagcattcacacatgtctccttgagaacttgatttgtgtatctgtttgagacagtgccttgggagccctggctggctacccacgtaatgggattcaagtcctgagccaccatgctcatcttcaatttgtttttaattttaaatttatttattttattttattttattttatgggcctgagtgaggtttttttgttttgctttgttttttttgtttttttcatcatacatctgcctggtgcccgtggaggacaaaagggaccaggagatcctgtggaactgcagttacagtcgtgtgtgagctgctatgtgtgagtgtgttggaaaccttacccgactgccccccagaaatatagcagctgaccaagaggaaccgaggggtggagggaacttctagccttcactctgtaccttggttgaaattttataacaatgtgtttgttacttgtgtataaatgcacatgtgtgtgtgcgcatgtgcctgtgtgcatgcatgtgtgtgtgtatatatttttaattctcaatttactctggtaatatatctctatcaaggagcctgccacctctacttcctcaacaaagtaagtgacattgtcatttaaatctttgtcactttgatgagtgaaatcttaaggcatgtaattcttcgtgaatatgtattgttgccatgggcacagccatgccaaggaccccaatgcctcagtccatgggcgtggcaaagcctcccctggataagcctcagggacggcatagcttgctctggagtgcagatgttgacagaatgtgcagaatactccactgtcccttcctcctcccagatgctcacagactgctccttccaaggtgagctaaaccttccccttgttcagctgtgtaccatggcccccctcctcgtttttcatctgtatgtggtaacttgccctcattgttcagctgaatgcagtacccccacctctctgctcagatggactgaacaagcaggcaaagcttctgggatgctgcagcgcctccatccaagagctcaacccacctgattctagatggtctaggtttgacattacttcatcccactgatgccttccttaggtcaatcttggaagctgtgtacacgtatagcacaaattatctcactaattgtgtttcttttattatttattaacctttatcatatatttttaggtaaatatttacgctgcatgtatgaagaaacttggggctggtgagtagctctgtggtttaaagagcctgctactcaagcgtgaagatcaaagttcatttccccagcgccctcataaatgccgggtgggggtggtggcagggttcgagaggcagagactggatccctgaagcaagctggctagctagaccaatcaaatcagttatgttacatacagtggataacaacccgggaaaacagtcaacatcaacctatggcttccacatgcacacgaacccacacacaaacatgtacttacatgcaaacatgcatacacacatgcacacacactgtacagttaaacacacacgcctgcgtaagtcaaaacggaactttaaagtgtttttagtgtaagtgaatgattttatgcatacagagttaaaagaaaattacagtgatttctatgaatgtatgtcaaagatggccatcccatattaatttaaagcaggggaatgggttaaatttataagcatgagaccatctacatgacactatcttgtgtagctgtttaaaaatttatatttaagcagagtttatgcaacactactttattatagcttcaaggttaagagaaaattagacattaaaatacaacaaaatctgggtgtgggtgtttgcatgtttaatcccagcactcagaaggctgagtgaaggacagtgagcttgaggctagcctgggctaacagtgagacagtaagcttgaggccagcctgggctaacagtgagaagcatcagcccttatctcaaaaatacgcatgagggtcggtgagatggctcagtaggtaaaggtgcgtgctaccaagtctgatgacctgagtttatccccagcatccacatgatggaaggggagaattaataaaacagaactcgtgaaatagtggaaaatgaacacaggattttgtagctaaaaggtgtagaacgaaactgaggttgaatgtcaagtaaatgatagacaaaagagcggcggggtgcgttttcccgggcagctgtgagaaggaagatctcgggtctgcgatttctgcagctgctcctgtacactccaacccagggcccctctcctgagaggctgctcacctttcagatatcccagcgagctgagctcccaaagcgctgcccaagttggggaaagggatggctggctgctcagggggccagctcaggcatgcgcagttccgctcaggctatgtctcccttctgtggtgagtacagatttaggccacagcatactccaaccgggacaaggaaaccaactggaagagcagatgggttcaggggagcccttgggtgaagggcatcttgggaagcctgagagatgttaaatcactcccatgactgtcactaaagtgcgattcgaatttataccagaaagtttattcctatttccttgatgacgctcctgccagcttcttgttgggacgaattaggattgcttttgctcattccttcccttgcgtctgttctattttaagtgctcaagccttgggtcttggtagttgccaatcacgattacattctgagaagtctggagccaagtgtcttagcctatgcacaaggcagaagacccaaggacccctcctccattgaggattcattcacaataatgatcgttcatcctcatttacatgaatacattcacgataatgaccattcaacctcatttacatgaatgcctttctctttcacctactgtttgcctaacaaacctctcacctaaatggccaaattccaggcacagctaacggtagctgcctacgtaagacctgctcagggaagctcatctcaaagtcctgcagtgctttctggctatactgaggtgtgttcactcataacctctgtcattctccacagtgagaggcccttggcgttgtcctcactccaaactgtatgcgcggatggtggatggtaggaatggggggttatacctccaggccccatccgcacagccctatccacaggcaggtatggccccaactgagtgagaagtcctggcagcctgaggttgtattggctgtgaggtttggagcaatcaaagctcctgggcttacatcagaatggttaactctttagtgaccttatgcaagtcctttcttcctgtctgtttttgttgttgttgttgttttgttttgtctataaaacagggttgactgtagtcagtctcctaagcttgtgtctcctcgggacttcatgtagtcaggcatgtctagggccagagtcgggaataggtgcctcttccacggcagtctcttctctttctatggtggttcagagactagaactgtgccccccccccaatatggtcttaaggagtgactaatttggcagttcccaagacttacaaacactatgaacaaaaaggggggggggggagagatcgagcagtggaggaattgctgacattttatctgggcggtaagggcacaaaaggcacacacaaaaaaaagcatataaaatactataatcttctatcacccagattccataaaggaaaatcttaaccatcctgtttgtcacaagaggaagaagggcattgcatacagataaactcagcctggggaacatgtctgccatgtcttttgttacttccctggaaagtgatgcggacaccacagcccttggatcctcaccgcatgcccccactttataggagcacatgcaagctgctctggacaccagagatggtttgtgcggctgtgccggagttgtaccggaatctgggataggagtaggggtctgggctctgccctcgggaattggtctcggagctgcactttcttacggttccatttttctgaagtggagatgtgataatcaaaaagatggtgtgagaccctaaggaaaaaggagcttcaatttgtcacagacattggatatggcatagtttgagggagtaaactgtctcagaaactagaattcacttgaaaatattttatcccacaaaaataaagcaaatttcataaatatttgaaaggtttcataataagcattcaattattaatagtaataataataatgatagacggtagcaaggcaaatggaagggatggtgttacttactgagaagtcctcagcgaggtctgctctccattggtgtcttcaccagccttgggcagacagagcgagggtcaggaagtgattttggtttcctttcttcctcgtgctgtggctgggcgaggggagcctcctgccccttcttaaggcaagtcactatctgacagacccaaccttactgggggccggtgggctactaagcacagccaaccagcatgagggcctatgaatatgcaaattggagcccccgagctggttggctgacccccgtgatttcccacctccagggcaagccaggttctctgaaagccccgctcagacagtttcttgaaaagccttctgttccatctccgctaagaattttcagagccctttgaagatctggagcatggatttgcttggcttctccactgctgtgtgtcagctcctgatctcggcctccaagttccccgttgtgagacacctccaaagtgatcatctttcttcagacccctccagcaatctcagggggctgagttctatctagcactaaaatctcgcacctcagatctcaggaagaacaggctgcgaggctgccccagcagtagaagaagttggaacactggccagttgccgatagacccatctctgatagagttgaggagaactggcctacgcccaaaacatcacccagaattttccatcttctccacttcaacctgggaagtgaaatgaatgttgtaaaaatacagcaatgaaaatcagtgcacaggcttttaaagagggctccaaggttaagagcacctgctgctctcttccagaactcccgggttccatccctaaataaaactttaaagcttaaaagagagagaaaatcaatgtaccatcgctcatcttatcaacatgaattaatcctcaaaaggtaatgcagagtgaaaaaaatcggtcacagagtggtacaaggactacgattccgtttctattaaaaaaaagcccccctccccacaaagggtatgggttttcactatagataaatctattcattgttttaagttataactgcatatatcaatagatgaaatctgggtaacattgctatacacagagaccctatacaagctttagtccatattttaaaggagcctagagttgaaggacaggctatatagtctcatccagtaatattcatatatatgtgtatacatatatatgtatatatatatatatatatgtgtatatatatacatgcacacacgcgcgcgcgtgtgtatgtgtgtgtatgtgtatgtgtaaatgtgtgaaagcatggttcagaccacatacacagatattagaggatttaaggtaaaaagaaaaaatgtgttgagtgtattattcaaggtgaactgaccactgagccgtgttttccattcatggaactagttaatcctttctagaaatcacaaaattttgtgtagtttgaaagtgtagatatttaaaattttttaaatataaaaaatttaaaatgaaaaaattatgtgtatgcatatgcttattaaggctgtaatggaaacttgaactcagaaccctgaatcctgctaccacttgctttcatgggtgcttggccctgtaggccaggggttctcaacctgtgggttgcgatcctttggaacttgaacaaccctctcacagagtcacccaagatcattggaaaacacagatatttatattatgattcgtagcagtagcaaaattacagttatgaagtaacaacaaaaataacatgatggttgggggtcaccacaacatgggaactgcattaaagggtcacaatactaggaagcttgagagccactgctaaagacaatgctgtgcctagagagactccaaaccaggagagtgtcctagcttataggattgcaccttgcagaccatggaagctcatgggtaaatctcaagggaatcaatttcaacctttattctcgaaggaggactttgagtgctatcatgtacaaaggtttttgtatgtattaaaacatttttggcagtcctggggattaaacctaaggtattatacatgctaggctttggttaatggtctaccactgagctatattccctgtctactctcttttgagaaaggatcctgctacattgcccagactgctgaccaccttctcctcctccttctccttctccttcttcttttcttctcctcctcctcctcttcctccttctggttcttcttttggtttctctgtgtaaccctggctctactttgactttcttaattctcagattataagcttgtgtgaacatgccctgcctaagactacaaaatcaggatgaatttgggtgatcaataaaatgccaggagatatgcttgctatacctcagcttgagtttctaaaccttagagaagaatctcaaaaattaataatagaaaccatgaaaaaaaattatgtaactaaggaaggggaggctgggtgtagcctagtggaagaacttacttagcatgcacaaagcttcaacccccagcacaaaacaaaaggattaggcaactatcttagaaaagttagtagcgacctcagcagctagagattgacatacctcctggctattcttgtgttcctcaaaagtgttgtgagcacggaagtatgtagtcatttctcagttactcattggctagcttcgagcagacaattcagaaagagagtggtttctttgcttctctcctaattagtcaatagaagtgacagatttgttgttattctttttaattttgtgtgtctgttctgggagggggggtgtgcaggggcccatggagccagaggagtttgatcccctggaattggagataaaggtggttgtaagccacctcgtgccaggtgccaggaagagaactctgggcctctggacgagcaatgaatgctcttaaccactgagccatctctccagcttcaagacagttctaagcaagtcatcacagtagtgatgcactgtagtgacagagacacactactttggaaggaagcataaagtacctgctcactttgccagaggggaataggaaaggtttcaggaagagatttaaaggggaattaaaaagcccctagataaataggaaggaacagcggacgcaaacatggggaatgaaatagtgcattgggtggggtcgggagtgaggtggggatcggggcagatggtcagcagcgaattatggctcagtatctgtgaaaatgagagctcagaagccacgagccggataattaggtgcttgggctagctgaggagtttgggctgtatagacaggcaggcagtagcaactggaagaatttaagcaggggagtggcaggattaactctacactaacaaaggatctttgacagaggtgtgaaggcggagtggagagagtgaaagtggagtcttagacctgctacaaggaagctttgaaggaaacagatgaagggcattacaggctcaatagtgagggcagctgggacagatgatgtctctctttctaatcagggcttctgcccaaggctcagagattccaatgccattggatccagggtttggtgagcagaggctttgtgaaggttttgaaaattaggcaaaataactcaaaaaaaaaaaatcaaaggcactacgtggttcatttattcattcagacattaatttgatatttattcagctgagctcatggaatactatttctgttaggaagccagggttaaaggcctagggatttaagagcgagcaagtaagcagggtaagggtggcaagcgctttcaatgtaaggcaatgggcagaatggtatacacaaagctgcggggggagggggcgcaggaagcctacaagcgtttctacaacctctgccaatggggcatgacattgaacaaaagtgtaacccccataagattagtatgtcacattcccagagttgggtagcaaataacttccagagttcacaagctgggtggagcacagttagcttggctggagagtttgctcaggggcgggagaagatcaggagctaaagcacagtggggctagttggtgaagtcttacaggtcctttaatacagttcctcttgtagtgatcccgggccataagattattttgttgctacttcataactgtaaatttgctactgttgtgagttgtaatgtaattatccggtatgctagatatctgatatgtgatcccactgaaagggtcgttggaccctccaaaggatcgcgacccacctgcccaagtccacataagcctaatcaccggcctgagatctaagttcctagccatttccctctcttcctagaatgcagaggcagaaaggctaggtttgggggcagcagaaaacggcgccaaacagaaccagctctgaggaaaggcagggaaggcttgaacccgggggcgctccggtggccggatggttgtcctcgaagaatactaacccaagttggccttctcttgacagcgccacagatgccccgcgctgggaccgctaaggatgcgagcccggctcacaccgcccggcacccagcacggttagtggttcgctccgaacacccctcgccgcttggctggtgccgcggccggtctcacttccggttgctgccgggccctgtatccggtgtccgcccgccctccatcccgctgcctccgcgatgctgtcccggtcacgctgcgtgtcccgggcgttcagccgctcgctttctgccttccagaaggtactgtctggcggggcccgggctccgatgggtgccgaacatggctgtgggcggacgggcaggccgaagggcagggacgctgtgtgctggccaggccggccaccaagggcaccgggacgcggtggctgccgacgcccgcggagccgcccagccgcgtgtacggagccccggagcccctgtcctctcccaggcagcccgcgccggccgttttcccgctgtcccgaaccctttgctccggggctgggagccgcgcccgcagcgacattgacttagagttaagagaggaggcacggcccccaaccgtattccgcggcctgtctcttcgcggtctccaaactagcgcctggcaggctcaggggaggatgacagagtttggccgactcggtgttttgcgtctactttcggagttaagagcacgataaacgtgtcattacctgtcagcagcacgataaacgtgcccttaaaaaaaatgtttgtttgtttttttcccccctcttttcattttgggtgacgtcgataatgtcttctttctcaacaggggaactgccctctagggagacgttccctgcctggtaagttctgcccttgcggtcacctaaaatgcacttctcgtgggcagagcagcatgggaggaaatctgatgtttcttctcatggtatttaaagacaatgaattcagagagatgcgaagcaaaagactcccttaagtataactgctgtcatgtactcacccggcgcatccttactgggttttgttcagctttttgtggtgctgaggatagaagctagggcatgggaggcaagcacttaaccactgagcaacaccagcggcccacggttactgaatttacactgtcagggcactgtgctagatgctcgttagaaatacaacaatgcaaaaagtcttgtcctccaggagcctgaggcgtaagggaaaggcatggtgtaaattgctgatcatcaatcatctaagtgtttggaaacatggacagaacaggtttaaataggtgacattaaagttgtggcttgcaggatgtgacagtcagtgaagagaagaagaagagagagaaagaaaggggtagaatgcatgaagtcagtgaagaaggaaacaggtgtggcattcttttggaattggaaacaaagtgactggtcagaagccattagttaaaggaaacagtatctcgaggaagatgatggtgtagaggctttcggaagtttagatattttttcccttaaatttatttttctttatgtgtactgtgtacacacttggcattctgtgcccacggaggccagaagaggtgtgggatcccctgtaattggagttgcaggttggttgggaaatgcccggtgcctgggtctctgcaagagcagtaccggttctgaacccctaagcctggaagtttggattttcattctcgtagctgtgtgtgggttgttgtctttggtagaggagaaagttattaacaaccttccatagcttacttttaatcaggtgcctggcagatatgtatttatccctgcccaccttcacttttttatttttggagacaaagtcttgctgttaggactgtctgacctagagctaactatgcatataccaggctggccttgaacttcctcttgcctctctgcctcagagagctaggattacagccttgtgctaccacatctggctctggcaaaatacttgttgaaagattcagtcctatgtatgtaggctttctcgtgccagtcgttgttctgaatgcttcctgtgcagttttgggttaatcataactaagtgagatttagtagcatagtcctcgatttcgaggtcaaggtcactcaggcaaaactattggttaaatgaggctcacctaactccttcctcagctcaaactgctttactgaaagaagggttggaatttccttgtgaactcaacagagtatgtctgtgtctgaatgatagggtctgatatagcccaggctgaactcaaactagataagtagtctgaggctgccattttacttttgaacattctgcctctctttcccaagtgctaggatcacaggattgcaccaccaggcctgggtttatgcagtgctggagttcaaacccaagactttgtacctgctgggcaagactcttagcagtcatctgaactgtgtccgaactcagtcaatagagtgcttcttaggttcctaggttcctaggtagggatacagccggtctctctctgcaagaatctcttgggctagctggacagacaaagcaaatgcacggttatgtacccttagggagaaaacagcattgtggttactaagtacaggctgagaagacatgagggtagtatgataataaagcccagcttggtaggttagagagtagaaggcccagagaagggacatttaagatgagacttaaagaatgtatgagttagccagggaaatgctattccaggcaaagggaatttcctgtgcaaatgtttccaagcaggaagagacttgagcagttgtacaaatggtaactagagagacaaggaggcctgatacagaggaggtggaggactgtaagcgcctggactttatcctaagccaggaggacataaggcttcgagcacggtccatagtgcattctcagttatgacctttctgctcagctaggaatgctggaagatgcaacaagtattttctccacttcttaagctgtgaggaaaaggaaaagccttgtgcttaggggtgggcatcttgactcaagtattctggttaggctagtcaccaacctagttgtatatgaaatagaaataatggcaggtgactattctacttcagggagttgctattgagagtggaaaatgaagaggccattgtgtggaatctccttatgagcctacagtactgtacaaataaaacttgttataggataaattttgtaggactccagtttccaaaaggctgtgtgggctgctgtgttctagttcaaagacaggctctgcttagaatctgcacctcactcattggctgctgaacacagagatgactggctgacctgactctgggaatgtttgtgtgggagtgtatgtacataaggaccagttgtctctcagtcaaatgggttattaatagacacaaatagcaaaaaaaaaaaaaaaaaaaaagaaaacataaataatatattccgaagaagcagctgtgggtagtagatattggggaaatgaatttatgataaggccagttggtttagtgggtagggactctcccctcttcctctcccttttcccttatccccctccctctcttgctcaaggatcattttattagaatttgagagaaaaatggcaggtcaggcaaactgaatctagtcgctgccacaccgcgaggagggaaatggccaggccttttggattagggtccagggaagcacccatgttcagcagtggaagttgtgggctagcagttatagaaagggcagggaagccgggcgtggtggcgcatgcctttaatcccagcactcaggaggcagaggcaggcggatttctgagttcaaggccagcctggtctacaaagtgagttctaggacagccagggctacacagagaaaccctgtctcaaaaaaaaaaaaaaaaaagaaagaaagaaagaaagaaagaaagaaagaaaggaagaaaggaaggaagggcagggagtcttcacagaaagagtaagaaaccccagagtgacctttggccagtgtcagagaaaagggcaagttaccctttttgaattggaactcccagagactcatcttttattaagagtgaccaggtggaaagcgtacatcagaggaaggtagactgacagggggagaggtggtttctgctcagttgtaggacaagtggaagacctaaagccacccagtctttgccgctcgggttcagtcagttcgctttctagcctcatccactacacccagatcagctcctctgcctcaggttataagaagtcacaggacaagctatcatgtgtctactttcaagcttcaaaggtagtagagacattttactatgcaaacatagtaggctaatgaaaattcgtgactttttaaggcaggtagattatacaagccttaggactgtacctctttccctccaagtgcacatccactcttattctcccatacctatatgctgccaataaggcaggtcgaacatttgagaagcaggattctaaatgataaagattctgctattgcctgaagctggcccactctgtctgggctctgtgggacgaatagttctatttaatcctgtgtgggttaggagctgttgattaagagttgtttgtttcttgcaggggtctccttatgtcggggaccaggttaccctgacaacaggaagatggtgtaagtatcaatgggtgatgcagatatgtggccatggtagatttacttagacacagattctaaatttaaactccgatgtcttcacggatctccagttctagacattaagggcattaggttggatccatagacccatcctggatggtcatggtcgttttatcataatctacctttgtcatcagctcagtggtcaggtgttggaccaaaagtatacttcgaagtatacttaataactaccttcgcaggtagttaaagtataatgagtgttaacttgaaactatctttcttatctttttcttaaaaatgagaatgggcatctcagagaacctaatattctagttggatacaagtgcagctgagggctgcaggtcacgtttgcttcagagaattgagagaattctctctcttggtagcactgttactcatcttaaaatcagtaaacgcaaaagaccagttaagcccaggacttttgactggtttggtaagaagctattattgcctaatgcagagtttggaggagggccatccacgtgtggtccagattaacttgttcttacgagtgttgctttgagttactttgcattccaagcatctttagggttctgagaggctgctttctagtacctcttgaggaactgtggggctgcctcgttacagggtgaagccttggcaggaacaagagctttctccttacgcagcacaatacattttgctttcattccaaactgtttcattagcgtgctgttacaagtacaaaactcttgaaatctttgtggtttgtttgttgggttttttcaagactgggtttcttaccctagaactcgctctgtaaaccatgctggcctcctctggagcaatgggattaaaggtgtatgcactatgcctggctctgagatgtcattgctaagaatttttactgaagaatttatatattcaaatacctttcaaaaaggacaagcagccagcggttaagctgtagtgttttaacatgttcccactatgataagtaagaaataaaagatttatagaatatttcagtttttgatgtgtaattacattgtaaagagtttttttttctgtttctaatactcagcagtaagcaagtaatgctttcataattcaaaaaatgattcagagtcataacatattacttgttcagtttaaatggagagtggggtaatgaggagtaatcatgactttatgtagtaaatacaacacataactgaagttaattgtggaaaactaaacttccacttgagtcaccctcaactgtggcatgctagtaacactgtctgtgtcgcatgctgtcttttcttctacgcatgtctattttgtttaaaagatctttacacaatattctttgattgcatttgttcgtgtagtagcagtgatgggagcacagcatgaagaacttgtgggaagctggttctctgtccactgggtgggtcccagggagtcaagcgcaggccaccaggcttggcagaccttgtccactgagccgtctcacctgctcaaaagacctttttagtgtaaaacttttttgctttgctttttacttaataggcaatttcatgtttcaaaagtcttaaaaaaggctatcagttttgttttttgttttccaaatagggtttctcagtgtagccctggctgtcttggaaaatgctctgcagactaggctggcctctgccccctgggtgctggaactgaaagcgtgagccaccactgctcagcaatacgtcttttatccttagcacattgagtgcctcttccaagagtagccagtgcaccagctttctaggtgtctgccagagcaaccccttttccacgttagtctctgctcatggacatatgtttttattagattcttatgtatgtatacaaactttatacgcagtgttctatgtgctgtatttttgtattgttccccttgatactacatgtatacattttaaagttatcctggcataaaagagaaagggcaaaaaggcagttaagtctacttatgtattgtaaaaataacctgttaaggtaatgaatgcctcaggcctttaatctccgcattgagggagcagaggcagggcagacctcttgagtttgaggccgcttaatctatagattgaattccaggacagccagggatagtgatacttagtctcgaaaaacaaaacaaaacaaacctgttgagaagatcccctaaattttttcatcagtttaactcattctctcaaactatataaatagcggttgagtggcagataaccttagtaaccaggtgtatctccactgtatctctactgtatctccactcctcagctgtaacttagtgagtttgtccagagggtgatagctatcaccttccagcgtgtactaccccatgttcaaacggcatggttttgaggttcctttgcagtgagtccaggaagggcagatgtgctgcctctgtgtatgggaatgttagaggaaataccatgggtttttttttggggggggggttgttttgttttgctttgctttgttttcttttttgttgctgtttttgttttttaattattttggggggcggggttagtggttgcctaatactttgctttttgcttctgagtttactctcattttgctgccttatggaaatctaatcctgagggtagtaacacatttgtgtttggcatatctgcgtgctgcagaggatttggttaaagaaacctaattgggaggaaacatcattttggttagtttgcaaaggactaagattctttttacttcctagaaccagtgtgtctcactcttttgagaggtgacatttcattttagtatggagcactgtttaaggcacttagatcatcaggctttggggtgctacttgctgagtcagaatctgtccaggtctggcctgacatgtgtgctttgacaaggtcccctgcaggagaatctgcttaagatccaccagtttaagtaggtaacccttggtacctggactggactgagatattagtggctcacattctaaaaagaattaacatttgtgtttcttttgtagcattaacagtggtagcgtcttcagggttcgcttcttccaaaccacggctgtgtgcagttaagtacctgatttcttgtgaatggacttttactgggaagagaaacaactgagtgagattattaaagacagaatgagcacttgtggttttcctgttttgtttttccctagagaatgatgtgataacagtccaaaccccagcgtttgcagagtctgtcacagagggagatgtcaggtgggagaaaggtgagctttaagttaaaaactaaggtctcttcatgaagcacagcaagtgggaactggctccaccttttcctcacatacgcatctacttcctgcccagtcttgtaggaaagtggtcttttcacacagtgggttaacaggggccctgaggctcccagccaacaggtgtcctttgtctttcagctgttggagatgcggttgcagaagatgaagtggtgtgtgagattgagacagacaaggtgggttcatcctaaggatttattacagattacttttgattattcagtcgtatgtagtatgtacactagtaacttgaatcagtagctactttgtttgctttgtggttcctgggctgctttcagtcttcttccttgtatcacttggaaacatagtaactaaagcatgttttaatgtttctaagaaaagacagaaggtgaatcctcaagatagcaatcacttgtctttttctgactgaaaacatggccttaggtatttctgtgtgcagaggagatgtaatatccaggtgtaacagtgttgtaactctttctactcatcctgcttgactaatgcaatactatacaaatgccgataggatacaaatgccggactctgtctccatttctttcctttccagacttctgtgcaggttccgtcgccagcaaatggcatcattgaagctcttttggtacccgatgggggcaaagttgaaggaggaactcctctgttcacactcaggaaaactggtggtaaagaagttctttttcctggtggttaaggtctccagtgtttcctggtgggattgaggctgagcatactgtcctagcaactcccctgcctctgactggcattctagttacacctttagttgaagggtagaagaaatcctgttgatggatggtgaactttcattgtcaagttctaagccaacagggtaattttaaaaacccacaatactctgttctttccatatttctcagattggatctttttcttaaagaactaacagggggttggggatttagctcagtggtagaaagcttgcctagcaagcacaaggccctgggtttggtcctcggctccaagggggtaggggtggaggtgacagggatggggggacggggatggacggacagacggtcagactagcagaagtcaggtatctgaagagagtagtttccctgcactgacctggatcacatggagctttaaaaaagatacaaatgaaaaggcttccagctcctgagatttctgatttaccaccttgctataatagttggattgttgttagttttgtagcattctcctaagtgattctgacatatagtcaggcctgagagccactgtgttgacaattgagtgtagtttccttttttctttacaattacatttgtgtgtgtgtgtgtgtgtgtgtgtgtgtgtgtgtgtatctgtgtggggagtgtacacacaaaggcacgagtgtggaggtcggtgggtaacttgagagtcagttttcccttcctgtcacatgggccctagcgctcgaactcaggttgtcagacttggtcctgtgtgtctccaccactgaatcacctcctttccgtgtagtttcttctcacatttttctcaggaaaaattggcatttctctttggaagaaatgccaaagaaagatgcctgtactggaccttatagtcaatattggggttagaaaatctgtttttctgacttgtaagtaaagatttttgtagttagagtatttaactgttaagatagtcaagcagaaagatggtagattagaccattaaagttggtcagggcaagatcaagttcaaagtaaagggaaaaaaatctgaagtagctaggatgaatacacctgtcagtattcatgctgggacccctgagacatctttccaggcgccaaaataacattttaatcaaatgctcatttaagattaaagagttcagaggctggagagatggctcagtggttcagagtagatactgttctttcagaggacccaagttcacttcccagtgcctacatggcagctcacagttgtctaagactcccgctccacgggttccaatgagcctttataggcatctccattcacgtgcacatatacacagttaataatgataaaataattctttaatttgatttatttatttaaaataaatgttctttttttttaacattcttttaagaattattttatgtatatgagtccactgtcactgtcttcagacacaccaaaagcgggcattggatcctattacagatggctgtgaaccactgttatagttgctggaatttgaactcaggacctctagaagaacagtcagtgctcttaaccactgagctatatcccccacccccattcctttttaaaaaatttttaatggttaagagtattccttttgcctggtggtggcagtgcacacctttgtggatctttgtgagtttgaggccagcctggtctacagagagttccaggggagggttacacagagaaacgtcttgaaaaacaagagagccgggcatggtggcgcacgcctttaatcccagcactcgggaggcagaggcaggcgaatttctgagttcgaggccagcctggtctacagagtgagttccaggacagccagggctacacagagaaaccctttgttagctgtcttgaaaaacaaaaacaaaaaaaccaaccaaacaaacaaaaaaacccaaaaaacccaaaaacaaaagagaaagagtatttcttgtacatgttaactctaaaatagaagattgttagcagcgtgtcacatttatgtgtgcatttaaacattttcatttgctttgttgtttttgcttaaaacagtggttctgctggtcaccaacccctttggaggttgagtgactctttcacaagggtcacccaaaaacctacgcatatcagatatttgtattatgattcatgatagtatgaaaattacagttatgaagtagcaatgaagtggctgtggggggagggtttactaccacataaggaactgtattaaagggtcacagcattagaaaggctgagaatcattggcttaagttttatttccttgggcttagtatgtgctttgaaagtatttgctgaatttgaaagtctgtagatgttagttaatatttgtgaaatcaggaaggcatctgaatcgagccagcaggacgtttagggagacctgagactagagagtagtggctcgtgtcactgtgtatcacttgatgctttgcctatagcaaggacctaggagacatttgtttgaggctggaaatagacctttctctctgaatcctctttagtagctgtggttaattgccttccatggagtggtgccaatggcattctctctctctctctctctctctctctctctgtgcagctgctcctgctaaggccaaaccagctgaaactcctgctccagcccacaaagcagagcccgcagcaccggcggcccctcctccccccgcagcacctgtgctcactcagatgccaccagtgccctcaccctcacagcctccttctagcaaaccaggtaagaccctgtaacagaatacttcacggagagctacttagatttattttagcttgttttgaggatgaagagtcctttatgtcagggaaggtgtggtttcagtgcacggcagatggtcacgtggccattgcagccaagaaagtttgtctgctgctccattcactttgttagctaaacgctactcacttccagaccccagcccacattacagtgctgcctgtattcacagtaagtctctccactctgagagcaagaattcagtttctctggaaaaactgttatagacatggccaggcttttatcttcccagtggttctaagtcctgtcaaattgacagtcaagattaatccttacagtctctgactcccagggagaagggacttcgtgtccctcacagttacagtctgatgccatggctctgaatacaccaagtttgctgaagaactgggtttgcaaaccagccttctatttatttgctaaccatatgacactagtttaattacttctatgactagattgttcatctgcgagtttggaatgatgctgataaactttagtatcttgagggtaaagggttaatacggtgcagaaagtattgctgtccgtgtccgatgtagctgtgcactctcttcattttcagtgtctgcaataaaacccactgctgcccctccactggctgaggcaggagctgctaaaggtctgcgttcagaacatcgggtaagcctccgacaacttccagggaagtggcagagagtcgctgtggagagtaatggagtgtggtcaccgttagaaagggctggcacctctttgccttggccttgagaagggggagaaagttacttgttcatggtctcgtgactgtcagagggaataactagaactcagtgtctcccgaatgttggggtttctactgtattgtgctgttggtgaaatgcttccactgagtaaaatgtctgcagagaatagacgcacagcccctctccccacagtgacacgcatgtcacagcggtagtcacagcagtagtctgctgagcgctctctctctctatacttccgggatatttcgccgcagctggggagccagtggggccagattgttgcactgtagcagtactctgtcagaggagacagaaccctcaaggaagtatggtcaagagtgtgggttctttgcctgagaatgcttcctaaaaataccatagcttcaaaagcttgctttagagtttccgttccccaagtagttattctcacgccagtctttatcaagagaagtcgccctttctgaaatgactcttaagctggctggatctacaccacagtcttccttttgtaaattggttttggtttttaaatcacactatttcctgagcttctgttcttggtcaaatttcaggtatagctgagtgaaaaccttggtctctgagtctgtgtttttgctggggctactccagaaagggaaagcctctagctttaactgtagtgattgagcccagcactgtggcacatgccatgaatcccagtactttaggaggtagaggcgggagggtctctggtgcttgtcatccatcgctgacaggctgagtcctctcactgactagggatggtctcatggtcaactcgttccacttccctttcaggagaaaatgaacaggatgcggcagcgcatcgcccagcgtctgaaggaagcccagaacacgtgtgcaatgctgacgactttcaatgaggttgacatgaggtgggatctctagtccctctagtccccacatctgtgtttctagaagtagaacgcgggaacttgctgtagcccttatcagtgctgcttccaaaactagcttgacctgggagaggtatttatttctctgcttagctccttgctgacttatacagcatgacccactggcttaatttgctagtttacttctctaatactatggaatgaattagaaagcgtgtaagaaaatagtgagctttactgcaatgtaaaaagcttagttttttggactttcatgcctgaactattatggtctctgataaattatcctagggtaatcatttttgtttaggcttttatatttacttttacttatgtatatgtgtgaatttggagcaggggtgccaacagagggcagaagagggatcccttagaactggagttacaggtcttgggggctcactgacatgagtacaagcccacatttgggttctcataactgctccagtccctgtttggtttttgagacagggtctcaaatatatagtcctagctggcctagaactcactatgtagaccagactggccttgaactcacagagatttgcctgcttgtgcctcccaagtactagggttaaaagtgtgtgccattatgcccaagctggttggttggttggtgggtgggttttgagacagtgtctcatgttgcctgagctgggcttgaactctctgtagctgaggatgatggtgatggtgctgccatgtcctgctgctagtaatggcccacttcttgctaccccttggaatgggaacccttcacaatgtgcctaaaaggacaccacactctccttctttctgacagtgattgtttcttgtatagttcccaagcaactcagaatctagcaggcaaaaggacagaaacctgccacctcttactctaccctgtttggattatggaattggaactaaattaagttcctctgtgtgtgtgtgtgtgtgtctgtctgtgtctgtgcaagcaagcacatacatatgtacgtgtgggagtgtgtaggtgtgcatacatgcatataaaagccaaagatcaatttcagttgttgttcctgggagtcatccaccttgtttattaaggcaggtttctactggcctcgagtttgttaataggccaagctgactagccagtgagccccagggatctgcgcgtctcctacgtctataactctgagatttcatgtgtgccaccaaacccaggatggtttgtttgcttggttggttttatatggattttggagttcaaactcaggtcttcatgcttacctgggaacgaggatgtcttccctagccctaacagttaaactctaaaatgtaaaaacccccagttcactatacccattcctgtaatggcctaatggttgatttccttgtttttttcaagattttgatatatctaagtatcagcattttgggaaagagaaaatagttttatttaacaagtattttaagtgtttatcatatgcagattactaaagtgaaatttaaggagttatggagatgagtgtaaaagctctttggatcttgccgggcgtggtggcgcatgcctttaatcccagcactcgggaggcagaggcaggcggatttctgagtttgaggccagcctggtctacaaagtgagttccaggacagccagggctacacagagaaaccctgtctcgaaaaaaacaaacaagcaaaaaagctctttggatcttgctatctcattttggtgaacactaaataaaatctagaagaaaaaaaagcatcaaaaagataaaaatgagtatgaagtggagaagggagtgttgtttgctttcggagtttgaatgacaagcatgtaagccagggagagtgtgtcatctgtcatcctggtacttgagaggtggaggcaacaggaccaacaattcagggttcaccttagctgcataaagttcagaatgagagcctgtctcaatttaaaacaaaacaacatgaaaatgctaagtagtgttacatagaaactcattccaaatggttttagcagtttggatcatggcactgtcaagaaaatgcaagaaacagaaaagatctgggttggttttgtttttgtttttgtttttgtttttttttgccaacagttcacataggatatgaatggtgaaggttggatctgtatttgaatatcagtgtaagaatgaattaagtcaaagatgacgtctctaaggtacccatctccctttgctttgagtattaagtctttccctctgcttctcagtgaggaagtttgtttattggaaatgtatgtagggatctggttaattttattgggaagcccataatgtagggaaggacttttcctagtgaatcacaaagactgcagccgtgtttcctgcattagcggcaaagtgtacacaaattaaattggactttgaaattttacccatttcttaagacgaagcatgtaaatatttatatctctaaaagatgcagttggcccaacatccttgattgcaaatctgtgtaatagctggatcttctttcagtagccaatctagtgtcacttagcagtggcctgagacttcccgggagccggtaatgtggtttagatcgagtgccctttgggtcttatgcctatcagcgaacccagaggagtctttctgagacttgccccttcctccactggctcagcgttgcctccaagggctaagctctgaaatagaaactccttaatgaccagaaaatggcatctaggcaggtctgagaacagagacacccaccacgcctctttctgcagtaatgcctttagggtggtaattctagcactaaatgaggttagactcaggaaaataaacattttaaacccaatcaatcccctcaggaaaatttccttttttcaaaaacaaaaggtctgaagtgggcagttaaagggtaccacatcttatctttcctgctaatgttgaattaagccattatagggggaaagggagacgtgagcatttgggcctgagataaagttcaactcaattttcatcatggaatggtattcctataatcatagaccttcctgtgggaaaacaatgggagagacgtttctcactaactctgcaatgcatatgtgtatgtgggggtggggtggggtggggtgggggctagcttgatagaccagaggatgttcaagttgcagagtcttctcagaggcaagcccagcgctgaatctgaaagacaggccacagcccacacggagccgctttctaaataccaaggaaaccacagtcggtgaaactaatcttaagggcagacactgttgtgttgttgtatcttggtgcccagcccagtccccctcccccacacataatgggcattagtaactgtttcatgagcaagtagaaagaactgctaactcagaggaaagagtgagtctgctgactttgcataagccgggaagaatattggacttagctcctgcgtataattagtaccgtttggaatggtagtattcattgtgatctttagattatctgtcactgaaatctgtgactcatagaactaaaaggatctccttaaaagggctcaaccatcttaagggacaggatggcgctgattcttctaggctggtattttgtgatagagtactttattacattgactactagagaatgtttcaaagcttgaacttagatgcttcaggccaagggaaagcccatccatttgtatacatgggtgaaaacttgtgaaagtccaaactagggctttagctgttctggtgggtagtacaggcctgccatcccagctcgttgggagattgaagcagaggaagtgcaagtttaaggctagatcatgcaatttcagtacacctagtctctagactttaaaagggtgggatgcatcagtagcccccagccccttagcactggctcagctttaactgtatcctcagccaatcagatgttgaagaccatgggggtcctcttgtttaatttgtccttgtgtatctattaaaccttgatcagggtttctagaatggctgcagtagattttgaaaacagacttaccgttattgatttggggttccccagagatccagttcacagttgttggactctaatacaactgaccattgaaaagcgaacaacggcttattgttttgtaaccgtgtcaggtgagccctgacatttcaattgaaacatgaattgtcattataactcaatgcaaattcaacagttgttgaattattttaacaaataacagttggagttaaattattttaacaaaaaatttatttaatgaaaaaaaaaagggtaggatgcaggggtgggttggggagcacggctcaggagtaaagccgttgccagcgtttctcagaggtcctcgacacttagcctgtggcagtatgtgcatgtatatacacaccagagcttcaccaacagtttctttgcatcatgtatttacagtaacatacaagagatgagagctcggcacaaggatgctttcctgaaaaaacataacctcaaattaggcttcatgtcagcatttgtgaaggcctcggcgttcgccttgcaggagcagcctgttgtaaatgcaggtaagtttcctgaggccagtgtggaaaagactacagacctgctgccacatttaggggtcaccaaagctttttattcacagtctatggaaacatgatcaccttcaccaaatactaaaagtaatggtaacatgattactttctctgtaccaagtatgcagaattggcacttactctggcagtaggcagctctgggatagcttggcttcccaagctgtcttgtcatgggcgatctcaagctctggctgctcctcacccccacgcaccctttacttggaggcttgactttcatgtttggcataggctccaggttgacctctgacctggggttggggcctcattacgaaggcttgggcttcgtactcattgtctttcctcttctcagcgctgaagtgttgatctagcttgcatttcttgttttgtgttgtgttgaggcacttctgtgttccttagaagataggagaggggacagtgacactttgcagtcctcagcctaaaatccttagtctgttccccattgagtgctgtgcattaggcacacaggagggctttctttgctcttggcatctctcagagttctcgttcacttgacatgtactctaacaatccattgtagactctggaagattcccaagcctgcttttcttttcttttctttttttttcctctcctcccctnnnnnnnnnnnnnnnnnnnncagacacaccaggaaatggcatcagatcccattagagatggttgtgagccaccatgtggttgctgggaattgaacttaggacttctggaagagcagtcggtgctcttaaccactgagccatctctttagcccccaagcctgcgtttcttgtaggtaggtacagttttcagtaattggttttatattttaagatgacgtatttgaaagccaggcctcctccaccctcctctgccttttccagggcacttgctatctagccattctctgctcagggaaggcttgcatagataggccactagtgtgcttctactgaggttacctcctgtgagctctgggagaacatgctccatcgttcaggttgattcagacgcttgggaaacactgatatgagttgggatgggagccagaggagtgttcgttacttgtaatgtagttattttcatgtcgattagtcagcccacactgcattggccactgaagactttcactctgttaactccttatccttggccaagaggttgtatgtaacatccgttttctctttcatagtgattgatgatgcaaccaaggaagtggtgtatagagattatattgacatcagtgttgcagttgctaccccgagggtacgttgggcaagacttggaagtgcttacttagatcctgtcttggtcatttctatttctgtgctaagacgctaggaccagggcaacttacagaagaaagaggattgggtgggcttcggtttcagagggttaagagaaattacaattacattcatgttacagaaagtggtagcaggcatggtacatgagagctcacatgttgagacagtcacaaagtagagagaactaactaactgggaatagcatggcttctttagaacttaaagcctgcccacagcgacacacctcctcccaaaaggaggccacacctcctaatcttcccaaacacttccaccaacttcagagcagtgtatgatcctgtggaggccgttctcagaccaccacagagctcacctggaagggcttatttctgtagctccggattgctaggagactgttagtaaaagtgcatttttcttttttttaaactataccccgttcctttatcttagtgtaagtctttttaatcacagtgagtttaaggtgttctggttggggaaattgtaactataaagaggactgttatttgcaacttaaaataactttccactccagggtctcgtggttcctgtcatcaggaatgtggaaactatgaactatgcagatattgaacggaccattaatgaactaggagagaaggtacagtagacggaagtgtgtgcacggcctgctgggcagttgggggatcagagcctgcagaggctgcgctgctcaggcctctggagtctggctctctggggacagcataacctcctaggaaggcagcagctgtgttctaaggagaggcatgtggcaggcagagcctgcatgctccagtgactgagatctctaagtcagaatcttctgtagagtcagggtttctctgaaggcggtcacagtcacctgagctgagccactgtcctgtttgcacctgggctctcagataagagttttctagattcactgttttggatcagagaagcctggtttgacttaatgtttgttgttcttaggcccggaagaatgaacttgccattgaagatatggatggtggtaccttcaccatcagcaacggaggagtttttggctcactttttggaacacccattatcaacccccctcaatctgccatcctgggcatgcacgccatctttgacaggcctgtggctgtgggaggcaaggtaggaaccattgtttctgagatttttaatcgctgaatggctggctgtaagagagaaagctaaccaaatccttactataaagcatccactgtaattttaattactaagtgacagttaagacactggttctcaaactgtgatctggggctattgacatcatctgggaacttgtcaaaaatgcaagtgctggaccggcgagacgaatcagcagttaagagcacttgctgctagcaaagtagctagattcagttctcagcatccacgtagtggcttgccgccatcagtaattccggttctgaggtatcgggcaccatcctctgtcctccttggctgctaggcacgcatacatgtaggcgagatgctcatacacagtaaatactaatttatttttaagtaaatgcttagactccccctcccccactcccttcccctcacacacttagtctactgaagcagagatgctcagctctgatgcatgctgacgtttgcactggcacttgttgccgccttgtcagagcctcagggagtcagaaaacggcacagtgcacagcagtctgtgggctacagaattatgtgagaaagcttacaagtttctttgagtgttcaaggtatgagggaggcccaagagcttgagttagctattggaagataagttagtttaaaaaaataaagttttctgagacttctgtgtctagaatatatctgggtcattgactcctttataagtcaaaaaactataggtctttttcttggaaaacagttaacacacttagctttgcacataacagacttatttttttagttcatggatttttaagacagggtttctctgtgtagcttatttgtcccagaattatctatgtaaacaaggctggccttgaactcagatctgcttgcctctaccttgggcaagttaggtgcttgctaagcatacacaaggcctggtgttggatctgctcattgcaaaaaaaaaaaaaaaaaaaaaaaaaatagtaatgacaaagattgaacttgaaagtagctcctacaggcagccacaactgcagaacaaacctctgtgctcattgcaaataaataaataaataaataaataaataaataaataaatagtaatgacaaagattgaacttgaaagtagctcctacaggcagccacaactgcagaacaaacctctgtgctcattgcaaataaataaataaataaataaataaataaataaataaatagtaatgacaaagattgaacttgaaagtagctcctacaggcagccacaactgcagaacaaacctctgtgggtaacagtagctgtagagcacagtgtagcttacttgtgtcaaggcggttttgagtggcctgtttccttgtttaaactttggttctaaatctcagagctttgctcaaaagaaaataaacctaagttatccagaggcagcagtgggaggaaaggttttgcaactagaaccattgggtgggctttgctttctcacatttccctcagcagggctttgtctctgatctgctggatacagatctgttgacctctcctctctgcaggtggaagttcgacctatgatgtatgtagccctgacctatgaccaccggctgattgatggcagagaggctgtgactttcctccgaaaaatcaaggcagcagtagaagatccaagagtcctcctcctagacctttaggaggaagccacacatcctacctatcgatcatgcaggaactgaaaaccactcttctccctgtaccctcatcaatcccaggttagcctgatgacaggcaggcacatactattggcctcaagcacggaagccagggcacgatgtaaccagcgttcacaagtctgttcttagtgttccctcgaggctctttctctctccctgagactcttatcttctgctatcttggacctgagagagagtgagagccttaatggatgctcattaatgttcctgcctttattccagtcctctacaaaggcaattttgcttttctccagtaacagtatgctatagggataccaccagggaccatgtgatttgagtttctatcttaggaaagtgttctccagagatgcctaggggatgctttgcctccatcccagctgtgcacactctgacttgatgccacctgtgtggaggtattgaacacaggcaaagaggtgctgctttgcttcttaaatgcaccatcattctgacctgtcagtggcttcaaggtgctctacctcttccagaaagcacaggctggggtatttggggacaggcaggattgtgcagcatcccctgagcttacctgttatagtcacaggtgggagttgaaccctggcttgccctctctggctccattgtatgctggcactgggaagattcattttggcataattacgtacaactgtcgtcataccaaccctttccagcttctaggaatcgttctaggacactgttgtcacttaaagcagattttagcacatcatggcagtggggcagcctgacgaagggactgttctcacaagatcaggctgaagagagcttttaaattccaggtggtgtgagcatgttctgggaagaggctgtgctctccctccctgggatgtggcctgtggggagcaaggtcttgttgcctctggtgcagggcacagagacaggggagggtggactgcggtgggaaccagcctcaggagttaggacagcgacgagatgatggtgtcatctctaagatcaccctcaggtgcaggtacagttgttggaatattcttgaagcatggtaaaatgcttaagtggttttgagcgctcctaggcctcgtatcctgcactgagcctgagcctgctgacagttgccgtggccattagtgctgaatgcccttttttcttgtaatccaagacaagctggggggaggggaagaggtcagtattgagtgcctgcagcatctgctactacatctacaccattcagaacttgtaactaaaatatttaaagagactgattttgaatgaaaattaaagggcaaatgttctcaaacagggctccgggatctgtgctccttttgaccctcgaggctttacagcctccatcattgttggcaaccacaatgtcgttatcaccgaaagctactacttcctcctgagttggctatcttggtggagctactggtggacgcaggatctttgtatattcttatctctgagcagcataccaagcccccatcccatattttaggcatattgcttttaacagccagccaggagagcccactaatgtcttagtgccctgggttcctgtcagggggccccatgcccctgagaagccaattcttgagaaattgaggctcccacctatgtgaatccccttcaaaacaccaggggcagtttccctttgaagggcttgcatcatttctgagatagagtggggaggcacgaacactcctaataccatttggacttggttgccacatgtgcatcattataagcacatgtctggttatgaacggtgagggccatctcctaggagcaggagtgtgcgaggggcaatggacaggatagggttggtcaccaacccaggatgaccccaatggataggcatgatggagtagaggcttcaacagagccttactttcccacacacctctcatctgctgatcctgtctgcagggaggccctccctctggtgccctgtcccaggaagaagcagggtccttaagaattgctgctggtaggggaattcagtgaattatgtaccaggtctagtgtttggtatgttgcaagttttaaaaatttctactaaacttctggagtagctgttctgttttattgaaaggccgtccataaggcctctcagaatcgggacctcggtgttccaaactgatggctccacagagttccagatgtgcagtatgatggctggttaagccagaaagcgacctgcactccataaagcagtggccgaagatgtctggcactgtgggttaccacagaacctacacctgggagccagctctagaaggtcctacgttaacctctcaagatcgttttctcaggagaatcttccatgaggtagattagattatatgctcctcaggcacacctcaggtgtctgtctcttcgccttcctccctttttctgaggctgttcctcaggctgcttccttccaggccacttgcactatattaatgatgcaaagatgccacagaaagaataggctttattagagggtagacgagccccaggcacttggagccccagacacacgcgtgcacgcgcgcgcacacacacacacacacacacacacacacacacacacacacgaactggggattggtcaagtgaaatttgttgcatgtaccatgcatggcccagcaactgggttgtcttgaggcaagccctcagacctagggagggggctgtctttggacataccacttacttcagagaccagaaatacctttctgaaggcactgggtaaaattggtccatatgtatctcattctaaaagtcagtaggcggtgaattgaatagaagctcataccaaaatgcagagtggaaaacaacacctgagaagaactgactgctggtcctgtggagcgagctcttctgacacaggagagccagccagagaataaagcgctttattctgttttcaaactccgtcttaagtggtacaaccgcattcttatcccgctcttaaacacactggcttctctttgccttgattttattctccaaagtcagaaatcagaagttaggggtcaggagtggcgagtggctcacactgtgtcccacctctccccacttcaccctacagactttcctacagaccctcccagcacccggacctctgtaggaacggcatctggttgtagcagcccactggtagcatgactaaagtggatccaggacagtcctggtttgggtctactgagccagaggttcagtgtcctgagatgtctccagagatgccctacgtggtgtacagatggcagtgttcccagattcatcagtcggctcaatgggtgttgagcagtttggaactagagcaacagaaggcaccctttgagatgctaggtcccagctaaaggtccaagctgtgtggtcagcaggtatctgttggctggtgagcgtaggttgctcgacggggtgcacctctctgcccttgcagcagcttcaccagtctgaggcccaagcaggttgtgagcagaaaaagtggctgctgcgccacatgcttcccctgaagtccactgaggggaggggccagcccagctggtagacagtcaagagaactgggccagccacactgtccattccccgcctcctaccccattagccggctccactggatagtactgaaaaagggatgggacttgagtctgctggtgccaccacctccagctcctaggcgccgctggggctcaaactgcagcagctgtggggagagagtcaatcactgcagcccttccccatcctagagggagatatccccctcctggggctactatcaccaaagttcctagggtgttctttcctcgctaacccagtcagtaagcccctccccaggactttggaggtagcaagcacaggcattcaagggcatttatgcgttccagcacttgaattaacgtgtacaggcggttcctctcaccccccacccatataccaataagccaggggcagtgagaacctctcacctcagttagcagagaagctgctgggtgactaagccactcaggcagctggagttgggtgtgggcctggaatcctgaagggtggctctgggacagtgcctggagagtgggggacacaaagagagaccatcctggggaagcttaccccctagtggcagccaaaacttgcacacatgtgtcacagtccaagaggaagatcttgatagctgccttttgctaggatctactaatgacttggaccgagctacaccccaaacattaaagaagctggctcagggaaaaggggacttgggttagcactggagttggaacctgcaactttttagaaccattgtctttatgcagtagacactattgggaactcttaagtctctagaagctacagatgcaatggcaggcctgccatgcagccgttgaggccaaggcaggaatgtgatgaccagtggtagtatattgagataggatgagctagctgcaagaagagagacaggtgagccttgtggggcttagggttcttttttttatcttaatgaagggttctcagagaccctgagttatgaccaacaaaggcacatcaagtctggcctttaggtcactcacactgtcgtcttctggtgccactcaaactgttgcctgctcaaatgtagtttgtcttctcccttgcttcccaatcagactggtcccacatgtcattctgagctcatctgagtggagtacagaggctaaaacctggccaagtgggtggtgtgtatatgtatatgtgtgtgtatgtatgtgtatatgtatatatgtgtatgtatgtgtgtatgtttgcgtgtatgtgtgtgtatgtgtatatgtgtgtatatgtatgtgtaatgtatatatgtgtatgtatgtatgtgtgtatgtgtgtgtatgtgtatatgtgtgtgtgtatgcatgtgtgtatgtatgtgtgtatatgtgtatgtatatatgtgtgtgtatgtgtgtgtatgtatgtatgtatatgtgtatatgtgtgtatgtatgtatgtgtatgtgtgtgtgtgtgtgtatgtgtatgtatgtgtgtgtttgtgtagggtcactgaacctgactggttgaccaggaagctctgggaatgctgctgtctctcccagaccccgtattagttacagaccccgtattagtcatcacacttgacttttgcgtggttgctggggatcagactcgagttttcatgcttgagcagcaggcactttaccaactgagcccctgcccagcccgcaagtgtgcttggccgacccagctgagaaggcaatggctgacttgtatggaggagccttctcccatctccatctagggacaatagcctttaagggtaagggggactggatagtaggaaaaagatttaggttataatccagagaccttccagggaagggttgctgcttctccagacctcaggccagacatgctcgtccataagcctctggtcatgccaactcacatagttcatagaagccggcaaggctccttagccactggccctcctgcggtaggagttctattgccagtggtctgatggatggaaggacatccagcccaatggtcaggcacggagaaccaggcagcctctgttttgaccctggctaagcctctgctcagcctaaacccaatggtccccaccagggttctatacactccctgcccagctactcaccattcctgtgagcagttcatacaggagtgagccatagctccaccagtcacaggcttcagtcagctcagaaatgcccccaacctctgcgagaacgagaacacacacatgcccacctcacaggagggccctttctgttctcattctagcacccactgcccatcccgtctttaacccgtgcaaaggcagccaagatctagacgcctctcccaactcccttcttgcctggagcactgtacagacagtccacggcctcctggctgcatcgcggctccacttctgaccactggccaaaatacgtgagttggatgtgaccttcttgtccagtgtgcagggaggaacggtgggacaaaggttgaaactagcatcaccgagcatcgggaatctccaggcagtccaaggcttcccccaatacaatcatgtcaggggccaaaggtcatcccaggtggaatctccctaagggtgtggccccttgctgcccagggcccaggggtgttcctgaagctgccctggaccccaggttcatgccttctctaaaggaacagatgaaggaaggggagggggaggaacagctttataatcttggggcttctgttgactctgggctcccatgtgcagtggggttggagaagggaggctgaggctcttacctgcctggtccaggagcaggttctgtgggttgaggtcccggcacagcaccccctgctgatgcagcgcctctaatgccagcagcatctcagctgcccactgcttcacctgtccctccctcaggctccaggcagctcttccgctccccaggctggccctgtttgctgatggggggttccgacccctgcctcggccataggctcctagcacccggtcagccccttctcgtacccagtggagcctctgcgtgggtgctgggttcgaactctggccagctcgcctaacttgactgtgcgagtggccacacggggcctctgtggggtctgaagagaagacagcactgggcctggatgaaggctcagcatcggcctctttctgaagctggagggctgggggtaggctctgggaagtccgtggaggctccattgggattctgttctgcctcagggtatggcctggtgtgagctccgctggggtcatgaggctgaggcgggtgctgagttgggcttgcgacttctcctgaaccgagccagagttaagcccagagtattgaaaatggtcctgggagagtagatgtgaccaaagggtgcctcctgggccaaagagggaatgagagcgtaggaagaaagaagagctcggacataggcccaggccccatcctgctttccctccatttcatcccgccccctctgcctcctcagagatctgatcaccctgctctgacccacctccagggaactcagcttcacagcctgcacactcgattgttggtgaacttaaactgagtgtgtttgaacaccagtgttcaacacgttacacttcctcttcacaaaaggtaaaggccacgcatggatttacagtggccgcatcacgacccaaggatgtgcctcacattttagaatcactaagtatctgctgcgcggctcagttcccgtctttacagttttagtcaccagccgcgccatgtggccattcaggaatgggcactgaccaggaaagccaagactagaggaaatggtaacaaagacagctgaataaatgtcccccttcacctgcctagctagggtgggaacatccttccggggatgccccctgctccctcggcaccatacagagctccacagcagctcggccccgccctcaaccttcagaaactctaggctcccagtctgtaccccacgtgtgacgcaagccatagtcctcctcagagctcagagttggggagaacagtgagaccccaaagctcagaggaactgatgggccctcaccttgcacatgctccaggtgcaggaagatggagtcctcgctcacgaagtatcgcaacaattttgtcatgtaggggacgccatgtgggatgatcgtcagccgctcccggctcaccatgtgacacctggggaggctctggagaggggacagggtatgtaaatgagctgataccgcccaatgctctggcttcagggcaccggaagatgaactgggagccaggctgagtagcatctgcttccaccagttcctggtccagccctcacccctgtaatcccatggaatccacatccaaggatgggatacagtgtgtgcatgtcagtcgtggagccttgggcaacgctcggaggaattggcagagttggtctttggaggaagcatggacttcatacgcacattccgggggtggggtgggggtgggcaggggtctcaagagctctgagaaagttccaaaagaaacgctgcacgccagcagccgggcagcacctgccttcacgatgaaggttcctccagttgccgggtcctgaaccacctgcacctgccaaagtccaggaggcaccggtcaagctgtgttagttcccgggcgttccatggcccgaggccctgactattcccaaacatctaagccctggtgcctcttcctccagcatctgcaactcctacctatgtctcgtgctctctgggctcccgctctgtgggtctaccccacaggtctgtgtagtgcgagggaggatggaatggatactccacctaggctggcaagaggtctaagtacccgctgttgggtttgccataactctcatgagaacatctccccgccccccaacctgcctacactagctagaccctgtgtggcctagaaggacaaccaaaatcaacacttcaactgcaggctttcgccagaggtcatcatcccagcagggattgaaggtggcactgagtcagtcaattcttttgtgcacaaatgaagctaggtgtgcatgcctttaatcccagcagtgattgagagaggcagaggcaggcggaccttgttgagttcaaggccagccaagtgcacagtgagcccttttctcaaaacagaacaaaacaaaacaaaaaccagaaaaacaaaacccccaaatgcgttaagagcctgaggcgtctgagaatgtggttccagatcaggacggctgccttcagcaggctccacacactccaggaatttctcttctttgctacacttcttttgaaataaagtgggtgcagttgtgcacaccagtcacctgtcctttgacagtagccgtctccttctcggggtggcttcggtaagtggggagctgggtccacattgctagacagtggtgaaaaacaaagcctaggaatggagtagggggaagagccctgcagtcttttttaatggtactgggcctcctgctcaccaggctagagctctgttactgacttatatccccccagctcagggccctggttcccgagcttgggcaaataagctgacttttttaactaccaaagagggattagaaatgtccagctttgctatatcgctggtttgttaggctgtaaataggagagtccttaatgaagccatgatgatattacatgcttgccaagtcacgcaccttctctgaaccttgtgcttgtttctgagttgtgcttgcgtgcgtgcgtgcgtgcgtgcgtgtgtgtgtgtgtgcatgtgtgtgtgcgcgcgcatgggtgtgcgtgcatgcgtgtgtgtgtgcgtgtgcacgcacgcatgggtgtgcatgtgtgcgcgcgcgtgtgtgtgtgcatgtgtgtgtgcacgcgcgcatgggtgtgcgtgcgtgcgtgtgtgtgtgtgtgcgcatgcatgggtgtgcatgtgtgtgcgcgcgcgcgtgtgtgtgtgtgtgtgcatgtgtgtgtgcacgcgcgcatgggtgtgcgtgcgtgcgtgcgtgcttgcgtgcgtgtgtgtagagaccaggcttgaggatgctggtgtcttcttcctaagccactctccatcttactttttgaggcagtctctcgctgaacttggaactcacctctctggctaggttggctggccaacaagctcctgcctaccgcctcaggattggagttacagacatgcaccctactatgtctagctttgtacgtagttgctgggaatcaaactcaggtcttcatgtttgcatgggaagttctttgccaactgagccttttccctaagctgcctaaaaatgggggtctcagcagttcgtgctttctgacgtcattgtgcttgttggtaaaagcaaagactccaagtgtcaaatcctcctcagccctggtaattaccaatgtcattgtagcagaaacagacactgctcattcagtgctaagggcttcgaacggctcacttcaccgtgttctcctaccagctttcctggtgaaattgaggttctgaaacgtgaaaccactcactttcaagcctactgctaaaaggctgtagcatcagaatttgaatacagacagtctgaccgtagagaggggtgaaagtgcctgccaggctgggccttattttctccataatcaggaaagcaaaagcaggggctaggctcgccccacccctccttcctataccagggcacctacaccagagcagcagtatcccttttgaccacaagaggtcgccctctaatggctaactcacctaactcagggtggccttggctccctgaccaaacttgtgcaatgtttgaagacagaggcagaaaacactgggttcatttaggaaaagattcccataagtattgccccccagttagttccccaccatccttccccaagtggtattccccgctaccacctccttggccaagtcctctgatttacagtctgaaaactcagtcaaggatcggagccagaaattaagtaaggacccatggtgtcaaaaacctgtgtattcaaaacatactctgccctactttcttttggaaggaattagaccaaaacattaacaacgactactctgaagttaggtggggcagtgaattgatttcttttcctttttcctttttggttatacactctccactctcacagaatacttccagcagagcgaacattttcccattgatacaaccaagcaggcaagcacacacatcctctccctctgataagtggcccagaggacagaagagccaacacctgactccctggatcttagttgttctctctctctgatcattgttaaggggctggagatgtaggttgctcgggagagtgcttgcatagcacgcatgaaaccctgggtttgctcctcagcatcaactgggaacagtgatacgcacctgtcacctcagactcagggatgaaggcaagaaaatcaggagttcaaggtcattcttggctacgtggcaagtgtgaggtcatcctgggttacatgagatgctgtctaaaaagtgcgggcaattatgaaaacacagcactgccaagcacagctttccctgccttgtgcactggggaagccgtcgaccccagtggtggtggagcccatcaacggagacacagaaaactaggttttaattaatccacaaatgggagcacagccttataattgggaaggtggaaggcaattgtggccactgtttgtttgttttttaacattttattatttcatcagatcccattacagatggctatgagccaccacgtggttgctgggaattgaactcaggacctctggaagagcagtcagtgctcttaaccactgagcaatctctccagctctggattaggcctttgcctttttcctttttttttttttttacaatttatccctaacaaactttcttttcttttcttttctcttctcttctcttctcttctcttctcttctcttctcttctcttctcttctcttctttctctctctctctctctctctttctctctctctctctctttccagacagggtttctctgtgcagctctggctgtcctggaactcactttgtagaccaggctggcctcgaactcagaaatccacctgcctctgcctcccaagtgctgggattaaaggcatgtgccaccactgcccggctcctggtttccttttttaattaattaattataagtgcattgcctgcatgtatgcctgcaagccagaagagggcaccagatctcattacagatggctgtgagccactatgtggttgctgggaattgaactcaggacctctggaagagtagccaatgctcttaacctctgagccatctctctagcccctgattaggcctatttttaagtaggaaatctaaatcctgggtggaacctctcttgaagcaggcaagccccaaaacttcaaagatgtttgagtctctctattataagccctgactgacctagtagtcattatatagaccaggctggcctcgaactcacagagatctgcctgcttctgcctccagagtgctgggattaaaggtatctaccataccctgccagggtcaaacaggctcctaaaggcttagaggga

SEQ ID NO: 348 - DNA, 2063 bp, Mus musculus
cggttgctgccgggccctgtatccggtgtccgcccgccctccatcccgctgcctccgcgatgctgtcccggtcacgctgcgtgtcccgggcgttcagccgctcgctttctgccttccagaaggggaactgccctctagggagacgttccctgcctgagaatgatgtgataacagtccaaaccccagcgtttgcagagtctgtcacagagggagatgtcaggtgggagaaagctgttggagatgcggttgcagaagatgaagtggtgtgtgagattgagacagacaagacttctgtgcaggttccgtcgccagcaaatggcatcattgaagctcttttggtacccgatgggggcaaagttgaaggaggaactcctctgttcacactcaggaaaactggtgcacctgtgctcactcagatgccaccagtgccctcaccctcacagcctccttctagcaaaccagtgtctgcaataaaacccactgctgcccctccactggctgaggcaggagctgctaaaggtctgcgttcagaacatcgggagaaaatgaacaggatgcggcagcgcatcgcccagcgtctgaaggaagcccagaacacgtgtgcaatgctgacgactttcaatgaggttgacatgagtaacatacaagagatgagagctcggcacaaggatgctttcctgaaaaaacataacctcaaattaggcttcatgtcagcatttgtgaaggcctcggcgttcgccttgcaggagcagcctgttgtaaatgcagtgattgatgatgcaaccaaggaagtggtgtatagagattatattgacatcagtgttgcagttgctaccccgaggggtctcgtggttcctgtcatcaggaatgtggaaactatgaactatgcagatattgaacggaccattaatgaactaggagagaaggcccggaagaatgaacttgccattgaagatatggatggtggtaccttcaccatcagcaacggaggagtttttggctcactttttggaacacccattatcaacccccctcaatctgccatcctgggcatgcacgccatctttgacaggcctgtggctgtgggaggcaaggtggaagttcgacctatgatgtatgtagccctgacctatgaccaccggctgattgatggcagagaggctgtgactttcctccgaaaaatcaaggcagcagtagaagatccaagagtcctcctcctagacctttaggaggaagccacacatcctacctatcgatcatgcaggaactgaaaaccactcttctccctgtaccctcatcaatcccagggctccgggatctgtgctccttttgaccctcgaggctttacagcctccatcattgttggcaaccacaatgtcgttatcaccgaaagctactacttcctcctgagttggctatcttggtggagctactggtggacgcaggatctttgtatattcttatctctgagcagcataccaagcccccatcccatattttaggcatattgcttttaacagccagccaggagagcccactaatgtcttagtgccctgggttcctgtcagggggccccatgcccctgagaagccaattcttgagaaattgaggctcccacctatgtgaatccccttcaaaacaccaggggcagtttccctttgaagggcttgcatcatttctgagatagagtggggaggcacgaacactcctaataccatttggacttggttgccacatgtgcatcattataagcacatgtctggttatgaacggtgagggccatctcctaggagcaggagtgtgcgaggggcaatggacaggatagggttggtcaccaacccaggatgaccccaatggataggcatgatggagtagaggcttcaacagagccttactttcccacacacctctcatctgctgatcctgtctgcagggaggccctccctctggtgccctgtcccaggaagaagcagggtccttaagaattgctgctggtaggggaattcagtgaattatgtaccaggtctagtgtttggtatgttgcaagttttaaaaatttctac

SEQ ID NO: 349 - protein, 406 aa, Mus musculus
VAAGPCIRCPPALHPAASAMLSRSRCVSRAFSRSLSAFQKGNCPLGRRSLPENDVITVQTPAFAESVTEGDVRWEKAVGDAVAEDEVVCEIETDKTSVQVPSPANGIIEALLVPDGGKVEGGTPLFTLRKTGAPVLTQMPPVPSPSQPPSSKPVSAIKPTAAPPLAEAGAAKGLRSEHREKMNRMRQRIAQRLKEAQNTCAMLTTFNEVDMSNIQEMRARHKDAFLKKHNLKLGFMSAFVKASAFALQEQPVVNAVIDDATKEVVYRDYIDISVAVATPRGLVVPVIRNVETMNYADIERTINELGEKARKNELAIEDMDGGTFTISNGGVFGSLFGTPIINPPQSAILGMHAIFDRPVAVGGKVEVRPMMYVTYDHRLIDGREAVTFLRKIKAAVEDPRVLLLDL

SEQ ID NO: 350 - DNA, 42024 bp, Homo sapiens
atatccctggagagctcccgaagctctgcccaagtgggacaaaggggaagggctgcctatgaggccagctgaggtgagactggcagctcacaggccatgtctccccttctgtgatgtgtacacatttagggaacagcaaacacctttgatgcgcttcagctgggtcacaagagaaccaatcaataaagcaaggtgggctatggagagtccttaggtaaaaggtacctcgtgaagcccaagagatgctaactcattctcatcactgtcattgaagctcaaatcagatttatacaagcagttttattgttatttccttgataaaattcctgcctggtttttgttgggaaaacatgtttttctttgcagtattttgttcattcatttcctagattcagttggattccaactggaccagccttgtgcttagtagatgaccacccaacgtgattggaaaggtatggaggaaaatgccttatcctgaaacagctgcttttaccttcatcaacactcattatgggatctaagggcccaccactggcatttcataataatgatgacttaatcacatctgtatatgaatacatttttgccttacccattgtactcctgaacagccgcccatccaaatacttgccagacagagctaacttttgctactgatgaagacttgttcagggtagcacatctcaaagtcacatagcgtttttatgcttttcaaaggcattttcatatacagccttgtcctgttttattctctatgatgagaggccccctgcactgtccccactctgctacaggtcggaggccacccatccatctctggtccagccctgaacaggctctcttcactgcactggctaatgacagaaatgaggagagggggtcagactgacaggcccaggccacacagccctgtccatccacagacacagacacaatggagtcagaagccctggtggtctgcatcaaccactgcatggctgtgaactatggaatgatctaccaggtattagacctggggggaatcgttagctattttttttttcttttgagatggagtctcgctgtgtcacccaggctggagtgcagtggcgatcttggctcactgcaacctccacctccttggttcaagtgattctcctgcctcagcctcccgagtagctgggactacaggcacgtgccaccatgcccagctaattttttgtatttttagtagaggcggggtttcaccatgttagccaggatggtctcaatctcctgatctcatgatctgcccgccttggcctcccaaaatgctggaattacagtcagtcgtgagccaccgcgcccagccctttgttagctcttatgtgaacttacacaaattaactctgccttttccccttcagtttctctggctgtaaaatggggttgataacagtcactctcttaggattgtggtgaggatcacatgtggtgggccttgcattctctggtgcgggaaataggcactccttaaactggtttcctttcctcctagggggggttcaggagcccccacagccatagaactccagagctggaaagggcttaggagcatctggtacagtggctggtctccagatttttatatttttagatgtcaaccattaataaaatgaagaggtcttctggccccggccaaggtgccagtcgcctcctgagatcctgtgccttcaaaccctgagagtccatatttttaaaaaaacaaaatgaaggaattaaggcttaaggaactagagagtcacctgcaataagtggatggattcgaaaaggccaagctacttctagaacagtatcccaccaagcttcacattgcagcatgtatgctgtatgcaatccatagcacttatgatgacattgaaagtgaagtttttgcagatctaggctgtagtggtggaatgcttagcatgggaactgcagtgtgaggagcagggttctgtgttggatttgacagagatgaagatgtattggaaatagttaataggaatgtggaagagtttgagttaacaaatattgacatggttcaatgtgatgtgtgcctgttatctaacaggatgtcaagtcatttgatacagtaattatgaatccgccttttgggaccaaaaataataaagggatagatatggcttttctaaagaccgctttggaaatggcaagaacagcagtatattctttacacaaatcctcagagaacatgttgaaaagaaagctgcagaatgggaaatcaagatagatatgatttcagagctttgggatgacctgccagcatcatacaagttttttttttttttttttttgatatggagtcttgctctattgccaggctggagtgcagtggcgtgatcttggctcactgcaacctctgcctcccgggttcaagcgattcttctcactcagcctcccaagtagctgggattacaggcgcccaccaccgagtccagctagtttttgtatttgtagtggagacagggtttcaccatcttggccaggctggtcttgaactcctgacctcgtaatccacccacctcggcctcccaaagtgctgggattacaggcgtgagccaccgcgcccggcctatacaaatttcctaaaaataaatcagtgggcattggagtggacctaactcagttttcattttaaaagcccccaaaacaaaagtagtttaaaacttatttaaaatgaataaaaattggtttactaaaaataaaaaatgaaacgaagaggaaagatattggaccagtttgagagttactgacattttattttgcaggtgaaggcacaaaaaataagtatacaaaagactactatctaccatcacttttatttcctctttaaaattttttcatctcccttcatgacacatgatttttatttcttaaagaatcttagctgggcggggtggctcacgcctgtcatcccagcgctttgggaggctgagatgggtagatcgcctgaggtcaggagtttgagaccatcctggccaacatggtgaaaacctgtctctactaaaaatacaaaaattagctgggcgtggtggtgcatgcctgtaatcccagctactcaggaggctgaggcagggagaattgcttgaacccgggaggtggaggttgcagtgagctgagacgtgccattgcactccagcctgggcaacagagcaagactccatctcaaaaaaaaataaaaaataaataaaataaaatcttaaccactttgtttttaaaagaataaaagggggaaatgcataatatgcaaataagtttagctttgcgaaaaactctttacattgtcttttctcatttttctaaaaaccaagggaaatgtcacaggctagcgttaggggtccgaggatcttcatgacatgcctttactttatggatgaggaaccaggagcccagagaggtaaggtgacatgcccaaggtcacacagcagctgcaatgcctccttgctctctaggaaaacacccctggacatcagagatcctttcatgtggctgtacaagcacttgggctgggagttaggaggtctgggcactactcccagtcattggccctaaagccgcatattctgcgtttcagcttttataaaatggagatgataatcatcccttcactgagaacttgggtgagaatctaatgaaagaagagcttcaaaagggctccagagatgcatacacagtattatggagtgaggaattagggagtgaaatgtctccatgtctataatttgcctgaaagtatttcagccaacaaaaataagcaaatacatatgaacaattgttaaatctaggtgatgagtataggggtgggtattgctatgctactctgtctacttctctgcatatttgacaattttcataatgttccataattttttaaaaagtactctggcaaggtaaatggaaaggatgatgttactcacagggaagaggtcctctgggaggtccttgtcttgggctctgtggccaggtggggccaaccactctagaagacggagcagcccactcttcaccagccctgggcagacagagccatggtcaggaagtgcttctggtttccctgcttcctctccaggcaggccgggtgcccgtggctgggtgaggggaggctctggccccttcttagcacaaggcactgtctgacagacccagtcttgctgcagccgctgactctggggacagtgggggctgcttagcgcagccaaccggcatggggggcttatgaatatgcaaattgaggccagctggttggctgcccccatgccatttctcaacgccaccccaactcaggtgcccagaaaagccagctcagagagggccttcctgaaatgccatctcttctgtctttgcctatggaccacagagccctttgaaaacttggggactgaatcacccagcttctctcattgctctggcctccagcgggaagctcctgacttctgctttcaaattccccagagaggcagctccaatatgaacatcctctccctgtccctcaagcatcctgagaagactggaatcagcccaacagcaaaccatggcatctcagatctgcaggaaggagaggctgcgtggtccctccctcccacagaggcctgaacactgctgaggaagctgctgctgggccaaaagcacccatccctgacagatctgggagaactcactggccaaacccacctactcccgaatgtaacccaaattttgccttcccctcctccttcagcttgagaagtggaggggatgttgtgaaatacagcaatgaaaattagtaaaccacagctcaactcatcaacgtggacaaatcctcaaaatacaatgttgactgaaagaagtaagtcacagaggctgggctcagtggctcacgcctgtcattccagcaccttgggaggctgaggcgggcagatcacttgagcccaggagttcaagaccaacctgggcaacatagagagatcgcatctgtaccaaaaataccaaaaaaaaaaaaaaaaagaaagaaaaaaaaatgtgcttttggtcctagctacttgggaggctgaggtgggaggatgaggattgcttgagtccaggaggcagaggttgcagtgagccgagattgcaccactgtactccagcctgggcgatagagtgagaccccattacaaaaaaaaaaaaaaaagggtgggcgcagtggctcacgcctgtaatcccagcactttgggaggccgaggtgggtggatcacaaggtcaggagattgagacctcctggctaacacggtgaaaccccgtctctactaaaaaacacaaaaaattagccgggcatggtggcaggtgcctgtagtcccagctacttgggaggctgaggcaggacactggcatgaacctgggaggcagagcttgcagtgagccgagatcacaccactgcactccagcctgggcaacagagcaagactccgtctcaaaaaaaaaaaaaaaaaaagaagtaagttacagaatgatacaggcactgtgattccatttctactaagttaaaaaatagaccaaaaaaaaatacccacacaaaaacatgtctagattttcattgtgtattcatcagtccattattttgaattacaactgaatgaagagatagacagatagatggaatctaggtatcataggtaacactgagtgaatatagggcatagtccctattttaaggagcccaaagatggaagcataggctatagccccatctactagctggccgataatattcataaactcataggcaaggatgtgaatgtatggttcagaacacacataagaaaaccgggggatttgaggtaaatgagctacttaatcctttctaaaaacacaccttttttcttatttaatttgaaagtaaatacatctttcattttcattttttatttttttctatatcagaccactgctggagacatctttttcttaatttaaaaacacaggcaaaaatgtgtatagaacataagcatattgaagctataatgaaaacaaggggatggttaatatataattcagtatagtagtggctaactgggtgtgatgatggaggagaccacagggaacttttccattccttcagctgggcagcaagtatgggaattccttttattatttttcttttaaactggacacatagatttttatatcctttttaatacgtattttacaatgaaaatgtttttaaaaattatcttttgggccgggtacagtggatcacgcctgtaagcccaacactttgggaggccaaggtggaggggtcactacgtcaagagatcgagaccatcctggccgacatggtgaaaccctgtctctattaaaaatacagaaattagccgggcatggtggtgggcgcctgtagtcccagctactcatgaggctgaggcaggagaatcgcttgaacccaggaggcagaggttgcagtgagccaagatcatgccactgcactccagcctggcaacagagtgagattccactcaaaaaaaaaaaaaaaattctcttttgagccctgccacaatttatattcataaactcttgccccagtagatggtgctgtgtcttgggaagctctaaatgaaggagtgccctagcttattgggttgcagcttggagtccatggaagctcgtatgtgaatctcgaggaaatcaatttcaacttttaccctctcaatgggattttgtatgaaaccatgctcgagtgtgtgtgtgtgtgtgtgtgtgtgtgtgtgtgtggtgtctttagactgtaatatctaagattaacttgggtgatcactaaaactccagaagtgctttgccacattataaccaggcttgaagtcttgaagcctctacatctttttttttttgagacggagtctagctctgtcacccaggctggagtgcagtgacatgatctcagctcactgcaagctctacctcccgggttcacgccattctcctgcctcagcctccctagtagctgggactacaggcacccgccaccaggcccggctaattttttgtatttttagtagagacggggtttcaccgtgttaaccaggatggtcttgatctcttgacctcgtgatccgcctgcctcagcctcctaaaatgctgggattacaggcgtgagccaccgtgcccagcctgaagcctctacaccttctataagaatctcaaaaattgttaaagactgtgaaagcctgtaatcccagcactttgggaggccaaggcaggcggatcatgaggtcaagattttgagaccatcctggccaacaccctgtctctactaaaaatacagtgacaccctgtctgacaccccgtctctactaaaaatacagaaattagctgggcatggtggcacgcacctgcagtcccagctactcgggaggctggggcaggagaatcacttgaacccgagtggcagaggttgcagtgagccaagatgagatcatgccactgcactccagcctgggcagctgagcaagactctatctcaaaaaaaaaaaaaaaaaaaaaaaaaaaaaaagaccgtgaaaggactgggtagctatctaagaaaaatattaacagcaacactggcaagaaattgccatagcccctgactaccgttcttggattcttcagctgtgtccaccaatgttgtaaacatggaagtatttagtcattccacaaatatttattgagtacctacagagtcccaggaactctgatgtcccaggtgttgtgtttggaaaattcaggaaaatagagagtggtctctttccacctgctgctctatgcagcatgggagacagacaggtaaacaggacattacaataaaatgcaatgtagaaacccagacacagtgctttggaagcatagaaaatgtatctgttaactctgccagaggggttaggaagggattaagaaggagatttaaaggatgactaggagttcctaggcaaataggaggaggaaacagcccatgcaaatagctcagcaaggctatggccagtagtgtggtttgactaaagctcacaatctgtgagaatgtggggagagaatcagaacataatcagaggcctgattatcaggtgcctggccaagttgaggagtttgtactttatcctacaagggagataaactttatctcccttgctttatccgaccaggagaagcaatgaaagactttaatcagaggagtgacaggattaggtttgcatttcagaaggatttcttttttttctttactttctttttttttttttttttgagacgaagtctcactctgttgctcaggctggagtgcagtggtgcaatcttggctcactgcaacctccatctcctgggttcaagcaattctcttgcctcagcctcccgagtagctgggattacaggcattcactaccacacccagctaatttctgtatttttagtagagatggggtttcaccatgttggccaggctggtcttgaactcctgatctcaagtgatccacccacctcatcctcccaaagtgatgggattacaggcgtgagctaccacaccaggctcagaaggatctttgacacagatataaaggatgatgggctagagaaagcgagagcggaggcttagaactgcttagggagcttttcaaataattcaggtgaaagctactgaggagttaattgtgggtagcagcagggcagagctgttttctctatttctagttaggactttggcccatccttccagaatttcagtggcagtgctttcagggttcaggtgagtgaaggcactgtaaaggtcctgatggaatttgaggccagcctgggcaacatagtgagaccccgtctcaatttatattaaaacataaattaattagaaaaataaaaaataaaggtcctgagggccaggcaaaatgcctcagataaagaaatcatcatgaacggcaccaagtggttcattcattcattcatacatttatgtgttactaattcagccagaggtttaaagcacatctttttcattaggaaggtgagccttaaaggtgaatactcaaggggcctgaatacttaaggaggggaaggggatgctatatgctttcacttcaagtcagcgggaagaatggcacactcaaagtggggaggtcagcctggcatggtggcacctgtagtcccagctactccagaggctgaggcagagggatcgcttgagcccagagtgtcgaggctccagtgaactatgaccttgtttcttaaaaaaacagctgggagtttatattctagggatagggtgacaaacgaacaacttccaaaatgcacaagatgtatggggaacaattagtttggctggaatttgcgttggggggagatcagaagctgttgagaaataaggctatagttggtgaagatatccgactcgtaaaaaggcaatgggatttagaaattcctgggattctgtttctttgactcggggttaggaagacagggaagtaacaagtgcctttttttttttttttaatagttaagggacctgagactgggggtggggggcaatgtcatctgccccaggccacacaagtgtaagatcaggcatgcatgtctgccaaggtttcagttcaatgtccgtgcccctcttttgctctcttcccaaggtacagaggcggaacggcgcggtgccctcgggtcccaagagagaagggcgccaagctcagagccagttctgtggaagggtaggggaaggcctgaccccgggggcaatgtggtggcgggacagtcgtatacaccttcaggagaaccacctcaggctgacaggcagtgcggagggccccaagagcgccttagggttgcctgctccagagagcgggactcctgcgctgcagccgggatactgggcgccgccgtgcgcccaccccctgccagtggttcgctccgaacacccctcgtcgggcggcgggtactgcggcccgccccacttccggttgttgtccggccctatatccggtgtccgcccgccctcggctcctccgccgtgatgctgtcccgatcccgctgtgtgtctcgggcgttcagccgctcgctctccgccttccagaaggtacggtctggccgagccggggccccgacgggtgaggagtctgttggcgggcagagaggcggcctggaaggcaggggcgcggcgcgccggccgggccgggcaccaagggcactgggacgcggaggccgcgcgggctgggcggcccggggccgtggttgccctcgggaccgttttgcggagcccagcggccccctgccttctccaggcagcctgcggggaacgtttcctgctgtaccccaccctccgcgcgggagctggggagccgcgcccgtccagatacttgactcagagttagggaggaggcgcggcggagtcctccggcgggattcggcgcccgtctcgtcttgctctgttaaaatcagtgggtattaatgagtcccgttgggaagttgagatagtttggcaggcccagcgtgttgattgggtctgccagcacggtgtgttgcatttaccttcggagttacgagattcacctgtcaccaccactgggacagctttgagcgtgtacttaaaagaaaaagctgggtttttttttcatcttgggtgacgtcgataatgtcttctttctcaacaggggaactgccctctagggagacgttccctgcctggtaagttctgcccttaccgtcacctaaaatgctctcctcctgggcagagcagtatgtgaggaactcgggggtgcctgtgtttctcataatatttaaagacagtttggttcagagagtagtgagacgcaatgctacataatcacgagctatcgcttattcatttagctcgtagttgagtttctactgtgttaggcactgtgctagacgctagggatacaggagtggatacagaagtgtacagttcttgccctcgtggagctcctaggctagttggatagtgtcagttgctaaacaagccaacaaaggcaaatttttgtaactgctgagaaggaaacgagggtggacagaagagccctttttgaggaggtgacttaaaagttatggccatggccgggcgcggtggctgacgcctgtaatcccagcactctgggaggctgaggcgggcggatcacgaggtcaggagatcgagaccatcctggttaacacggtgaaaccccatctctactaaaaaatacaaaaaattagccgggcgtggtggcaggcgcctgtagtcccagctcctcgggaggctgaggcacgagaatggcgtgaagccgggaggcggagcttgcagtgagccgagttcgcgccactgcactccagcctgggcgacagagcgagactccatctcaaaaaaaaaaaaaaaaaaaagttatggctagcagaatgtgacggagctaacccagtgaagcccaggagaaagagaatggcattcacaaagaccctgaggaagaaaagaggttggcagaacttaagagctggaaaaaaggtgatttggccggagtattttggttaagggagagagtggcaagagatagaagatggtatagagactgaaggagtttagattttatcctagcagttaaaaagaaaaaagtgtcatccatagctttttttctgttatatgcctagcctaagtatttgttgaatgagttgaccttgttgtgggctttctttgtgccaagcatttatatgagtgctttctgtgaattttttagttaatcatctcaaaacagtaaaaagtattttctctattttacaaatgcataacccaagacaagagagcttaaaagccttggccatggtcacccacccagctgttgataagccaggtctacctgacccatcctgaactcttaacccaccatgttctcatttactcatggactcaacagatcatttattgagtgcttactatatgccagccactgttctaggtaacaggggtatagatagactctagcctcgagattttatgggctagctggagagagagagcaaatatacatttatgctccgacaagggcataaattttggttactacgagagaggaattaaagggtgtgatgagagggtgggatgatgtagaccagcttgggaaggttgggaatgtcagtaaaggcttccctgaagaagtgacatttaactgagacctgaatataaaagagccaagaaaatgtattccaggcaaagggaattgcttgtgcaaaggttttcagacaggaaaggacttgaccagtgatagacatgggaagaagcctgtctggcaggaaagatagagtgggctggacggtacaggatcgcgtaaagtgtggactttatcctgagagttacgagaacataaagcccctagcacaatgtcggcttgtagtggactctcaataacaaacatgtttttcaagtgggaaccctgaacaatgtcagtaaacattttctccacttcataggtgggcaggacaatggaaagagccttgcacttggggatttgcatttgggctcagggattcaccttgggctagtcgcttaacctccaaaagtcctacttatatgaaatgggaataatggcagatggtcgttccacttcagagagttgtgagactgtaaaatcaaaatgaggtcattatgggaaagctttttataaaccctaaagcactgtacaaatgaaatttgctgtaggatgaactctgaattggactccaggttcccaaaatcagtgtgagccgccatctattctagttcaaaaacatactatgcttagaatttgcactgcatagtcattggctgctggacataaaggtgactggcttacctatcttgggatgcttgtgaggaggtgggcataagagagggctagctctcatttggtgtgtcctgagcccatggttcagaaagagttgttaatctgaaagaaaaaagacataagaaagaattcagaagaggcagctgtagttactagtcatcagttggggaaatgcagttaactatgataaggacagctggtgggcagaaagggtctctcaccttgttgagagtgaccagggtggaagacttcagaaaggcatgggaagtcaataaactgaaagatggggacatgattttctcagctctaggacaaactggagaccccgagcctaaagtagccaagtctttgctactaggattcaggtgataagatttccaacccaatcttttcaaacccagaccaaacatcctccttgcttctcaaattgggttatgtatagtcacaggataagccatcccatgtctttctcaagcttcagttgtatttgaagacttggcgagtagagacattttattatgaaaacatacaggaataatgaaaagttctggctttttaaggtagatgagattatataatcactttgggctgtgccatcaaattttttctctttcctccccagccaaacacatacccactcgatctcacatacccatttgctctctgccactaaggctactttggaaaagtttgagaagcaggactctatgataaagattatatccgttgccgttgatcctgctctgtctcagggttgggggtgagcagaccttttccattcccagcatgtatcctttgtgagataagagttgttggttaagagttattttgtttcttgcaggggtctccttatgccagggaccaggttaccctaacagcaggaaggttgtgtaagtatcactggggagtacagatatgtggccacgggttatttatttaaagacataaagttctaaatttgaccatctgatttcttcactggcctccagacctagaaattgaggtgattatgttgagtccctagactaacctcaatgttcacttttcccatgtgatgttccttgagcatcagctccgtgtcaggttttggactgggagtgtgcccactctccacaggtgtttggattataatgaaagttaagttggaatcctctttttatgggatatagaagggtgctcctagatattctgtttggatgtaagtgcagctgaaaggctcgaggttacatttattgtggagattgagagcatcctctcagtagcatagttactcatttttaaaaacagtaaaagcataaaactggttgagtcctgggactgactgactagtttggagggaatgctgttattgcataatgcagagtttggagaaaggctacccatgtgtgtttcagattaacttctgcgtatgaatgttgcttaaatgctgctttgcattccaagtgtttttgtggtggtgctaagagaatgctctctagtaacctgttcagcagctgtcaggctgcttactctacagggagaatcctcaaagtgaagaggtcagcggatgagcttcttacttactctacatcacaatgagggtttttgttgttgttgttttgagacaggatcttgctctgccactttggctggagtgcggtagcctgatcttggctcactgcatcctcagcctcctgggctcaagagatcctttcacctcagcctcctgagtagctgagactacaggcacatgccaccatgcccggttgttttttgtattttttgtagagatggggttgttttgccatgatacctgggctggtgtcaaactcctgggctcaagcaatccatccacttgccttagcctcccaaagtggaggatacaggcgtgagctatggtgcctggctgattttttaaaatttgagtaaatgttgcactcagtactagaaatatgaatcccggtgttattttggagggcagtttgatagtcataagtctttgaagtgtgtgtaccttttctttttttctttttttcaagatggagtcttgctctgtcacccaggctggagtgcagtggcgcgatctcggctcactgcagcctctgcctctcgggttccagcaattctcctgcctcagcctcctgggtagctgggattacaggcgcacgctaccacacctggctgatttttgtattagtagagacggggtttcatcttgttggccaggctggtctctgaaactcctgacatcaggtgatccgcccgactcagcctcccaaagtgctgggattacaagcatgagccactgcccggcctgtgtgttccttttcatctagcaattccatctctaggaatctatactgaagaactcctggtatatttatctcagatttaatatctgataatataaatattatcagatttatcttaaaatggcaaagagcaagggattggctaaactatagcatgttcacatgttcacactatgaaaagtgggaaaaagcaggttacaaaataatttcattttctactgtgtggtatgatcccattgtaagtattctttttgctatttctaatattctgtagtgaacatctagttatttagagattcaaaatgtattactcatctgcaatcaaatgaaaattggggcaatcatgactctctacaataaatacactaaatatttgaaagtaaataatgaagaaaaagtaaactttgtgtgggatcaccccaatcatgtcaccctaatccagtatctttgtgtgtgttgtgccttttttgtgaataaggtacccactttatttaataaatcttttattgtaaaacaatttttggttttatgtttttactaatagtattatatttacatgattaaaaattcaaaaagtaaaaagggtgtccatgagaagacttttttatccttgtcctctagccccccgaatgcctcttgggtagtggtggccaccactccgggttcctggatgacttgcagagcagcctctgcacttgcatgttacctgttagttcttgcctataggcatgtactttacaaggttacaaactatatgtagaacaatttgtattcttgtagtttttaaatatcttcattttttcttggttatacatagaccttatagttattttgacattataaaagtaaaaatacctaaagacaacttaaatctcttttacttttctattataaaaatgcttgttgtggaatattcagacaatcctgaagtgtaaaaagtgaaagtccccatccaaatcattctcccaaattgtgtaagtgtgcaacacataaccagagataccatatatgtctacatctctcacccctcagaggtaaccactgttaatggctttgtgcatacagggtgagctgattctccagtttatattatttactgtaaaggccatatcagtaaacgccttggtctttgaggttcgttttgaatgaatccagaatgtgttgatgtgctgttttctagcaagagaaccgagtaggagataccatatggggtttgtgtgtggtttttttgtttttgggttttttttttttttttttggcataacaccttgttttacttccgagttaaccttgttaatcttgctgccttatctgatctaaatctgttatcttgagggcagaaattccattataccttgcacaatggcttgtaccctgggcaggccgtaaatctatctcggatttagttaaggaagagacctggctggacatggtgactcactcctgtaatcccagcactttgggtaggatctttgagacccgtctgggcaatgaaatccatagtctacaaaaagtaatttaaaaaaattatctgggtggcatgtgcctgtagtcccagctacccgggaggcagaggtgggaggatcccttaaatccaggagtttgaggttacagtgaactattatcatgctactgcactctagcctgggtgacagagcaagactcttatctcttaaaaaacaaaaaaccaaatcaagaagctaagtcatttcggtctgcaaaggaccaaggtgcttatttttttattgaaagagccaaatgtaagtctgttttgtgagagttggcattgcattgcagcacaggggcctgagcatacttggggagctcaccatttaaggtacctgggtcgttaggctctactccagacctgctgagtcagaatccctgggggagaggcctagacaagtgaactttgaaaaagttcctccccaagtgacactgatggacacccctggtcaagagtcactgtttaaggggaaggtgacccatggggccttaactagactaaaatgtgagtggttcgcctgttaaaaggagttaacgtgtgtttcttttgtagcattaacaacagtgtcttcagtgttcgctttttcagaactacagctgtatgcagtaagtacctgctttcttgggaatggaattttatgggaagagcaacaattgattgagtttaattaaagaaaaatattaaaaaggaaaaatgaactacttatgattttcttttttgcatttttcctagaggatgacttggttacagtcaaaaccccagcgtttgcagaatctgtcacagagggagatgtcaggtgggagaaaggtaagatttagtttcctattttttttttttttttttttgagacagagtcttgctctgttcccagcctggagtgcagtggtatgatctcggctcactgcagcctctgcctcccaggttcaagtgattctcctgcctcagcctcccgaatagctgggattacaggtgcccaccaccatgcctggctaagttttttgtatttttagtagagacagggtttcaccatgttggtcaggctggtctcaaactcctgacctcaggtgatctgcccacctcagcctgccacaaagtgttgggattacaggcctgagccactgcgtgagccactgcgcctggctcctctcacttcttaagtttaagtgctatctaaaattctcccctcccctcaggatagttgtagaatttatagctctgccgttttctttacatatgtactttctgctggccctgtaggaaagggttcttataacatacctgccaaaatgggttttgtggctactggaggctccccgctaacaggtagccttgtagcctttgattgtcttttcagctgttggagacacagttgcagaagatgaagtggtttgtgagattgaaactgacaaggtaggcttatcttatattcgtaccagcttttcatgggcttcccttagttaacctaatgaaagaaacagggacttaaccattgtttagagataatttttaactagctctaacttcagttgtaaaattattggatttgttcaatttaaaaaaaaaacaactttttacatttaactttttttttttttttttttttttgagacagacttgctctgttgcccaggctggagtgcaatggcctgatctcagctcactgcaacctccacctcctgggttcaagcgattctcctgcctcagcctccctagtatctgggcttacaggcgcatgccacaacgccgggctaatttttgtattttttgtagagacaggtgttgccaggctggtctcaaactcttgacctcaggtgatctgcccgccttggcctcccaaagtgttgggattagaggcatgagccaccgcacctgacctgcatttaactttaaattgtttgctgtgtgtgtactatgtacttcatttagtagctttagtcttgtagtgtgtggtgagggggtggggagggtaaataagctgtttccactttttcctgtatcacttggaaacatattaactgaatattgcctgaatgtttctgagaaaggacagaaagtgaatcttcacagtagcgatgacttgttatcacccttgctctgaaattatggccttagatgtttgtgtgcaaggccttatatattgtgttgcaactcttgttactcactggagatacgctgttgttgttgttgttttgagacgtttcgctctatcacccaggctggagtgcagtggcacgatatcggctccacctgccaggttcaagcgattctcgtgcctcagcctcccaagtagctgggattacatttttgtagtttttagtagagatggggtttcaccatgttggccaggctggtcttgaactcctgacctcaagtgatccgcctgccttggcatcccaatatgctgggactacaggcatgagccactgtgcctggcttcattggagattctatacagctaattttctaatgctggataaacatttggacttcctccatctgtcttcctcttccagacatctgtgcaggttccatcaccagcaaatggcgtgattgaagctcttttggtacctgatgggggaaaagtcgaaggaggcactccacttttcacactcaggaaaactggtggtaaagaagttctcctggtggtcaaggtctccagtgttccctcttgggattgggactgagcataatgtgctaattccccgatatgtcaaagactcttgtcattccagctgcccttagttgagggaataaggggtaaatttatatatagtgtgaacttcaaatgtcaaattctaaaagaaaagtgtattttttaaaaaataaaccttatactctgttctttccatgggtgtttcttagcaggagctgagaaactggaccttttcttatagatatacagattgagcatacctaatctgaaaattcaaaatctgaaatgctccaaaactgaaaatccaaaatctgaaatgcttcaaaactttttgagcactgacagaatgctcaaaggaaatgctcattgtcttttatggggaattcagtgttgtttcttttcacatctgttctctcatatctctaggaagggttggtatttcttttgggaagaaatgagaaacgaatttgtactggacctgataggattagagattaataactttatctgactcttagttaaattttataaccactaaaaagtctatttctttttcctaagcgagaatcgtacccgtagaccaacgagtcacagaagtctatttctttttcactgttacactaataaggcagatagaccgcatgattgaggttagtcaggcaagaccagaagctcagagtagaaaacatgtatggtagaaggctgggaaataaggtagtcctcctgttgcagaagtttgtcttagcactaaccctggatataatgtccagatgggtgaaaaacagaaacaaacatttcatttaaagttgtgagattattacttggccacttcagtgatttatgagtcatcctggatgaagtgctttcttaagcctaagtcaaccctcgatgactattttattttttgagatggagtttcactctgtcgccaggctggagtgcagtggcctgatcttgattcactacaacctccgcctccggagttcaagtgattctcctgcctcagcctgccgagtagctgggactatgggcacatgccaccacgcccagctaatttttgtatttttggtagggacgggctttcaccatgttggccaggatggttttgatctgttgaccttgtgatccgcctgccttggcctcccaaggggagtaatcccttggcctgtaatcctgggattacaggcgtgagcaactgcacccagcctattttttaatagtattcttgcatatataatgttaaaatagaggatgaagagtatcagtaattagaaatatgtttatgtatgcatttcaatattttaaattgcctaggtgtttttttttttccttggaagtttacattttcttgggcttgataggtgctttgaaagtacttgctgaatttattcagtggaaacctgtgaaattgggaagggagctaagttgagccagttatctgatggacatttagggaccctgaggactagagaatagtgccttatgtcattgtgtgtgtgtctcatagtgctttgcatattgctgatacccagtagacattcgttacttgattggagctagagtttttgccactaaattttgcttggttgcttctcatttcagacagtgccagtggcatatacttttcttgtttttcagctgctcctgctaaggccaagccggctgaagctcctgctgctgcagccccaaaagcagaacctacagcagcggcagttcctccccctgcagcacccatacccactcagatgccaccggtgccctcgccctcacagcctccttctggcaaacctggtaggcttccaactcccacatgtcatgtgggagaacatctcgtctaatatgttccttcaaagggtaaactctagactgatgatggttctgaacaggccaggttggctgctttgtagaaagaattctagactttgtatccaaaggcctgctttgcatctcagctttctgttactagctgtgtgtctttaggctagtcacttaatttatctgaacagattgttcatctgtgaagttggagtgatactaatatacctcagaatatcttgaagattaagtaacagtacatatgaaagcactggcacaaactcagcagatgtttctttccttgtctgatgcagctttatcctcttttcattttcagtgtctgcagtaaaacccactgttgccccaccactagctgagccaggagctggcaaaggtctgcgttcagaacatcgggtaagcctctgaggaccactttcaggaaagaggcagggggcagtgttgagattagtggagtatgggtgtggtgatgcctacctttgaatgcctggcagctcattccctcaaccttgataaagggagtttaggatataacttcttcatagtcacataaccatcaaatgataggactagaacctgaggtcttctgaacacttgttcagtggttttcctactatattatgctaccagtgaaagccttgggtaagttaaatatttgtaggggtggtagcttagtaactcacccccgtcctcccacgatgtcacacgcttcagagaggtggtttagtgagctctattcctatacttctgggatacttagctgtagctaagggataatactcagtagcaatagctgtcaggtgcagacataaagcctcaaggaagtatggtcaggattgtggttcctctgcctgagaatacttcctaaaaatatgatagcctcgaaagtttgttgctcatgaggttctgttccacaaatagctattcttatgcaaatctttatcaacagaaagtgccctttttcttatgattcttatgttggctagactacactacactacattcttttataaatgggttttggtttttaaatcactgtttctgagccttcattcttggtcaagctttaggcacatctgagtgagtagttttggcctgtgtttgcatgtttttgcttggaggagaaagggccaccacaggaaagggaagcctggagctcgtgtacttagatactgtagtccttggccatctactcgtggcaagccgtgttctttctgactacacggggaatgcttgacccagagagatcagattgtcaatgcttgttccactcttactttcaggagaaaatgaacaggatgcggcagcgcattgctcagcgtctgaaggaggcccagaatacatgtgcaatgctgacaacttttaatgagattgacatgaggtagtgtctctagtccctcttatcccctaggcccctttttcttagagaacacgaacttgccccactccttatctagtgctgattctaaaactaacttgtcagggaagaggtatttgtttattgttttttgtttgtttgtttttgtttttgttttttgagatggagtctcgctgtctcccaggctggagtgcagtggcatgatctcggctcactgcaagctccgcctcccgggttcacgccattctcctgcctcagcctccagagtagctgggaatacaggcgccccccaccacgcctggctaattttttgtatttttttagtggagacggggtttcaccgtgttagccaggatggtctcgatctcctgacctcgtgatctgcccttctcggcctcccaaagtgctgggattacaggcgtgagccaccgcgcctggcctgtttattgttaactttcacagagtgagccgctggcttcttctctaattggctttcctaatactatgcctgcctcctccatgaccttaaccttagccttggctaggtgtagtggctcacacctgtaatcctggcactttgggaggccgaggcaggcggattgcttgagtccaggagttcaagaccagctgggtaacaaggcgaaaccccacctctacaaaaaatacaaaaattagccaggtgtggtggtgcacatctgtagccccagctacttggggggctgagatgggaggattgtttgaccccgtcacttacatattttcctaagtgattcagaatcgagtggatgaaaaggcaaagataggctgggcttgtctttcattttacccagctctgacagtgaaatggaaaacaagttgtgtttttaaataaccttagaatgttaaccaaaggtactaattcactaggtatgcccatttctgtagtgagctaattgttgacttacctgttttcttcaagatttcaatgtgttcaagtatcagcactgtcaggaagagaaatttgacaaacgtgttttgagtgcgtactgtatacagagtactgtactgtggaattcagtggggatagacgctgggcaccatggctcgtgcctataatcccagagctttgggagggtgaggaaggaggatcgcttgagcttaggagttggaaaccagcctgggcaacatagcaagactgtctctacataaaatttaaaaattagccaagtgagggctgggtgcggtggcttgcgcttgtaatcgcaacactttgggaggctgaggtgggtggatcacatgaggccaggagttcgagaccagcctggccaacgtggtgaaactctgcctctactaaaaatacaaaaattacccaggcatggtggcgtatgcctgtaatcccagctactcggaaggctgaggcacaagaattgcttgaacccaggaggaggttgcagtggctgatatcgcgccactgcactccagcctgggcaacagagcgagattgtgtctcaaaaaaaaaattatgtatggtggcatggacctatagtctcagctacttgggaggctcaagtgatcttcctgcctcagcctcccaaatggctgggaccactacaggcatgtgccaccaggcttggccaatttttttagtttttgtagagacaaggtctcgctgtgttgcctaggctggtctcctgaacgtctagggtcaagccatcctcctgctttggtctcccactgggattacaggcatgagccaccattcctggccaaaaaagaatttttaaacaggtcttcaagagtgactagcattttgtcagccttgtggagaaaggtcattccagatgatgttaacagtgtagaccatgagatgggaaagtagaagacacatttgagaaattgtcaaaaatcatttctgttgtgaggattttgtatagcaaagaatggtaaagaaggttggatccttatttcagaatgttttgaatgccagggtaggagtttatatttaattcaggaagcaagtcaagtctcaggtcatctctttctttctttttgtgcctgagggtttagtctgcgaatctacttttcattaagagaaatttgcttttctttgggaaagggtttgaaaaatagggagaagggagtgttttcttgataggtgcgctgtggcattgttcagagtagggctctgtgacctgttttactagatgtcatccattctgttgggaaactttccgaagagactggatgacattcaagccaaagatttctctcttgttcataggatgtaggggaaggaccttgactaatgaatcacaaaggctgcagcttatgtttcagtgcattagggccaaattgtacacaaattgaattggactttgaaattctacccagtttcttaagacaaaacatgtaaatatttgtggccctgaaagatgcagttggcccaacagctttgattggaaaggaagcgtaataagctggatctcctttcagcagctaatcaaggtgtcacttaacaatggcctgcggtccttgctgcagcctaatttggtttagatcgagtgccctttgggtcttgtgctgatcagctaacccataagggacctttctgagaccttctcccttcctctattgtcccagcctttgcctccaagggcagagctctgaaatagaagctacttaatgaccagacaataacatttgggcaggtttgagagcagagatgtttatcacatctctttccctcttctgcagctcttgtgtcttgggaaccagtaatgtctttagggtggtaatcctagcactaaataaggttagaatcaggaaaacaagcattttaaacccaatcagtcccccttggaaaaacttcctttttcaaaaacaaaagatctgaagggggctgttaaaattgtaccacatcttacctttcatgctaatgtcgaattaggccattagagggagaaagggagaactgagcatttggccctgagataaagttaaattcaattttcatcgtagaactgcattactgcattccgataaatactgaggtttatgcagcaaagtgatgggaaagccatttctcactaactctgcaatgtgtcattgaaaaaaaaccagtcccaaaagaataaaggctgctcatgttgtaaaggcttttcagaaggcttgctgcttaatctgaagggaaccagcctaaaccacaagtggccacttttctaaataccaaggaaatcacagccattaaactaatcttagggcaagaactatgtcttaattagctttgtatcttggtacctggccctgaccctcacatgtagtaaggtgttagtacctgtttggaagaataagtggatggaactgccaaccctggaaagatgaagaacggatatgactttccgtgggcctgaaagaacactgggttatacccttccctgcagagtcatgactgctttttcccgcatggagcctcatgtacccatgagctgtttattttagtctccactaatcaagagataggaggaatatcacacgggagttatactcagatttggtggggttttttttttttttttgtattctaacaagaaataaaaagaatattgcttattttgtagattttgtttatactttaaaaaattttttttcaggatggatagctcagttattcagggcaaggatgttggtgtgctgtgtgatctcttgttcatatgatgtgtcactgaaatctgtgacttctagaccatgaaggagccctgtaaagagatcaacccaccttaaagacagattgggcctgattcctgtagatttctttgtaaaagaacagagttactgtgttaacctcaggtagactatttcaaaacttgaactaaggtaatggtccagagtgagggaaaagctctcacctaattgtgtatatggattgagaaacctgtgtgaaagtcaaaatgcaggctttgtggtcagtttgttttgtaatattttcacagtaacatccaggagatgagggctcggcacaaagaggcttttttgaagaaacataacctcaaactaggcttcatgtcggcatttgtgaaggcctcagcctttgccttgcaggaacagcctgttgtaaatgcaggtgagttgcttgtggctggaattggagaggtcctgggaggtaggtgtatgagcacagacctgctcccacatgcagaggatcaacagaccaaggctttttatttgctacctatagaaatatcagtatcttccccagggatttcttggttcaccttcctgaagcagcatcatgattactttctacccgccagctgggcagaacagtttctcttcccagtgtacagctcggcagctgctcaggcagcaggcagttctgggatagcccagctctccaggctgtctcctgtcaaggtggaagcacgtgttctggcttcctcccctcccccagctccacaggccctgttaccttggggcctgacttccacagttggtgtaggctcctggctgacctttgatcttaggtcgatgggcctcactgggagcttcggcttggcctctcatggacctggtgcttattttctttcctttttacttacctacgtcattgtagtgttgacctaacaagcactttgttttcctgttgacacacttctctgttccttgggagattggagaggggtcagtgctacttttgccatcctcagcagtgtcaggggccctaaaggtctagaagtagaagccctagtccctcctgttgagtggtgctctagggaggtagaaggccatctttgttttgcccaaatgtatacctcttctttttcccattcttctcatgcctccctgactggctctcatctttttcagtggcccccttctgcttgcccacacatgtaggcggctctcaaaagttctcgtggcctctttttcacattacatgcttcctctggatgtcttatctaacaatacaacatggactttctgcggaaatgattcccaagcctttattttcccattagttgctaggtgtacattttcagatgctggtttgccatctcttgaggtagcatatttcaaagccagatcaccccgcttactcttggatctcccctcttcctcttgttgagagttggaagcagagaatgggtagtatctctatatcccttttcctttgctaatttgcccttttttggaacatttgttaaccctagtcattctctgctaaaggagggcttgactagagctacttaacgagagtttagtgcatacctatcctatggaagccagtgtgttgagcccttcttagggctgccaaagaaatggatgctcctatgcccaggctcagtcagggacttgggagatactatacttgggatgggagtaagtggaatgccagctgccatgcataatgcagtggtgttcatggtggttggtcagcccacactgtatcaagctctgcagatttttactctgttaatgcacatattacctcattagtcttggccttcctggggagttgtatgtaacatgtattttctctctcatagtgattgacgacacaaccaaagaggtggtgtatagggattatattgacatcagtgttgcagtggccaccccacgggtatgttggggcaggaggtggggaatgttggtcttagaccctcaccttatctgtgtgaaggagatcacacaagagaaatcatttctttaattctgtatttttagaagggagttagtaaaagtaaccttttttttcttttaaaccatgccgcattcttttaacactttctgttaatcacactgagtaatgaaggtattctagggagggcataccatgggttgaatcaagggagttgttaactataaaaggtactattaatttgcaactgaaaacagcttttcacccccttcagggtctggtggttccagtcatcaggaatgtggaagctatgaattttgcagatattgaacggaccatcactgaactgggagagaaggtaaagtagaaagatgtatacaagctgctaagcaggcgagggaagagagccttcagaaggctgggctcactagcaagcagtgctcatggaaagtcaagtgcatagcccctgagaaaagcagttgcccatgagagctaagtattttatatatctggtggagtttaccatgctctggtaactgaaatctcatcagatgagacctgctagaaaagatcatctttgaagtcttcaactgtatgaaattgtgccttttctctggtggagcactggtcatagacaccttagccgaacaactgtcacacggaagctagcgcttgtgccatcgatctcgatacaagctttctggacttcctttgcttttttgtttttagaggcagggtctcgctgtgttgcccaggctggagtagagtggtagagtcatagcttactgcagccttgcactcctgggctcaagcgattctcctgcctcagcctcccaagtagctgggactacaggtgtgcaccaccatgcctggctaattcttaagttttttatacagatgggggtctcactatgttgcccaggttggccttgaactcctggcctcaagcagtcctcctgcctcggcctcccaaagcgctgggattatggactgactttaggtgaaggaaactgggttggcttaatatttcaattatgaaatctgtttttaggcccgaaagaatgaacttgccattgaagatatggatggcggtaccttcaccattagcaatggaggcgtttttggctcgctctttggaacacccattatcaacccccctcagtctgccatcctggggatgcatggcatctttgacaggccagtggctataggaggcaaggtaggaaccgtcacttctaaggtcctagtggctaggtctcgatgaaagggaaatccaactaaatgctaattgtaaaacattaactataatttcaggcctaagttccatttcttagtttctaatagctaaggcactgattatcaaattgtggtctggatcagcatcatctgggaccttattagaaatgcatattcttagaccccatcccagacttaaagaagaagtgcagatgatcctgatgcatattcaagtttgagaaccactgagctgaggaggcttgtttgcttctatggagtgggggatatagttggaaacgtggtcccttgcccctgggaaacagatgacaattatgcatgtcagtctgtgagctgccaagttgtatgataaagcttgtaaatttcccgggagttcagagaattaagtattaaaaggggcttgagctggcccttagaagatacgttggtatcaaaaaagctttctgggaactcctgtgtttagaatccttttgggttactgactcctgtgtgaaaccacagtctgtagatcttcctggaaaatgcccatacacccaactacacatacaattccagaatttgtagaccctggcttaattttttttttttttttaaattctaaccccagagagaagcaagtacaggcagccagaactgaagggaaaactttccttgtaggcagcagatgcgttagagggcagagtatgtttttaaaaaataaaaggcagttgtgagaagacagttttcttggcaaactttgtttctgagtggggaagctttgcactgagggtaagtcctggtctttgaaatactgtaaatatgcagaggcaacatcaataggaaaggctctggaattaggaactttcttatgggctgtgctaaatctccttcagcgaggctggctgtggcttgctggagacaaacctatttacctttcctctctgtaggtagaggtgcggcccatgatgtacgtggcactgacctatgatcaccggctgattgatggcagagaggctgtgactttcctccgcaaaatcaaggcagcggtagaggatcccagagtcctcctcctggatctttaggaggaacccacacaccctacaagttgatcatgcaggaactgaaaaccagtcttctccctgtcccctcatgggtcccgggttagcctggtgacaggcagacacatgctgttggcctcaagcaaggaagcagagcactgtgtaaccagcagtcacaggtcttttcttggcgttcctgccaggctctcccctctctgcacctgtctcatagcctcgaatatcttaattccttaggcttaagagagagagccttaatggatgctcattcatattcctgcctttcttccatcagctctctgcaaagatgattttgcttttccctagtgctggtatactatagagaaacccctggggaccatgtgattaagttcctatcttttgaaagtttgttctgcagagacttctaggaggatgctgtgcctcccaagctcagagcagcctctgtcctggctgtgcacattctcccttgattccacttgtgtggagggattgaacacaggcaaagaggtgctgctttgcttcttcaatggcaccttcattctccgttgtcattgacttcaagatgcctcttctacctcttccaggaagcacaggccaggggatctgggtgtgtgagtgggaggagagggcagaggtcccctgaggtcatgcattgtaatcatcatagaaggagagcccaggcctgccctcacgctctccatcataggctgacaccaagaagactcgtcttggcacaatctcacacagctggggctgtagcaaccctttccaacccctttgctggttgctgggcctcattctagcaccttgttcttagagcagattctagcacatcatggcagtgggaccaagcgtggtcccgaggaagggccagagcctggtagagactagggaagggaggtctcctctagactgactcacattgccttgagcttttcagttaagttgctgtaagcacctgggctgaggaggcagtttttgttccttcctgcgttatagcggggccttgtctcttcctctgcaggacacagatctggaggacgtggactggggtaggaaaccaccctgagggtgttagtacctagtggtgaaacggatgaggtcatttctaaggtgtgttgcccgtggatctgggcacaatcattggaattccttggagccactgggattcatggctttgtatccaactgcatccaggcctgaggctgctgacgtttgacaccagggccagtagagagtgcccttttgtatcttaagccaagtaagtgaggcctgggggtgggggaggggggaaggggtgggagccaatactgagtgcctgcagcatctactactctgtcttcactattcagaacttgtaactaaagtatttaaagaaactgattttaaatgcaaattaaagggcagatattctcaaacagggttcctgtatctgttccttttggctactgaggtggtacaagtccccagcactgttgcactgaaattattgaaagccactcaaggtcctgttgcttattttgtgaaatcagaaatcccttatgtggaacttaacactcataatttgacagaaggtagaaccctgactgccagccgggaaagtgttgccaaaaagagtcaacctctgtaaaaatatttgaagagatttattctgagccaagtgtgagtgactgatggcctgtgatacaactcttaggagatcctgagaacatgtgtccagggtcgtctggctacaacttagttttatacatttaatacattttagggagacataagataccagtcagtacatgtaagatgtacagtggtttggtctggagaggcaggacagctcaagacctggggatgttgtcataggcagaatcaaagattttctgattggcaattggttgaaagagttattatctaaagacctggaatcaatagaaaggaatgtctgggttacagtaaggggttgtggagaccaaggttttatgcagatgaagcctccagccagcaggcttcagagaaaatagattgtaaatgcttctcatcagacttaaggagcctgttttaacagtaattccaaaagggaggggagtataatgaggaatggctggctccctcttcccaccatggcccgaactagcgtttcaggttaactttggaatacccttgactgagacgaggggtccatacagatggttggggggcttaggatgttttttgttttgtttccataaagcatcatagtctcttagtgccccaccttccttgagcctgtcaagccatactctagaatagagaatttggggtcaccatctttgtgaagccctttcaaaacaccagtagacttgcattttttgtgtgggcttacattatttcagtgatggatttgggaggagtgggggcatctcatttcatttggatttgatagccttgtggaccaagatgctcaaggtcaatacacatgaacaggtgagggttgatgacctaggagcagtggtcagtgagcgtgagtgtacagggtgggtagctaacctagactgcaggtggcaggtgtgatggagtccaggcttaaacacagccttgtcttttccagagtccctgtctgctgagctcttgcagtgaggccatccctctgtgaaggtctgtcacaggagggaagtgggtcccagagagtagaactagagctctagtagatagaaaaacaaattaggttgaatgaaaggaagaacaggatttggtgttagaagctttaatttatctatctggtaaacctgcaaaataggcattatttaccccattttatcgaaaggaggtcgactgtaagagctgggacccacagtattctaaactcagggcccaacaaagtgtcagatgtgtagctttgggtggatgaagcacagaagttccagaagggacttgtgcttcatgaagcggtggttggaagtggtccagcctgacttagggagagtagcagaaggaacactaacttgcaactctggctaggttgtgtccttaacctttttgagcttcagttttctcaggagctaccgtctgttgcaaggggtcactgtgaggatgaaactggtattcccccaggcaccatgagcctcttccaaggcttcttcatcctcttccccacagaacctggtcctccccgaccccaccccttcccctgaggcccacatggcatgctgctcaccaccagccctgcgtcctacttcctggcagccccaagctcgctcttgacttcactctggagcttctacaggggagccttccaacctgccccaatgagccgtggtcattgcatggaagaagcgagaacaccgtaggccagagcaggctttattggggccgtgtaaaccccagggagaggcaggacgtggaccacagagagtcatgtacaggctgcgctttcacttgtcttctctgtctcagtctcctgaagagcccgaggaagtcaagtctccccaccatgagtgaggggtctggtctgacagttgggccttcagagccaggcacgtggaccgtgtcagaagcgccacctggtggtgactgggatgctggcagggaggagctgagggcaaaactctagtggaaatttcccaggtcggtcccacgccccggtgacagggtgaaccctgagaggagcccccaaactggaggcaattgtctttgaggtaaccactcaccccagcttttcagagaccagaggcaagacatttctggctaagagccatggatagttgttccatgcgttttgtggtttcttatcccaaaagggcatgaagtcacagtaggcagtgacatggtaaacagccagggcctgagagggagtcctgatgggcacaccttgtctaaactgctttggcctggaagctgaattgctgtcctcttgcacccctggggcaggctgcccctcttcccccacacaggcccactggggaggaggactcttgattctggtttcagacttgctctaaggggcagacccatgcattccttcctccccccattactcttattttcttcccctcccttttgctctcccaagtctgaaatcacaagatagggggcatggtcaggaatcgggggtgggggggtgggggtgggggtcatcctgtcccctacctcatccctccctgcacaacagatggcatccctgcttctgggcctccccagctgcacgaacagcttctggtggaagaggcctactcgctgtgtgactaagaggactagccaggacagtctggtttgggtccactgagccagtggatcagtgtcctgagatgagtctccagagatgtcctgagtggggcacaacatggcagtgagtgagtcacagaacctcacagtagggtgcagcaggtggtcaacagctcagcgccagtgccacagaaggcaacctttaacatggtgagtccacatgctcaacgggtctgttgactgatgggtagatggttcaagctgcttagcagggcaagccttgactgcccccacctccagcttttccaggagctggcccttcctgggtggtggccataattctgaggccccagtgggagcccagcaggacagacagtgccctccattcctcgcccaaagcccgctgatagagggccagccctgggttgggtgtcaggcaaggaggagaggcgatccagaccaggccagctgcttccgtcacccgctctgccctcttaccccaccagcttgctccattggatggtactgaaaaagggatgggacttgagtttgctgacaccaccttctcccatgcccaggcgccgggtaggctcgaactgcagcagctgcagagagaggcccagtcagctgggccactccagctgtggaggcatggggtgacctccagggactccaaccactatggcctctagggggcctgctccctggcagcctggcccacagaacccccattttaccctgggaacattggtggtggttggccaccaacatatagaaatgtgttgcccctactgccctctgcacccacatcagacactgagcacgaagcacacgtggttcagacacagttctgtgcccctcccagcaccttcctcaggctaggcagctgcttcctctggccgggctacacctcacctcagtcagcagagaggccgctgggcgactgagccactcgggcagctggagctgggtgtgggcctggattcctgaagggtggctctgggacagtgcctgggaggacacagggaagggcctctgaggaggcaaccccaggaccgtctacactccagtggcagccaggattttttttccccatgtcacagcccatgaggaggatgacaataatgatagttgctacagccagacacagtgcctgatggctaagcagtgcctttatgttatccacgaaaggcaagaaacaggcccagagaggtaaagggacttgtgctgagttcagggtttgaacctaggtctcttggctccaagcttgctagaagcaactatcttgggttgcaatcagggcaggcactcttgggaatagtgatggaacttgtctccttattttaaaaatccacacgggctgttcatttggcagcaggccatggcatgctaccatcggggccaaggcagcggcgtggcaataaaagaaaataggacctctccacaccccagaaaggcacagctttgaggagcagagggtctgtctggagggaagtatgagcttccaggaacccccaggaggaaggccaagagctctgggctggagaggtgggaggagacaggaaaagagagagccactctgggggaaattgcagccaggactttcgggaccccgtgccatgggacgaaagcaggagggagcctggatggactggtcagctctggacttcagttcacgctgcatccatttcggctatttcctgctcaaatgcaatttggcctcccccttgctgcctacataactggcctcagttgcagtgttcagctcatgaggggaggacagaaggcagagccatcaactgttcccaagagtgcctgctctgattgcaacctgcaaacacaggttcccggagtgtttgcagggggatcttttgagctcttggctgacccaggctggacagggcagctgcttgcctgggtgaaagagcccctctctcccatcctccagctaaggtctgggggtgacagccaacgaggtcatgggtgggaggagtgaacagcgggctcaggatgattgaacagccttccagggaagaagggctgtgtcacattccgcgcttcctccaaatctgacaccacctgggcccaggctctctggcagaaaccttccctgaccatcccactctactcgtattcatagaagttgacagtctccttagctatagccaactaatgtgttgggagtgctaagtgtgtccctggcttcgggggcagttgtgctggtaggacagccaggcagtctctgcccagactggctggatggactaagcctggcccatcccacactcagtggcacccaccagggcactacacccagcccagccactcaccattcccgtcagcagttcatacagtagagacccaaagctccaccagtcacaggcttccgtcagctcggaaatcccacccacctctgtgggaacaagaacacaggtgtcccagcctcacctaagagggcctcttccattctcctcagcctacccagacaccacccacccgctctgtcattctcagactctgggcacaacccacacaaaggcacccaggtgctaaggcccaccctggcctccccccttcttgcctggggcgctgtagagattgtccacggcctccccgcagcactggggctccacctctgaccactggccaaaatatgtgagccggatgtgacctccagtgtgtgggaggaaaaaggaggggacagattgaggacagctgatacaggggagggggttgcagggcttcccccaacagtcatgcggtaggagccaatggccttgctgggcagaaactcggcaggggcacagcaccctccacagaggcacagcactctgaggcccacagagcccacagggtactcccaggagcctcggccaacagactccagcctaggccccctgaaaggctggctggggccagggaggagcagacaaccttggaggtcccctcgactttggggatctctcgtcctctgcctggacgctttgggggccaccccactgaggggtgaggagggcacctacctgcctggtccaggagcaggttcccggggtggaggtcccggcacagcaccccctgctcgtgcagcgcctccagcgctaccagcatctctgccgcccactgcttcacctgctcctctctcacactccaggtggccctgccacagccccggccggccccatctgctgacaggcagctctgatccatgcctcggccacagccccctagcaccgggccggccccctcaggaacccaagtgagcccccgagggggcccagcgtctgagttctggccagccctcctagcttgaaggtgcaggtggccacctggggcctttggaaggtccgaggagccagaggtgctggtcctggctgtgggttcaccttcagcctccctctggggtctggtggatggggcctccccagctaggagaaggttcggagaagtcctaggaggctccagggcgattctgtcctggccaggggcatggcctgagggaagcctcgctggggtcaggaggttgaggtgggggttgagctgagccttcatcctctcctgggtagagccagagctgagcccagaatgtcgggagtgcgcctgggagagcaggtgggaccagagagtgcctcctgggccatgcagagggagcggtgagcgtggggacagggagaaaaagagtatggatgccagggccggctcccactcctgcctcccttctgtcttgggcgcagactttccgcctctgggtgtcctggcctagttcagcccctcacctctgctccctcccacccctcagcttagaatgccctctgccctcctcttgacccaactaaagtgggcccagccttacaaactggcacaccaccgagagatgtccagcactatcagtgtctgtggtttgggtggtgggttcactagtgtgaacactgtttttagggagaccgatataaagaaatttaaagaaaagtcaggcacacacttatgatgactatatgtcatgaccccagatgtgcacctcactttaaaaagtcatcaatacaaccatcagtatctgctacatggcccagttcctgtcctcataacttcagtcaccaccaccctgtctggccactcccaagggatcggcacaacccggaaaaatgaaaagagccaacgctggaggaaacagcgacagaggagacagctgtgattctcacgcccacccacgatgtggacatccaccccaggatgtcccctgcccccttggtaccacacaggggcccacaacagcctgactggcctccagaaaggccgggtcccctggtctgtgctgtacatctggtgcaagctccgaccctccccagggctcagctttttttttttttttttttgaggcggagtcttgctctgctgcccaggctagagtgcagtggcgtgatcttggctcactgcaacctccacctcccgggttcaagccattctcctgcctctacctcccaagtagctgggattacaggcacgtgcaagcacacctggctagtttttgtatttttagtagagacagggtttcactatgttggccaggctggtcttgaactcctgacctcagttgatccgcctgcctcggcctcccaaagtgctgggattacaggcgtgagccaccacgccctgccagggctccgcattttaagggttgacgacataccccaaaggcctggggagctgacagggggccccaggcctgctcaccttgcacatgctccaggtgcaggaagatggagtcctcgctcacaaagtacctgagcagcttcgtcatgtaggggactccgtgtgggatgatggtcagccgctccctgctcaccatgtggcacctgggtaggctctgggagcagcagggcaggcagatcagccggggacaggccagagactgctgctgttaggggacctcctagccctggcttcaggggcacccgaatgagggtggagcaactgcctccctcagttcctgacctgtccttacccccactgcccctgtagaatctgggtcctccaccctctagccaaagagggggcagtgtgtgtgcatgtgtgtttgtgtgtatgtgtatgtgtatgtgtgtgtgcgcatgcatgtgtgtccatctggaaagtggggcatgttcaggcagaacaaccagcttttgtgggagggagtgcaggcttcaaatgcaggttctgggtaggagtttccaagagccctgagaaagatccaaggggaatgcagagtggcaggggcagggtggcacctgccttcaccacaaaggtccctccggttgccgggtcctggaccagctgcacctgccaaagtccaagaggcactggttaaggcaggtactagctcctggggctccgtgaccccagcctgaccccctcccaggttcctccactgaggctgactcactccagtggcagggcagggagggcgggctttggtggcactcctgaagcagacatcgatcctatcctgctcacccacccctgctagacctgtggtctcagatgctgcctcctccaggaagccttcccaagattacaggggctggggtccctaatctgcctccaatgctctcttagttcacccttaggagagcctcttcacactgtctaatctgtctcccactggactgtgagctcagtattcccggagccctgcacagtgcagggatgtagtaggtgctagacacatgcactgtgagcagcccgggccttggctcactgtgtgcgtggtgggcatgcgagcagaatgccctgccctctccctgcccacgctgggccaggcctcatgccacctgacgggagggctgagaagccctgttccacctggaccccagagatcagctgagaagccctgttccacctggaccccagagatcaactgagaagccctgttccaactggacctccagagatcaacccctcacccaaggccttagctagagccccaacatcctgcagggtctgaggtgtcatggctggaagggacctcagagccagtcacttcctctgatctcttgttttacaactgaggaagccgcagctctgaggtgactccaggtctccccagcgcagccatgttgtgtgggcttggcacgctgcgttcaggcctttttcccactccactccacccccttcatttacacacacccccatgacacaagtttatctatgtgaaaaacctgcacatgtactcctgactgcaaataaaaatttaaaataaataagtaaagtccgcttgagaggccgtctttggagagcagcctctccttcttgtgttggtttccattagaggcagacgctgtcaatcgcaaggtcagggccatgtttggagttgggcccttgactcatctgcatggtgggcaggggcgggccccagcataggagcgggcacatgggtacgtcgagggcgggaaggcagaggattcagcccaggtgagggcatgtggaggcaaggccagcaccctggggttgtgactccttggctgttggcctgccctgcggacattccccagggaggctgtggccagccatggtcggggtgggaactgggccctgaggccaggctgctgggcagtgaggaaggccacagcttgggatcagggtaggggaaggggcactgggcttcgatcctgggcaaattgaattgattttctcatctaccaaccaggaattccaaatgcctaccttccctacatctctggattgttgaagccattctgaaagcccttggtgagggccaggtgtggtggcttatgcctgtaatccctgtaatttgggaggccaaggcgggtggatcacctgaggtcaggagttcaagaccagcctggccaacatggtgaaacctcgtctctactaaaaatacaaaaattagctgggcatagtggtgcccgcctgtaatcccagctacctgggaagctgaagtaggataatcacttgaactcaggaggcagagttgcagtgagcctagatcaagccactgcactctagtctgggcaacagagacagactccatctcaaaaacaaaacaaaacaacaaaaaacaaaaaaccaagaaagcccttggtgagtggaaaggctgtgagaatgtcagtgatcacatctgccaagtcacatggcctctctgaaccttgctctttttaagtacaaaacggggtcatagcagcacttccttcagggggtcctgaagaggattctgttaaagcaggcaattcaggcagagcagcagcctgcacctgccgcagaacacacccttgataacctgtcgtgattattaccagtgtcatccgaggggaagcccaccctggctgtaaagtggttactctgtgctaagcactttacataggttgtttaattttatccccacaatcctgccaaaattcaggcctgagcctcagagaggttatgttgcctactgtcccactgctaaaaagtggtca

SEQ ID NO: 351 - DNA, 3004 bp, Homo sapiens
atgctgtcccgatcccgctgtgtgtctcgggcgttcagccgctcgctctccgccttccagaaggggaactgccctctagggagacgttccctgcctggggtctccttatgccagggaccaggttaccctaacagcaggaaggttgtcattaacaacagtgtcttcagtgttcgctttttcagaactacagctgtatgcaaggatgacttggttacagtcaaaaccccagcgtttgcagaatctgtcacagagggagatgtcaggtgggagaaagctgttggagacacagttgcagaagatgaagtggtttgtgagattgaaactgacaagacatctgtgcaggttccatcaccagcaaatggcgtgattgaagctcttttggtacctgatgggggaaaagtcgaaggaggcactccacttttcacactcaggaaaactggtgctgctcctgctaaggccaagccggctgaagctcctgctgctgcagccccaaaagcagaacctacagcagcggcagttcctccccctgcagcacccatacccactcagatgccaccggtgccctcgccctcacagcctccttctggcaaacctgtgtctgcagtaaaacccactgttgccccaccactagctgagccaggagctggcaaaggtctgcgttcagaacatcgggagaaaatgaacaggatgcggcagcgcattgctcagcgtctgaaggaggcccagaatacatgtgcaatgctgacaacttttaatgagattgacatgagtaacatccaggagatgagggctcggcacaaagaggcttttttgaagaaacataacctcaaactaggcttcatgtcggcatttgtgaaggcctcagcctttgccttgcaggaacagcctgttgtaaatgcagtgattgacgacacaaccaaagaggtggtgtatagggattatattgacatcagtgttgcagtggccaccccacggggtctggtggttccagtcatcaggaatgtggaagctatgaattttgcagatattgaacggaccatcactgaactgggagagaaggcccgaaagaatgaacttgccattgaagatatggatggcggtaccttcaccattagcaatggaggcgtttttggctcgctctttggaacacccattatcaacccccctcagtctgccatcctggggatgcatggcatctttgacaggccagtggctataggaggcaaggtagaggtgcggcccatgatgtacgtggcactgacctatgatcaccggctgattgatggcagagaggctgtgactttcctccgcaaaatcaaggcagcggtagaggatcccagagtcctcctcctggatctttaggaggaacccacacaccctacaagttgatcatgcaggaactgaaaaccagtcttctccctgtcccctcatgggtcccgggttagcctggtgacaggcagacacatgctgttggcctcaagcaaggaagcagagcactgtgtaaccagcagtcacaggtcttttcttggcgttcctgccaggctctcccctctctgcacctgtctcatagcctcgaatatcttaattccttaggcttaagagagagagccttaatggatgctcattcatattcctgcctttcttccatcagctctctgcaaagatgattttgcttttccctagtgctggtatactatagagaaacccctggggaccatgtgattaagttcctatcttttgaaagtttgttctgcagagacttctaggaggatgctgtgcctcccaagctcagagcagcctctgtcctggctgtgcacattctcccttgattccacttgtgtggagggattgaacacaggcaaagaggtgctgctttgcttcttcaatggcaccttcattctccgttgtcattgacttcaagatgcctcttctacctcttccaggaagcacaggccaggggatctgggtgtgtgagtgggaggagagggcagaggtcccctgaggtcatgcattgtaatcatcatagaaggagagcccaggcctgccctcacgctctccatcataggctgacaccaagaagactcgtcttggcacaatctcacacagctggggctgtagcaaccctttccaacccctttgctggttgctgggcctcattctagcaccttgttcttagagcagattctagcacatcatggcagtgggaccaagcgtggtcccgaggaagggccagagcctggtagagactagggaagggaggtctcctctagactgactcacattgccttgagcttttcagttaagttgctgtaagcacctgggctgaggaggcagtttttgttccttcctgcgttatagcggggccttgtctcttcctctgcaggacacagatctggaggacgtggactggggtaggaaaccaccctgagggtgttagtacctagtggtgaaacggatgaggtcatttctaaggtgtgttgcccgtggatctgggcacaatcattggaattccttggagccactgggattcatggctttgtatccaactgcatccaggcctgaggctgctgacgtttgacaccagggccagtagagagtgcccttttgtatcttaagccaagtaagtgaggcctgggggtgggggaggggggaaggggtgggagccaatactgagtgcctgcagcatctactactctgtcttcactattcagaacttgtaactaaagtatttaaagaaactgattttaaatgcaaattaaagggcagatattctcaaacagggttcctgtatctgttccttttggctactgaggtggtacaagtccccagcactgttgcactgaaattattgaaagccactcaaggtcctgttgcttattttgtgaaatcagaaatcccttatgtggaacttaacactcataatttgacagaaggtagaaccctgactgccagccgggaaagtgttgccaaaaagagtcaacctctgtaaaaatatttgaagaga

SEQ ID NO: 352 - protein, 451 aa, Homo sapiens
MLSRSRCVSRAFSRSLSAFQKGNCPLGRRSLPGVSLCQGPGYPNSRKVVINNSVFSVRFFRTTAVCKDDLVTVKTPAFAESVTEGDVRWEKAVGDTVAEDEVVCEIETDKTSVQVPSPANGVIEALLVPDGGKVEGGTPLFTLRKTGAAPAKAKPAEAPAAAAPKAEPTAAAVPPPAAPIPTQMPPVPSPSQPPSGKPVSAVKPTVAPPLAEPGAGKGLRSEHREKMNRMRQRIAQRLKEAQNTCAMLTTFNEIDMSNIQEMRARHKEAFLKKHNLKLGFMSAFVKASAFALQEQPVVNAVIDDTTKEVVYRDYIDISVAVATPRGLVVPVIRNVEAMNFADIERTITELGEKARKNELAIEDMDGGTFTISNGGVFGSLFGTPIINPPQSAILGMHGIFDRPVAIGGKVEVRPMMYVTYDHRLIDGREAVTFLRKIKAAVEDPRVLLLDL

SEQ ID NO: 353 - DNA, 24231 bp, Mus musculus
  misc_feature (1)...(24231): n = A,T,C or G
tgattgcaagccagagccgggagggttaacctttttccagaacatttatttcaccatctcactgactagagagggaggaggggctggcgggcgggcgggcgggcgggcgggagagcctgccgcgttgagaggctgcggatcacaaggccattctgatagcctcctgtccccatggcaactgcaacggcatttatcagttccttctgcgcacaggcaccgcaaatctgcattgcacatggcaggcttccagcatttcaaatgaaagagcactttgaacggctgccaagtttggaaggagcagaactgtcagggctgcttaaagctggcagtttatactggggaggttttcacttcccagaatcctccgggcttggcaagctgccaagtacttagcggaagctaaaaagtaactcgctccnnnnnnnnnnnnnnnnnnnnacacacacaccattcaccgcagtgctctcaaaattttccacatgtcctgtgtcaccagtgcagactgtacaataagaaccagaacaccgtctgtccacgatcgggcttttctcaataatggagggtttagagtaggttcagaccctgacagcgggttcccgctgtacctgccttaaccccataaccactggatggaaacgcatggcatgtgtgcctttcaaccttaaaaacaaaaaacaaaacgtgcattaataaaaaaaaaatagaaagcggcttcagaactagaaacaccctaagtactgggtggggtagagcatgggggcgggaggagggtgctgggtggacagaccggagctgcatggggtgtggagagtcttggaaacgaatacaaaacgtccacatccagcttttctaagccgtggggaagagggtggttactgagagctgaaccgtttctggccgctttcttggttctctcagacgtcatgatgaaagctcacaagctcgagatggggagggaattgggagatgatttttcaatgcaaagtttaccagataactttgaccctgcaccacccaagagcacccagagcacccgggcttctactggcagaaagtgggaaccgacacaatttttactgtgctaatttttttctttctttctttacatgaaaatctacactgagatcaagggcttgagctttatttcctgcacaaatagaacaaaaattgtctgccgcttaggcggttggatagagttcaggaaaactatgtctggcattaattccaaagtggaggttttggttcaagcgaggcccattaatttcagtaaactgttttcactggtccagaccctgctgtgtgagcactatttattaccttttgctaacctgatgtctgctgagttgcaaagcagaggggagggggaatccggggtggagatatctctatcttggatcaaatggctttgcaccttcccgttgggggtcatgtttaatagagagttctctaccctggcttttctttatcggagccttgacctccccccccccaaaaaaaaatccatcttgcaacgaattacagaaaaacaaatctgatggagagagatctggtgagtgcacatagccattccttccccatttcagaaaggcacatcccagtcccgggggatgtttttgtgcccgcccccccccctcccccaggctgcaggtccagggcaaagccctggcgtgattcaccctgacgattgggtctaaatccaccaagacagtcaattttggcattcgttctcccttaggaattttactagctgccttagaaaagcacataaattagtccccctccctcttctttttccatgccttcgccttcatccaccagcactcccccccccccccagtccatcttgatgtcatttcaaagagaaggatgaaaagagagaaaagaagggatttgtcaggcagtccagtctgtgagtatgtcttgccaggccccaacgcgcacgcgcgcgcgcgcgcgcgcacacacacacacacacacacaccagctgagaatgctaataagaattaaaagcaagtcagtactattaaagcatcaaatttgaagagttgaaagaggaggggggcttggagaaagagagggggtggggtggggtgggggagagggaatgggaacgaaatacaattgggtccttgaagctgagaaggaaagaggtgtcagtagccccatttggtctgcttgtcaaatgtcaaatgtcaaattcattggtctctctccttttaaactactccccctctcgcggccccgccccaacagtcaagttctgtgaggttcccaagtgtgattaatctttggcagaggccagaaacaggagtaggcttcttggctgcctgtcctgataaacaatctgttcttgggaagagtaggtgaaggggctgcgggaggtaatctgcgggcatgggagagagggtaggaatggggggggggggggcaccgcaaagcctgccctcagggagaaatgcaagtgcccctcctcccgcaccggtggtttaggggtaggtcaggtttcctgcccttaatagagtgggtagacagtggatcttttcttcctgccagttcctaatgtccagggcgcgccactgggccacggaaggcttaaaggagaagaagagagcaaaaccggtgcgcgccacacggtttcggaccatctacaaagctgtgctctaggcgcgacagcccatcccccagcgcgtgggcgcagaacctgctctcgatcaagggaaaccaaggcagtagcagagaatgccgagttggggcggccgctgtagagcttattataaagcataacgggggaagccagactgtgggcaaaacaaaaggagagactatttggcggagtcggaggtcgctgggatcgaaactcccgaggcaagaaagctggctgtggattttgcagcggggatattgtgtgagcaaccaggcagaaattggcaatatgtaaaagtgggaggggggagagagtgggcggaaaggcaaatcagtgcctagaaggctgcgcacggctgggaaatgtcaccaaggagagcgcagtggcaccgaataaaagatgaatgatagactaccttttggaaaacgaatataaaaatagtattgaaggtgagaagtccgcctcttcgctgaaaagcggatccattccgcactgcttgccttcaagccccgacatccaggcagctctaatctcccttgtatccaagaagtcagggccaggctcgctttccttcgggtttaattacacgaaaatgctgaacaaaaaccctgtaattacacccttagtccccgccactcaggccctgcgcacttcctgcctagttttgtttttttgatttttgttttgttttggttttttgttctctctttttttaatttttttaaaaagaggggtcattgcctctttctttgcaaattggccaaaacaaaaaaacctaaaggcactaaataaatctttaacactttaacagctttgtcttcatccacatccccacaaaacacacacacacacacacacacacacacacacacacacacacacacacacacacgggaggggaagcccttgtctctaggagagcccagaagaagggcccaagtgtgctatattgtcttgctcccgctcctaggctgagatgagaggcagtccttgcttattttgtctgtcacaccaacaaggtgctaggctggtcacctcgaggaaacctgccaaggaacaaagaatgtggaggacagggtgtagcaccaggcctgactttcctctttcacctggaagggttgagtgctggacgagatctgggtcaggactggcctttttacctgccctccaggcctccacattacagtcgggaactcgaagggatggtctgaaggcagaacataatttaggacggacaggtgagaaaccaaagctgaagagaacaaacagattgctgccggagtcagtcccactgctgcaggaagtcctgcacagtgttgctgcctcttccggctttggggggctactgcatcaggaaactaggacacctaggagcaatggaagctggctccattctgggctttagatacccagcactgagacagaaagtgctaagaaccaggcctgatcgtacagatctcttagtccacagccactgtggaaggcgaggcagaagaccacacgttcaaaacctgtgggctacagaatgggttcaggatgagcctagacaacgtataaggatccaatggaaacatgaaaaaagggctggagatagggcactactctgcgtgctccaggctctaggttttatccttggctagggggcagtgctctctaggtaaattattgactaactgaatagaaggcagggggctaatatgctacaaccctccaggctgcaggggcaggtgcatttcagtacacttaggtaaaagcaaaagggtattatgcctgggacgtaactttggggtctggaaagagacctttcccacaatgtgtttgttttccaatccatgtttcttattttcctccttcgccgccgacttggttcactgagttctttctcactcattttcctttcagtgctggggttccaaatcaaggccggccttgcacgggataggcaatgctttcccattcagctgcactctctagtcccagacacgtacattttaaaactgtcttgagggcaactgggcagcttcctcagcctttcagcctttgaggtcaagaacttcacattttcctctatcacccctgcctgcggccagggcacagaaatccgaaggagtgagagaaaggtgtctggggattgctgggaaagggtggctactcagtgatgctctgagctctatagtgattgattttttttaactccaagacaactggtgctcatttatacctcaccttgcagcctacagagacagtgggaccattaacctgtagagtcctgtgggcagaggatttttcttcttgtgtaagcttcctagatgaatctgggacccctaaagggcctgcttttgctaactctggatggactacctctggctcagcgtccctcacctgtacaaaggctgacgaaaataacattcacctcagaggcttgggcggagaacagtgagataatgtctggaaatgcacttttggagccctggacaaatgtcagttattggtaataatctctctcacattttattaaacatactataatacgctgtcatccgcacagaccaatgagacaggcaaaggaagtggagtaatagctccacttttactcagaacatgaagtgcaaatgatttgctcaaggtcagccaagtccaaggttaacagcataatgtaaatatgtaccaagtaccgcccctttttcttgctctccctccctccccctctctctgcccagtgagttccaggctgaactgctaagcacaggcaagcccatagacccatggacccaattcaaggaaagcaatgatggctgtcctgtaccagccttgacccaggaatggtgaggacctaggaggagctttctgctcgggagacctcactttctggctgtccaggcagaaaagtgcctgcggcaaaggctctggcttgtggaaatcccaggattattgtagactggtgggaacttccctttaaggcccagggctcctagaagtagagggccaaggggaggcacacctgtggtcttcatggccactgaccaccgcgacaggtcccgcctactcgaagccttccttcctctcaagtttccttgttgggggtttgaaaatttgttccaactgaatcagtgaatagcacccttgtctggatcttccaccctcttcctctaggcccgtttccctggacagctcatttcagactttttttttttttttttttttttttggaagtaagaaacacaccagcttttgcggggagctcctccaaaccctggcacgacagcaagaagaggatgccgggaggcaggaactagtctcgactaccccctcttctgcgcctttttttcccctccctggtctccgcccctccaggaagaaaacagcctgagaccggatcggtttttcggccactgtgccaaccccaacccctctgcccgcccgcccgcccgcccgcccttgccttctccccaatttctctctaagtgctcgacttgcccatgcgcccgaggctgggcaggtcttggcgggcggtgcaggctcagctccccagggcttctcagcgaatcacgttgttcctgggatttcatgctctagtggctcttgtgtaaccctatgccctggactaactcaatactttttttttttaataccaagattaatcctttagggaaaggcaaatacttccgccacggatccgactgaggagtaaatgtgtaaatcacacagcagcctccagcccccacagcccctttgccctgggggtttgcaaagctcaataaccggccgcacccctggggttcctggcgcaaggcgattcctagcctcgccaaggccaaaggagggcccagcccacaggtttgttttcaactactcttaagcggctcgcaggccaaagaacagggcactgcttactgtgtgttaccaaaaaaggcttttctctctgcggagcgcttggcggcgcgctttgcagcggggtgacgcgaggttcagcctcggcctggagagcctgcacgccaagagcacccctgaccccgccccatttgggttccaaactgagggggcctttgagggcgggccggagtcgccgggatgcatggaagtgctgaagatcctgacaacccttcacccgcctaacactaggcaatgttgctccgcaaaggccaagtggaaagctgaccttttgctctagtttagatcagtgttgtctgagctatcttagatggaaagctgagaagaaaacagctattaagatggaactttgcgcggggcgtgatggcccacgcctttaatcccagcactggggaggcagaggcaggcggaggatttctgagttcgaggtcagcctggtctataaaatgagttccaggacagccaggtctatacagagaaaccctgtctggaaaaaccaaaaaccaaaaccaaaaccaaaaaaaaaaaaaaaaaaaaaaaaaaaaaaaaggaactttgctttgtggggcttcgggctaacactttataccttgctctacaagtctctgtagttggttgtgcccccagaacctagcgccagagttgtgtctctgcttcccccacttctcacctcccttgattagtgcttcccaagagatcacagtactgctgcaagagcagaggaatgggcctccaaacactggagttctcacctccccaattgctgatgcatccacaaacagggctgtctgagacacgcggttaagaagcaatttatcaccaagaaagatggtgatactttttgaggggggatggagagctgtgatttttaaataaaaggatcatgagagcgtgggttgtgatgggattgtttaaatgcatgctgatgcgtagctgtgttcacaaataccttgttttggggtgtgtgtgtgtgtgtgtgtgtgtgtgtgtgtgtgtgtctttagtaaaaggagtcaagaagatggggacatatttgtgtgtgcacccaatgtaacactgtgacatggaactcagcttgctttctctagctgtctgtctgcagggctgtggctaagctgttatttctaaagtggttttggtttaataaagagaaagataaataatgtaaagaaatgggtcaaccagccaaggcaaagttcgggctggtagggatggactgttttcaccagggtagtggtggcatgaggaagggtgacttctaagggtgcagagacactcctgagcagctcgccacacagcactctgcttcaagccagccaggctaagttgattattgctctggagcacacagtgagctcactgttttttttttaaaacagaaactgggttgctctgagatgaaagcagctccctaagggctcttctccttctccttgcaagctctcccttccgttgcacttagaacccagaatgaagatcttgatgctgggaaaacgcccgaattgcttctggagatcaagtgtcaaaattaaagtatttcttgttgcttcaactgactgtaatagcggtcataagtaatgatcataatgcctcatgcaccttaatactgtcacaggttagccagtgacagtagcgagatcatcagcactagtgtctgactgtggcagtttcctgtgagtgcaatcatgaggtcttcatactgtttggtggttcatttatgcttcttcagtctgcacagcgacatcgtcacagcttctctatgtggaagaattcagtagtacagtctggagttggaccctaagggctcattatgaaggggcacttgcatagcactttatatacaaggttgtatgtaacaaaaaaatgggatgctgatagaaaatcttggccccctacatcatcatgtctgggagtcttagcttgtgtgcaccaccacctctcaaaccaaacttactggatttagatcccagaccagctgctgcaataacttcagactctctattgtcctagtctgcaaaatggaatggaacctactttgtataaggcattacaggtttaataacataaatacctctttatataatgtatctatattatagtgaaaacaataagctgaagcaaaggaattacttgcctagtacttatctttttacctgtctcagagtagtctgtcacaaacacaaggcacaaaatgaagtctccaacaacccatcaagctgagataattccattttgcagaaggaaagtattatataaacagagctcaaggttacaaagcccggggtagcaacagtgaagaaattccaacccggtaggcccaacccagccttatcaaatcccctcccccccaccaccagacttccacagggattatcttaatttacataagaaaaaagcaaactcaataaatagaaaaaccaagggaaatgctctggtcagagctcagaccaaccctatcagtttttacagtaagcaatgatgatgggagatgatcttagaagagcgagggaaatcgtgacctctccaagtgcgctggggcagtgtggaaagaaatcacaacacacagaaggaactttgaaaactgtctatgctttatttatgtatggttctaaggatggagctctgagcctgggtcattctgaacaagccctccctcggtctagcacccagtattgttaaatgcccccccacccccatcccctttatgaaacccagaaagccactcacctgtttggccaattccacactcccccttccctgccctccactgcagctgtattcagaaggtctctgagtgctcatagcttctttagacattcggtcaaaatatgttatagagttcggccagggagagggtggctcatttaacgcctttctctcaactccgcttccattcttaggctgagtcgcaaaagcaaatctaaaaaggtaatttctggaagattggggaaatgctaattctgcaggtgtttgggcaccaatggtggcaaggaatgtaatattaacaggggagggagctctcattgcagattaaataggtaatacctttatatgaaattcaaagtgaaactcgtcgaacagggcatttaattttacagcctggggctttggtggggtgggaaacggggaatcggaaacaacactcgtggctcttaaatgttttgttacttgggaaagcaaggcaggaaaaggaaaggtcatcgcctgtttcatcccgcctccccgccccgaaccccccctcctccccgcacccaaaccctggacttgcagctttagctcccggggcctcagctgtggtacacacaccgccgaagaggggggaggggaggagagggtggaggcgcggaggaggggccgacagggaggaatctgggcatgctgccgcgcatgcgtctttcgcgagcaacaagtgggctccacagacagaggaagtgtaaaggggggggtgggggactggtgcagagcatggcggtgacgtcagcgctccgcccgggcggcatcccgcgcggccaagccggggacagcgcgagccgcagcccgagcaggagcgctgagacgcgcctccggaacgtagagtaacaatcacaaccccacattccaggcgagcgagagcgggaagggatgcgacccgggtggaggcgccgagcgagcgccctgcagccaacgtgagcgccgccagcctctgtggccggagaggtgctcaggccagggggcggtgggagcctgcgtgcgtgcgctcctctcctctgctctcgtgtgtcttggaaacggtggccgcggcggccggctccctccggcgtgcaaacccagacgccgccagcgcaacggccgtcgctgcggaggggaaacgctcctctcttggcagccaccacctcctcccccggccctcccggggaatcagcggcttcagcaagattggacctgggcaccgggtggcacaaccttctaaccctctccccggggcgcctggcgtagagaggactcagatcgtagggggacccctccgcgcttccacgcttcaatcactccggggagggggccaagaggccactggcagccggccccggacaccgtagccccctccccccagacccggagctcgcagccctgatccgccgcaccaggaagaaggctcccggtgctcttctctggaccagacagccgcagtaggaggtgggggcgaggagcgtgcggaacccgtcggccgcctgggtggtggagcccccgccgagagagaggcactgctgcgccggctgtggagactcgcgctctctcctgccccaggggcagaactttctcgctcccctccgcccccctcccccgcagctggacttcttccccagccagctagtccnnnnnnnnnnnnnnnnnnnnnnnnnnnnnnnnnnnnnnnnnnnnnnnnnnnnnnnnnnnnnnnnnnnnnnnnnnnnnnnnnnnnnnnnnnnnnnnnnnnnnnnnnnnnnnnnnnnnnnnnnnnnnnnnnnnnnnnnnnnnnnnnnnnnnnnnnnnnnnnnnnnnnnnnnnnnnnnnacagtcttgctacctgtgcgacctgcctcgcatgccctgggccatgatctgggacttctccgaacccgtatgccgtggttgcgtcaattacgaaggcgccgaccgcatagaattcgtgatcgagacagcacgccagctgaagcgggctcacggttgcttccaagacggtcgctccccggggccgccgccgccagtcggggtcaagacggtggccttgtccgccaaggaagcggcagcagcagctgccgccgcacagcaacagcagcagcaacaacagcagcaacagcagcagctcaaccacgtcgatggttccaccaaacctgcagtgttggccgccccgtccggtctggagcgttatggcctgagcgcagcggccgccgcggctgccgccgccgctgcggtggaacaacgcagccggttcgagtatccgcctcctccggtgagtctggggagcagcagccacgccgcccggctgcccaacggcctgggaggtcctaacggcttccccaagccggcaccagaggaaggccccccggagctgaaccgccagagccccaactcatcctcagcagcaacatcggtggcttctcggcgtgggacgcatagtgggttggtgaccgggctgcccaacccgggtggtggcgggggacctcagctaaccgtgccccccaacctattgccgcagacgctgcttaacggcccggccagcgccgcggtgctgcctccgccccacgggttggggggaagccgagggcccccgactccagcacctccgggtgctcccgggggccccgcatgtctcgggggtcccccgggtgtgtcagccactgtatcctccgctccatcatcgacttcgtcgacggtggcagaggtgggcgtgggtgctgctggcaagaggcctggatcggtgtcgagcacggaccaggagcgtgagctaaaggagaagcagcgcaacgctgaggccttggcagagctgagcgagagcctgcgcaaccgcgcggaggagtgggccaacaagcccaagatggtccgcgacacgctgctcacgctggctggctgcacgccctacgaggtgcgcttcaagaaggaccactcgcttttgggtcgcgtctttgccttcgacgcggtctctaagccgggcatggactatgagctgaagctgttcattgagtatcccacgggctccggcaatgtgtactccagcgcgtctggggtggccaaacagatgtaccaggattgcatgaaggactttggccggggtctgtcctctggcttcaagtacctggagtacgagaagaagcacggctctggcgactggcgcctacttggggacctactgcctgaggctgtgcgcttcttcaaggagggcgtgcccggcgcggacatgctgccccagccctacctagatgctagctgtcccatgctacccacggcgctggtgagtctcagccgcgcccccagcgcacctccaggaactggagccttgccacccgcggcgcccacgggccggggtgcagcgtccagcctgcgcaaaaggaaggcatccccggagcctccagactcagctgaaagcgcactgaagctcggtgaggaacagcagaggcagcagtggatggcaaaccagagcgaggcgctgaagctcacgatgtccgcggggggctttgcggcgccgggacactcagcagggggaccacctccgccccctccacctctgggacctcattccaatcggaccaccccgccggagtcagccccccagaacggtccgtcccccatggctgccctcatgtcggtagcagacactttgggcacagctcattcgcccaaggacggcagttcagtgcactcgaccactgcatctgctaggcgaaacagcagcagcccggtgtcacccgcctccgtgccgggccagcgtcgcctggcatcacgcaatggggacctgaatttacaggtggcgcccccgccgcctagcgcccacccgggcatggaccaagtacacccccaaaacattccggattcccctatggccaacagcggacccctctgctgtaccatttgccacgaacgtttggaggacacgcatttcgttcagtgtccgtctgtccctagccacaaattttgtttcccttgttctagagagagtatcaaggcccagggggccacaggtgaggtgtattgccccagcggagagaaatgccccctagtcgggtctaatgtaccttgggccttcatgcagggcgaaattgcaactatcttagctggggatgttaaagtgaaaaaagagagagacccttgaaccgcagggcagcgacctcctttgccctagaccacctcctcttcaatctagagggcccttcccccacctgcctccacctcccctatccaccaagatgtagaattgtgaatataactgcaaaaagttagtcttatgtatagacattattttcgtcgtatgtttctatattttgaaacaggtatgtaacttcttcatttgaaggataagctggtttgtgttaagcagtataatattgattgggtctttcgcatcatattcgttagcatttatttggtggcagaatgtttgcctaggtacagaattaatagcccttagcaacgactgctgctggtgtgtatttttgtaaatgttatgcactctgaaaggaaaacacacaaaagaagagattttgtcgttttttgttttgccaaggccagtgttgctgcctaaaaaaaaaaataaaataaaatacaaaaatacaaaaaaacattgatactataaaatggtaaaaagcgtcttctttctaaacagccccagtgttgaagtctatacttaattttgttctgttctgttttgttttcctgttttgtttgcaaaatggtaaggggggtgttgggaggggatgggtggtttgtttggtttttttttttttgttgcaagtttgtgaagggggaaaatgttttgatttgtttctactgacctgaatgtgttggatcttcacgtgtcgttttgttttggctttattgatgcacggatgcttttgaacagtagagcgaaatgctagacatggagaacttgctctgtttgtcctttctacatttctgtagttaacagaacactgtaatgtgccttgcagcttagtaacttgtaataaattcaattgatattaattctgccctgagtcagcaaatttgtctttctagggttgaagctatgctactccaattaaggggggacaactgtttacctcctacttggatggaacctggcatcctggttccttggaaggctcttgagcaggctgccccaccccctgggtaccagactgtttacatttacctcccctgtaatctacagttgctgactaagcgatttctgtttactcttaagcatctttacccaaccccccatacaggacccagctgcaaaaaaaaaaaaaaaaaaaaaaaaaaaaattgtcaggaatgctctttggtgtctttccccggagcgatgagtagatcctggtacccagtgcagctgtgacttaacaagtgggaacagaagggagtttattttgcctctacaggcaaggcagaattttctgtccttgcacacttaaaacaaaaggtgtctggctgggctttgcctcctgtgtgtagatgaaaatgtgaccagccagcttcctgcatctcctgccattgatgtgtcccttaactgctccaatttctaagctgccatcatggactatccctctggaactatagactaaaataaacccttttcttcaaaatttaaaaaaaaaaaaagcctaggtaggagtgggggcagggaagggtgtgagcatctgggaggcaaatgcacgttgattgcaaagcggttttcacctcattcattatatcccaccccttaatgagtgtttcttaagtcaggacacagctgatcagagcagacttgggggatgggggaaagggaaagaaaagcaaaggttgcttaggtaccaaatggaatccatttcactggcaaagaaacacaactatcaactttgttgctgagcatggtggggtggggaaagtacagaagtagcgaaggcatcctctggagctcagaagccccagcaggcaccagacaagcctttcatctagctagagcaaggcaaacagtcctggtttgaaccttgtcctttcctggaggcaacagaggactagaaaacagaaaggaagcacaacaacaggggtgatctgatctgaaattaattcctagccactccccattcctggctgggagaacggacccaatctggattgcctgtccttgttggaggaaatgatctccctaaggaggagtctgagagcaggaaggtgggaatgggtggcaggaggaaataaaccgtgggatggtcctgaacaccagcactatggaggtttgattgagtcgggatttgcagttaatataccctttggatttctgtccctgcttggccaccatattgaagtggaacccagaaccccggtgtgcctgtatgggtgtgtatgtttgggaatgggaatctgtggtgctcttgatggttctgcagcatgaaacatgggaggtgcctggctcacctctaagaatctccttacatataatataaatagatgttcattcctgtcggctccctgcaaatgtgtccttgcgttttcatctgttgccaagtgttgtattggtgcttatgagtcatgaaacctattttcatcctccagggtaattaacttggtgtcggtaatgcatcgtagactgtaggaagagttaattctaaaacgcatcctggaccagcaaccaatcacttaaaggtctgggctggcttttcttacagcctcattaataaaaacctgagcaggtttcgcctggaagattcttcaaggtgctcccaacccccacaccaaatgtacatgctcttgaaatgggtgaatctaagagggaaaagcccttcctcccccatcaaccaggatgtgaggattgccagtctgggtgtgaacgctgtgagtagtgtctgtcctgttacctacctgtgcacacacaggctcccttctgcctgccactctgtcttcgttgctttggtattatgtccaggaacttttagaattacaaagcccttgattactagtacatatgggcaagcggcctgtcattaagagctgcgaacagtgttgttttctccccctgttgttgctgggtgctattattaggagaagcagcagctggagtaacgaagcatcgagccgaggatcctgggttggtttcacttaaggaagcctgacttgaccagactcagcagagagctgtaaaccggaggaagcactcaagaggtcagggcagaactctggctgccagtgaatcatacataactggtgcagttaatttaagtttacaatagccgtgggctgcttgttaaatggtagctctcttggggcggggcatgatgagtgataagacccttctctttgctggaattgttcagcacccagtgtggttgtcttaactagtctctatttggttctcaggttggttctcccttccctgaaggggtccacactggacacctaggaagcattttccttctctggccctagggattatggtgtatttcagagactcacagccaagcgtctagctgactgactgtaagctccctttatccctgcgttacttgggcgtatccctactccaggtactcatccatctcactttggtctcagaaccatagacagtggcccccatttacagtctatactgtattatttgtatgccttacctgtgagtctaatacaaccttaatgattccttaagtgaatttggggtggaaccatgaaaatgtaacagcttttggaagaataagctggtgggtagataaagccatttttgatactgaaggcaataccatggaagatctatctgcgggaaagctcataatttcaaactcttaatagtaaaattccagctgggcagtggtggcacatgcctttaatcccagcactagggaggcagaggcaggtggatttctgagttcaaggccagcctggtctacagagtgagttccaggacagccagggctacacagagaaaccctgtctcaacaaacaaacaaacaaacaaacaaacaaacaaaaaaataaaattccagatagtccagatacattctcccacgtatccaggactggtgataaaatgagattcagtatttgaatagtttggaccatcccaggtagccaatgctgacttcgaactttcgatactggactataggaatgagcccccaggcccagctttctgaaattcacttttgtttcttcctaaacctcatcaagaacaggaagttggacatgggaatgaccctaaggcctagtgaaaacccgtttatttgacaagcctttatttggtgattgacccctacggctccatcaatggaaccctgtgctctaccgcagagttatagccttagcaccttctttactctttattttgagacagggaactcactaaattggatgagccaatcatgctttgttttgcttttcaagagctcgctttatagaccatgctgtcctcaaagtcacagagatccacctgcctctgcctcccaagtgcttggattaaaggcatgtgccaccactccctgacttcaaacatttttccccccagggtttcactttgtagttgacccggctggcttggaatttgctgtagatgagactggccttgaactctgagggactgacctatctctatttcctgggattaggagtgcaccatcacgcccagcatgactatttctaaagggatgtaggaacagctacagtccatctatggaacttgagtttagaactcaggcctgtgggtgatccggcttttaaactcaaggcagggagaagagatacaacttacctgtggttacagagtggcagagactgaactagattcccatttggaaacagccttagtagacactaaagttaaaaccaactaaccacctgacagtggtggtgcctgcctttaatcccaggatttgggaggcagaggcaggcggatttctcagtttgaggccgcctggactacagagttccaggagagccagtgttatacagagaaaccctgtcttgaaaaacaaaacaaaacaaaaaccaactaaccaacagtccaaatcctctaaagattcttggtttaactacatttgtctaccaaaaggaaggacaatcaatggtgagcaaagtccccagggagtggggcacactgtcttcattaactcttggaagatggcaagcatcattagtctcttggtttttggtcataccttagcaacgtttctagttttctgactataaatgtcaggcaggattgaattgtaaagtcttttcttaacctttcatctctgtaacgccacacctcctccccatttgctaattggaaacttctggaggtttaaagacagacaatggactgcaaacccaactagggacaaccatctgggcgagcaaggaagagagggtgggggagggagagacactggtgactctttcttactctctcaagcttaggggttcttggctctctccttatcatctcttcttgcctggctgattctcccactgcaaagagggaactgaaagagacagtaacaaaccaggctccaggtagaacgaaacacactgagtggccaaccttcaggcgattctgagaggaagatgtgtcatcctgttttatgcggagatcaactgaacacagaaagactgaattaccccgagttcaagcccaggttggcctagatcctgcactcttctgatatcggtttttctgcaccttttagttctgaccttctgacccctggaagccaaggctctgagcatgagtcccagccattcccacggctttcttcccgggtttcagtgtaagccttagagccagcttcaggaagactggaggtgatgcactctcccagcaaggtgcaaggttcagttggggtcctgaagcaatgctgttttcctggagtctccctccattgcctcctactgtgatgtctgataaaatagagatgggcagggagcagatgatctggctccactctaatggctattgctcctgtgagggtcatcaactccgctgaccaactcgatccctgacattttcaattgtgttagtgggaaattggcgcatttattcttggacctggtttggtcattctcccttgttagtggacctcagaaatgcatccatgagcaggacagtccctgttctgatggtcctgagaaagctcacctttttctaagagctgttagctgtgagtctttagtttagacactactagagagacatgcccgagcctcctcactgatctcctcatggctctgtttggtctctccctacttcaagccttgattttgtggcaatgaatccttttccacatgaatatatcaccccttgcttagaacgacccttaagactggacatatagcacatgcctgtaatgccagaatttgggaagtagaggcaggaaaatctggagttcaaggtgaccctttgctatatagcactttatcatgggctataaaagaccctggaggggtggtgtatataattcagttagtaaagtgcttgtttagtatgaaggaggccctgggtttctgaataaagccacatatgatgatgagagcctgtaatctaagcatttaggaggtagaggaagattaaagtttagtgtcattttggctaaccctggaattcaaaaccatcttgggctacctaaagcttaatctcagtaaaagtaaataaaactaaagtagaaagttttgctgtttgtttgttttttaggaaaaggaaaagaagacatctcccttggctataatccaatcctgggcacatggaccaagcgtcctgataacaagaggcggttttgttgttttgttttgtttgctgttgttgttggtggtggtggtggtttttctaaacagggtttctctgtagccctggccattctgaaactcataggccgggctggtatcaaactcagcaatccccctgcctctgcctccctagggctgggattaagggtgtttgccaccacctcctagctgagtgttgtaatttttaagaaagaattaaagggtgtctcagtggtcaagaacacttattgttcttccagaagactcaagttctgctcctagcacctgcacagtgacttacatgcatctctatctcaaggtctagggagtctgacaccttctgccatcctcaggcacgcacatggtgcacatacaaacacgcaggcaaaacactcaactaaaagttactacatgcctttgatccctgcacacagtgaatcttagatgaggccattctactggagatctaacctagagataccttacacaagcaagcaagcaaaaaatgcaccacacttatttatattaagaaaagaaaatattattcccggcacttgggaggcagaagcaggcagatctctgtgagtttgatgtctgtctggtctacagagtgagttccagatcagcaaggactacatagagaccctgtctcaaaagactgagaaagagagagacagagtgacagagacagacagagagagacacagatagacagacagacagacaccatggggggggggggaattacagagctactcagaagaaagaaggctcttctccttttgttctacatcttcagctctccacagaaggcatcacagtgcagtcatgtgtgagggccttcatcagtgctcaaagaagctgagatctataccacagctgtcctgggggttagcacataccagagacaaggagaacagtataggataaagacctgatcttgggtcacagaggcttgctacctgaacctggggagtccacatcccctcagcaagggttagcttatattcttttttttttttttttttggttttttggttttttgagacatggtttctctgtatagtcctggctgtcctggaactcactttgtagaccaggctggtctcaaactcagaaatccgcctacctctgcctcccaagtgctgggattaaaggcgtgcaccaccatgcccggcttcgtttatattctttataaagttctggacaaaaggccagtgtgagctgggagtggtggctatatggtagcttgagtgttctttggaagggatggccagcaacaaggcatggagcaggccaggtatcccctgcaatgttccagagccccccacccccaccctactacccagcagctggcagaattgtaccccaggggactacctgaagagcttggctgaaaggaaagagggcaggaagagggcagggaaggggtataggttaggggtagagagcttgtctagcaagcgcacgagccttgaattctacccttagcaccaataaataaatatgtagataaataagcaaaaaaatgtatgacattttattaactaagattatcagcttatgaattgactcttgatgtttactgtcattattactatgtagatttttttgttttgttttgttttgtttttgttttgtttgtttttcgagacagggtttctttgtatagccctggctgtcctggaactcactctgtagaccaggctgaccttgaactcagaaatctgcctgcctctgcctcccaagtgctgggatgaaaggcatgtgccaccactgccctgcactatgaggattcttatttggggaactagatgagattggtagtcaggaaagacatactataaacaaatgaaagaataataaataaaaatatataacagggcatgctaggagtggtagtatatgcttgaattctaagcacttgggaggcaggaggatcaagaattcagggtcagcctcagctccatagaaagtccaaagccagtctgggtttaatgtgacaactcgtttcaagaacaagaaagaatctaatgtaacccgcagtggaataacactgtcatgtgtaatttctccattattacgactcatctttgaggttggcagtgatagtgttctccacagaaaaacatccctagtaggtcttgtcagtgcctctccctccttcccgaggctcaccctcactcctttctgacagcctcctctagttttgctccctagcctagctccccagtcttccagggagccaggggttttggttgtgaggagaattggaacacttgaagtcccatgccagggcccaggctctggaccacctgtagctctagcagccccaggaggcctggccacagctgagaacaggtttgggtggctggtggtgcctgcagtgctgatggccaacgctctgggagaggcggctgtggaatgctggccctgtagacctgaaggaattaactcaatgccctgggcctcagcccagactgtcatgtgactacctcccacaagctcccctacccctaacctcttgtcttcctggagtctaagcttggggcactactggtcttggatcagagcccgatggcagctgaccactccttggggagtggccgacagtctcactagttcactcttggtggggtccgggtggagttctggaaatattgttgcagggtgataaagggcggtggctgggagcatctccaaggtagaagaggaagggggcggatagggagtcaaagaagcagcagcagggagtggtagtcctccacttcaccagccccctgctaggaagcagcctctttggttccaagccttggctgcccagctgggcctccagacagtgtctgggaaagaggcctgggagagacaaagccaccctagggcaagaagccagtaccaaccacttctggtaggcctcagggaccaggtccccccccccccccagtcttgtgactcccacctgtcctcagatcccaccaatcttgtgcaggcaaaagtaggggtgagcatgtctacctactgcttcggcctctagccactggggcaagagggccttgcaggcaatcaccatttccttctttgttctgtacaggtcaggtcaagcccttgtcactggaaaccagctcagtcaggacctgtggcttcccttcaactcctgccccacctgctgctgaggcctgttcccaggctttctccttccacgctgtggttgatggcctggaacagggctggggtcccttaagatggcagaggtggccctctgagcagacagtgagagtgtgcacagcccagacagtagcttctgctctaatcccctcccacactctcagtcctccaacactcaactgttggtagatgtctgagttcaaattctggctctgctatcagctctgagcaagctacagatctcttccgggaccttagcatcttcctttgggactgatattgtctccttaaaacagtgtgggtgaaaaaaggaaagttgatgctcactgccagtctaggatccggggctgccagtggcgattagccatgacttttcatttgttggttcagggtgtgtttgtgtgtgtgtgtgtgtgtgtgtgtgtgtgtgtgtgtgtgtgtgtaggaataaggatgggaggtcaggaaggggggtggtgctaagctggagaaattactcagtggtttagaacacttgctgcctagcaagaggacagggtttgggttccaagcaccaagtatggtggctcacaatggtctgtaactccaggtcccggggttctaatgccctcttctggcctcctcaggcactgcatgcatgtggtacacatacacgcaggtaaaatgctcatgcatataaaataaaaatcaacaaagagaagctggcatgatggtgcacacgtttaatcccaggattctggcagcagaggcaggtggggttttttctaagtttgagactactctggtctacatagttagttccagggcagtccaaattacatagaaagaccatgtcctgggctggaaagatggcttagcgggtaagagcactgactgctcttccaaaggtgctgagttcaagttccagcaaccacatggtggctcataaccatccttaatgagatctgatgtcttcttccggtgcttctgaagacagctacagcgtacttacttataataataaataaataaatctttgggcctgagcgagcagagttgaccggaatgagtggggttgactggatcgagcagaggtcctgaaattcaattcccaaccacatgaaggctcacaa

SEQ ID NO: 354 - DNA, 3033 bp, Mus musculus
atggcggtgacgtcagcgctccgcccgggcggcatcccgcgcggccaagccggggacagcgcgagccgcagcccgagcaggagcgctgagacgcgcctccggaacgtagaacccggagctcgcagccctgatccgccgcaccaggaagaaggctcccggtgctcttctctggaccagacagccgcagtaggagtgttggccgccccgtccggtctggagcgttatggcctgagcgcagcggccgccgcggctgccgccgccgctgcggtggaacaacgcagccggttcgagtatccgcctcctccggtgagtctggggagcagcagccacgccgcccggctgcccaacggcctgggaggtcctaacggcttccccaagccggcaccagaggaaggccccccggagctgaaccgccagagccccaactcatcctcagcagcaacatcggtggcttctcggcgtgggacgcatagtgggttggtgaccgggctgcccaacccgggtggtggcgggggacctcagctaaccgtgccccccaacctattgccgcagacgctgcttaacggcccggccagcgccgcggtgctgcctccgccccacgggttggggggaagccgagggcccccgactccagcacctccgggtgctcccgggggccccgcatgtctcgggggtcccccgggtgtgtcagccactgtatcctccgctccatcatcgacttcgtcgacggtggcagaggtgggcgtgggtgctgctggcaagaggcctggatcggtgtcgagcacggaccaggagcgtgagctaaaggagaagcagcgcaacgctgaggccttggcagagctgagcgagagcctgcgcaaccgcgcggaggagtgggccaacaagcccaagatggtccgcgacacgctgctcacgctggctggctgcacgccctacgaggtgcgcttcaagaaggaccactcgcttttgggtcgcgtctttgccttcgacgcggtctctaagccgggcatggactatgagctgaagctgttcattgagtatcccacgggctccggcaatgtgtactccagcgcgtctggggtggccaaacagatgtaccaggattgcatgaaggactttggccggggtctgtcctctggcttcaagtacctggagtacgagaagaagcacggctctggcgactggcgcctacttggggacctactgcctgaggctgtgcgcttcttcaaggagggcgtgcccggcgcggacatgctgccccagccctacctagatgctagctgtcccatgctacccacggcgctggtgagtctcagccgcgcccccagcgcacctccaggaactggagccttgccacccgcggcgcccacgggccggggtgcagcgtccagcctgcgcaaaaggaaggcatccccggagcctccagactcagctgaaagcgcactgaagctcggtgaggaacagcagaggcagcagtggatggcaaaccagagcgaggcgctgaagctcacgatgtccgcggggggctttgcggcgccgggacactcagcagggggaccacctccgccccctccacctctgggacctcattccaatcggaccaccccgccggagtcagccccccagaacggtccgtcccccatggctgccctcatgtcggtagcagacactttgggcacagctcattcgcccaaggacggcagttcagtgcactcgaccactgcatctgctaggcgaaacagcagcagcccggtgtcacccgcctccgtgccgggccagcgtcgcctggcatcacgcaatggggacctgaatttacaggtggcgcccccgccgcctagcgcccacccgggcatggaccaagtacacccccaaaacattccggattcccctatggccaacagcggacccctctgctgtaccatttgccacgaacgtttggaggacacgcatttcgttcagtgtccgtctgtccctagccacaaattttgtttcccttgttctagagagagtatcaaggcccagggggccacaggtgaggtgtattgccccagcggagagaaatgccccctagtcgggtctaatgtaccttgggccttcatgcagggcgaaattgcaactatcttagctggggatgttaaagtgaaaaaagagagagacccttgaaccgcagggcagcgacctcctttgccctagaccacctcctcttcaatctagagggcccttcccccacctgcctccacctcccctatccaccaagatgtagaattgtgaatataactgcaaaaagttagtcttatgtatagacattattttcgtcgtatgtttctatattttgaaacaggtatgtaacttcttcatttgaaggataagctggtttgtgttaagcagtataatattgattgggtctttcgcatcatattcgttagcatttatttggtggcagaatgtttgcctaggtacagaattaatagcccttagcaacgactgctgctggtgtgtatttttgtaaatgttatgcactctgaaaggaaaacacacaaaagaagagattttgtcgttttttgttttgccaaggccagtgttgctgcctaaaaaaaaaaataaaataaaatacaaaaatacaaaaaaacattgatactataaaatggtaaaaagcgtcttctttctaaacagccccagtgttgaagtctatacttaattttgttctgttctgttttgttttcctgttttgtttgcaaaatggtaaggggggtgttgggaggggatgggtggtttgtttggtttttttttttttgttgcaagtttgtgaagggggaaaatgttttgatttgtttctactgacctgaatgtgttggatcttcacgtgtcgttttgttttggctttattgatgcacggatgcttttgaacagtagagcgaaatgctagacatggagaacttgctctgtttgtcctttctacatttctgtagttaacagaacactgtaatgtgccttgcagcttagtaacttgtaataaattcaattgatattaat

SEQ ID NO: 355 - protein, 716 aa, Mus musculus
MAVTSALRPGGIPRGQAGDSASRSPSRSAETRLRNVEPGARSPDPPHQEEGSRCSSLDQTAAVGVLAAPSGLERYGLSAAAAAAAAAAAVEQRSRFEYPPPPVSLGSSSHAARLPNGLGGPNGFPKPAPEEGPPELNRQSPNSSSAATSVASRRGTHSGLVTGLPNPGGGGGPQLTVPPNLLPQTLLNGPASAAVLPPPHGLGGSRGPPTPAPPGAPGGPACLGGPPGVSATVSSAPSSTSSTVAEVGVGAAGKRPGSVSSTDQERELKEKQRNAEAELSESLRNRAEEWANKPKMVRDTLLTLAGCTPYEVRFKKDHSLLGRVFAFDAVSKPGMDYELKLFIEYPTGSGNVYSSASGVAKQMYQDCMKDFGRGLSSGFKYLEYEKKHGSGDWRLLGDLLPEAVRFFKEGVPGADMLPQPYLDASCPMLPTALVSLSRAPSAPPGTGALPPAAPTGRGAASSLRKRKDEPPDSAESALKLGEEQQRQQWMANQSEALKLTMSAGGFAAPGHSAGGPPPPPPPLGPHSNRTTPPESAPQNGPSPMAALMSVADTLGTAHSPKDGSSVHSTTASARRNSSSPVSPASVPGQRRLASRNGDLNLQVAPPPPSAHPGMDQVHPQNIPDSPMANSGPLCCTICHERLEDTHFVQCPSVPSHKFCFPCSRESIKAQGATGEVYCPSGEKCPLVGSNVPWAFMQGEIATILAGDVKVKKERDP

SEQ ID NO: 356 - DNA, 23473 bp, Homo sapiens
ccaggtgcgcttgtgcacagactgcttgtcccaaaaggaaaccgaggcaaccacgggggaggctgggtagggatggtggtggtaagaagtattttaaagcggaacaaggaaagccagaagatgtttaaaacaaaaggagagactattgttcagcgtcggaggtcgctgggatggaagctgtaggcaagaaagctggctgcggattttgcagtgggtttattgtgtgggcaaccaggcagaaagcgggaatatgaaaaagtggggagggggagagttggcgtgaaggaaaatcagtgcctagaaagctgtgcacgctgaaaatgtcaccaaggagagggcagtggcaccgaataaaagatgaataatcggctaccttttggaaaaagcaatgtaaaaatattaataaaggcgagaagcccgcttcttctcagcctgaaaagcaaatccatttctcacctcctgcctctcctccccatcccaacacacacaaaacacacacatacacacagctcttctctgccctgcatccaagaagcctcggctaggctcgctttcctttggatttaattactcgaaaatgctgaacaaaaacctgtaattacacccttagtccctgccactcaggcccagtacacttcctgcctagttttgttttttaaagaagaggtcattgcctcttttctttccaaattggccaaaacaaaaaaaaaaagtaaaagccctaaataaatccaactgctccgagcttcactgccaccaccagggatttggggaggggatatccttgtctctctaggagagatgagaaacaaacagcctaaccttgctattgtctttctccagcttttaggcctaaagcttgtcattgcttgtttgtctgccagcccagaaggacatggacatgctagattggccccccaggaggaggccctccaagggcaagatgaagagagtggacagggcttagcggcaggcctggctttccacccattttacctcgaagggcttagcgctggaaaaaagatttgtcacagtgtctcgcctttctacagccctaggcattaacatacagaatttcatagcaaacccctgaagtagggagaacaggttttaatatcaacctttgacaggtgaagaaatggagtcccagagagaataaatagattgctctaagtcagtcatgtggctggtgggagtattgaaaaagctctgcctcttatgacttttgggctattgcatcaggaaagtaggacacctaggaggaaatggaagcttctagattctgggctacagccagtctggcttggttcatccagcactgagatagaaagtgttccctaaataaatagttgaataactgaatgaatggtaaatggaagggcactggttagggagttggggaacagaaacccaccaggccatctggtagccaagtttcagcttcgaaacaaaatgtaagtactgagaatagtttcacaccagggacctatcaagcttactcttctgtgtacggccagagaggggagttcaggttaaagtatggtggtcctctacatgtgttggaggggtcactttgtttccgggctttcttgctccagtgatgcctaggccagatttgatgtcagagctatacacctacccttggctagaagtgcttttttttttttctcttaagagatgaaggctgggtgcggtggctcacacctgtaatctcagcactttgggaggctgaggtagattacctgaggtctggagttcgagaccagcctggcaaacatggtgaaaccccatgaaacaatatatacaaaaattagccaggcatggtggcaggcacctgtaatcccagctacttgggaggccgagacaggagaatcgcttgaacccaggaggtggaggttgcagtgagccgagattgcgccactgcactccagcctgggcgtagagtgagactccatctcaaaaaaaaaggtcttgctctgtcacccagggtggaatagtggaatgcagtggtgtgatcatagttcactgcagtcttgaactactcctgggctcaagtgatcctccacacctcagcctcccaagtagctggcactacaggtgtgcacaactgcactgcacctggtggccagaagtgctttgaggactgtagcctgccacaatcatgtggcccctagcctaaggacaggacagtacatgttgggtgagtgtctatacagctggtgtgacccgtataaggtggcgcacgttacttatgtgatatgacttttgggtatgagaagaggctccttccactataaaatgcactctcttcattttcctccttgtttattgttcagcctggggtctttctcaagagtgcacaatgaaaatgctgctgtccttggtaagggtatctcagtaaattcctaaatgcttcagtgagttctagaacttcagattttcctccatcacctctgccaaggaccggggtatagaaaaggcaggaagagaccagatgcggtggtaatccctgtactttgggaggctgaggtgagagaactgcctgagcccagaagagacaggcctgggcaacatagtgagatccccgtgtctacaaaaaataaaaaactaagctaggtatggggtggtgcatgcctgtagtcccagctactcctaaggctgaggtgagagaccgtaccactgcactccagcatgggtgagaccctgtctcaaaataaataaataacatgtttttgtttttgttttggcaggggctgagcgcagttgctcacgcctgtaatcttagcactttgggaggcccaagcaggtggattgctggagtccaggagtttgagaccagcctgggcaacatggcaaaatcccatctctctctttttttttaatactaaaaataaaaaaaaataaaaaatgagctaggcgtgatggcacacacctgtagtcccatctacttgggaggctgaggtgggagaatcatctgagccagggaggttgaggctgtatgggctgagatggcaccacggcactcagcctgggcaactgaagtgagactttctccaaaaaaaaaaaaaaaaaagaaaaagaaagaaagtaaaagaaaaaaaaaggcaggaagaaagagaatggttttacaggatgccaggaaagcataactactcaattttgcttcaaagctggatagtgattttaactccaaaataacctgtgctaatttatgtataaccttgcatctactgggacatgaacctgtaaactccaatggggagagaggttttaatttcttgcagtttctgaggagcatctgagaccctcaaaaaggtatagcaacaggcggggtgaaagaagaaatgcgttttacagccagggaacctggtttccagtaattctggacttggctttcctcacctatacaggaggttgatgaaagtaacacctacttcacagggttgatgtagggattggtgaaataatgtctgggaatgctcttccgagccctagacaaatgttggtcattgtattgttaataatttcttacattttattaagcacattacattgtcttccacacagatcaacgaggcaggcaaaggaagcagtgtaactttttcccattttacggatgaagaaaccgaaattcaagagatttgctcaagtttacacagctgtttagggtcagccaagtccaagttaaacaacataatgtaaatatgtacccaaatgctaagcgccctcccttcctccctctctcctgagtttcgggttgaactactcagctcacgcaagccaaaatatttgaagatcctggcccatccatcccaaccaggcacagcagtgacagctgccccatgtaccagacctgaccgagggatggcgaggctgcagggaggggcttcccgctctgaggccccgccttctggtggccccagcaggaaagcgccggcggcaacgggtctccgtagccggacggtggaaatccccaggtcggtgtgggccagtgggaactggctggcactcctactccctgctgaggcccaggcgcgcgcccggcggggtggagggtccgggggtatgcgcacctgtggcctggtcggccgccctgccagctttctgcctattcttgccgtccaaggcttccttcctctccaacccccctttttggggtgtgggtatttgttttaacccaaccaggtcagtgaatagcatccttgtctggctcttccctcttttttttttttacctctaggcctggtacctgggcggctcattccagggttcctttatttttggacctaaaaaaaccacaccagcttttgctgaggacagcgctgggctcccccatcctggcacgcgggcaaagagaggaagcggggaggaggcaggaaccagacgcgactccccccgcctttcttcccctccctgttccccgcccctccaggaagaaatcagtcagagatccatcgctcgctgtggccactgtgcctgcactaaacactacgcccgctctccttttccttccacccgattttgcacggagagcccggctgcccgcgcgccccaggctgggcaggtcctggcaggcggtgcaggctttcctcccccggggcttctcagcgaatcacgttgttcctgggatttcatgctcgagtggctcttgcgtaaccctacgccctggcctaagttaatacttttttttttttttttttcaaataccgggattactcctttagggaaaggcaaatacttccgccacggaatgggcctgggagtaaatctgtaaatcatcttgctgtctcccttcccccaccctccccagcccctttgctcgtctctacaggcccagggctcaaactgcgcctctggggttcctggcgcgcggcgatcaggggccatcgaaaggccagaggagggcccaacgcagacgtttgttttcatcttctccaaggcggatctcgcaggccagagaagtgggtcccgcttaccgcggggctgttaccaaaaaaggcctttctctcgctggagcgcttggcggcgcgcgttgcagcagggtgacgcgaggttcagcccgggcctccttgaaggttgagccagctgactgcagggctgccaggccaagagccccccctccgcaacacacacacacacccgcgccccgtctctgccacaaaacggcgggggcaggagagagagtgcagggagcttcgaagtgcgcgcctggcgaccttctcaccactagtaaccttgggctatggtgctccggcaaggccaggtggaaagctgaccttttgctccagtttagagcagggttctctgaggatgccagcccagatggcaagctgggtggggaaagcgacagtaggaaggaactttgggaagatgatgccgccgtttggcgcccggctctgctagtctctgcttgtctcccagaccccatggacagagttctttgagtctctacacctggcagtttacgttgaggctcctccacctccaccacccccctcccaaatcctttccagttcctttccaccgttgtcatagttttgttccacgggactcttcttcagggagaaaacccacctccagaacactggagttctagcctctcaccgtctctcacacatccccaaacggccatctcaggcaacaagagataccacaaatgatgttgattcttttttttggttgggggggggggggcggtttggagacagctgtgttttataaatgaaaggattatgagtctgtaatggaagtctgtttaaatacacgttgatttctaactcagtgtgtctgaaggcaccccagcatgtatgtgtgtatatatatctcctttagtaacagtgaagacagagacagacagggagatggagacatatgtgtgtgcataccaaacataacaccatgacatagaatccaacttgctttctctagcagcctggctggagggttgtggctaagttgctatttccctaatatttttggtttaataaagggaagggctgaataaatattaatgtaaagaaatgggtcacccaaccgagccaaagctaaggagccccaggctggcggggatgtcaaaccatttcccacccctatgttttgactcactccagggtagcggtagtgtggggagggctgaagtctgggagagtgaggcaatgctccccaagcaactctttgcagaggaatcactgcaaagtgccagcaggccagagaaagtttattattgctctagagtgcacagtgagctcactgttttgcaaaaacagaaatctggctgctttgagatgaaagaggggctccctagggctcctcctcctcttctgtccttaaaaactcgcctttcctttgcactcaggggccccagaatgagtgggagattggggctctggggagtgttggataggggaacaggctctggaagtcaagtgtcaaaataaaagtaagtatctcttgttgcttccactgaactttattgcaattactagtaataagagtgataatagtgatcctcacaatttatgcagtttactaagtactgtcacatgtcaaccagcaatagtaccaacactagtatcaatactaataataactaacactaactgtgagtccaacactgctctccattctgtatggtgtatttaagttacagtctggtagtgacagatctacaacttctgtatatagaactcagtggtacaaatgcgcttggaaggggaggctgggggttggttatgaaggtgtattggcatagtacttacgtaagattgtatgtaacaccaaatcaactggggctgatgggaattttgagcaccccaaaccacctctgcaagcctgagcttgtcaaagacacctcaaatcagatttactggattcaaatcccagccccatcactaatggctgtaggcaagttatatagcctctttactttcctggtttgtaaaatggaggtaaaagaatctaccctgtagataatattaagggtttaatactgtaataggccggtcacggtgggtcatgcctgtaatcccagcactttgggaggctgaggcgggaggatcacctgaggtcaggagttcgagaccagcctggccaacatggtgaaagtccgtctctactaaaaatacaaaaatgagctgggtgtggtggcgggcgcctgtatccccaggtacttgggagactgaggcaggagaattgcttgaacctgggaggtggaggttgcagtgagctgagattgcgtcactgtactccagcctgggtgacagagtggactctgtctcaaaacaacaacaaaatactatagataatatccccttaataatgtagataatattaagggtgatgcaagtaaagccacctagtttactaaggtcccacggcaagtctaagtaagcgttatctcttcttatgacaagaaacaaattgaggccgggtgaggtggctcatgcctgtaatcccaacactttgggaggccaaggtgggtgcatcacttgggcccaggagtttgagaccagcctgggcaacacggcaaaaccccatccctttccaaaaatacaaaaaaattggccaggtgtaatggcacatgcctgtagtcccagctactagggaggctgaggtgggaggattacttgagcctgggaggtcaggctgctgccagccgcgagtgtgccactgcactccagcctgggcaacagaacaagatcctatctcaaaaaaacaaaaaaccgaagttgaaatctcaaacaaccctaacaacctgggagctatcattccattctcttttccatggaaaagagagattttgtgggtaactagcttaagggtggagagccagttagtgatggagaggaaatttcaatctggtgggccacacttcagaatccgaaatcccattatattgctttcccttctccagccttccctgggattatctcagttttcatgaaataaaaaaaaaaaaaaagcaaacccaataattagaataatcaatagaaatgccccaactagagctatgaccaacatatccatcgtgccataagcaatactgatgagcagtgatcttgtaaggcagaagaaatcacggccttggccgggcgtggtggttcatgcttgtaatcccagcactttggaaggccgaggcgggaggatcacctgaggtcaggagttcaagaccagctggctaacatggtgaaaccatgtctctacaaaaatacaaaaaattagctgggcctgatggcgggtgccggtaatcacagctacttgggaggctgaggcggaagaatcgcttgaacctgcgaggcagaggttgcagtgagccgagatcgcgccattttgcactccagcctgggcgacagagcaagactccgtcttaaaaaaaaaaaaaaaaaaaatcacggccttgttccgccttctggggcaacatggagtgagatcacagcgcctgagaaagaactttgaaaactgcggctgtgctttacaaaaatgtatcagtattattaaatgctgcctccaccttttaaaaatcaaactctagaaaaaacactcacctgtttggcctctccggcccctccccctccctgccctgaactgcagctgtgcgcagccagttgcctgttttccttaaaggcctcggggtgctcgtatcttcttcagacgttcagccaaaatttttaaagtgcggctggggggaagggtagcgcactctgaattcatttagctctatcgttgaagcccgggttcctagatcagggcacaaaaacaaatagaaaagacaatttctggaagattggaaaacagctaattttgcaggtgcttcggcatcagtggtggcgatgaatttaacatccatgccgggggggataaggttcaaccgcagatgaaatggttaataccttatacgaaattcacggcgaaaaatcctgaaacaggacatttaaattcactgccgaggcttgggggtggggtggggagcagggatcggaaacgacgctagtggttcttaaatgcgtttttacttgggaatgccgggcagggaaaggaaaggtcatcgtctgtttaatttccacccccagctctggacttccagcattagctcgccgggcctcagctgttgtacacacacggcgaggggggaggggagggcggaggcgcggaggaggggccggctgggaggaatctgggcgtcctgccgcgcatgcgccttgcctgagcaacaagtgggctccacagaggaagtgtaaaggggagggggaagaactggtgcagagcatggcggtgacgtcagcgctccgcccgggcggcatcccgcgcggccaagccggggacagcgcgagccgcagccggagcaggagcgccgagacgcgcctccggaacgtagagtaacaatcacaaccccacattccgggcgagcgtgagcacgagcgggaagggatgcgacccgggccgaggcgccgcgcgagcgccctgcagccaacgtgagcgccgccagccgcggcggcccgggcgccggccaggcctgggggcggcgggagcctgcgtgcgtgcactcctctcctctgctctcgtgcgtcctggaagcagtggccgcggcggctccctccggggtgcaaacccagtcgccgccagcagaacggccgacgctgcggaggggagaaggtcctttctcggctgccaccccctcccccggtcttccggggaagcagcggcttcagcaagattggacccgggcaccgggtggcactgaaccctctggccctcgccccagggggcccgtcggggagaggacgcagctcgtaggggggtccccggggagaggaagagacagcccctttcgagcttccacgcaccagccactccggggagggggccaagaggcaacggcggccaccaccgggcaccctcgccccctcccctcgggccgggagcttccagcccaagtctgcagcaccaggaagaaggcgcctgagctcccctcgcgacgagtcaaccgcagtaggaggtgggggcgaagagagggctgaacccgtccgctgcccgggcggtggagcccccacggcgaggcgctgcgccggcggtggagactcgcgttccctccagcccctggggcagaactttctcgccccccctcctccctcccccgcagtcggactccctccccagccggccagtcctcccggaggagaaggcgccgcggagacagcccgggcgggggcctaccttccccagggcaggcatcatgtcggcggcgcaggtgtcctcgtcccggagacaatcttgctacctgtgcgacctgccccgcatgccctgggccatgatctgggacttctcggaacccgtatgccgcggttgcgtcaactacgagggcgctgatcgcatcgaattcgtgatcgagacagcgcgccagctgaagcgggcgcacggctgcttccaggacggccgctcccccgggccgccgccgcccgtcggggtcaagacagtggccctgtcggctaaggaagcggcggcggcggcggcagcagcggcggccgccgccgccgccgcgcaacagcaacagcaacagcagcagcagcagcagcaacagcagcagcagcagcagcagcagcagcagcaacaacagctcaaccacgttgatggttccagcaagcctgcggtgctggcggccccgtctggcctggagcgctacggcctaagcgctgccgccgccgccgccgccgccgccgccgctgcggtggaacagcgcagccgcttcgagtacccgccaccgccggtgagcctgggaagcagcagccacaccgcgcgactgcccaacggcctggggggcccaaacggcttccccaaaccaacaccagaggagggacccccagagctgaaccgtcagagccccaattcttcttcagcggcggcgtcggtggcgtctcggcgtggaacgcacggtgggctggttacggggctgcccaacccggggggtggcggaggcccccagctcaccgtgccccccaacctgctaccgcagacgctgcttaacggcccggccagcgctgcggtactccccccaccccctccccacgccctgggcagccgtgggcccccgacgcctgctcccccaggggctcctgggggccccgcttgtctcgggggtaccccgggtgtatcggccacgtcgtcctccgcgtcgtcttcgacctcttcgtcggtggcagaggtgggcgtgggtgctggtggtaagaggcccggctcggtgtcgagcacagaccaggagcgcgagttgaaggagaagcagcgcaacgccgaggccctggccgagctgagcgagagcctgcgcaaccgcgccgaggagtgggccagcaagcccaagatggtccgcgacacgctgctcacgctggcaggctgcacgccctacgaggttcgcttcaagaaggaccactcgctgctgggccgcgttttcgccttcgacgccgtctccaagcccggcatggactatgaattgaagctgttcattgagtaccccacgggctcgggcaacgtgtactccagtgcatctggtgtggccaagcagatgtatcaggactgcatgaaggacttcggccggggcctatcctcgggtttcaagtacctggagtacgaaaagaagcacggctccggggactggcgcctgcttggagacctgctccccgaagccgtgcgcttcttcaaggagggcgtgcccggcgccgacatgctgccccagccctacctggacgccagctgtcccatgctgcccactgctctggtgagtctgagccgcgcccccagcgcacccccggggaccggggccttgccgcccgccgcgccgtcgggccggggcgcagccgccagcctgcgcaagagaaaggcctctccggagcccccggactcagccgagggcgcgctgaagctgggcgaggaacagcagaggcagcagtggatggcgaaccagagcgaggcgctgaagctcaccatgtccgccgggggcttcgcggcgccggggcacgcggcggggggtccgcctccgccgcccccacctctgggaccccattccaaccggaccaccccacctgagtcagccccccagaacggtccgtcccctatggccgctctcatgtcggtggcagatactctgggcacagcgcactcgcccaaggatggcagttccgtgcactctaccactgcgtcggcgcggcgaaacagcagcagcccagtctcgccggcctccgtgccggggcagcgccgcttggcatcacgtaacggggacctgaatttacaggtggcgcccccgccgcctagcgcccacccgggcatggaccaagtgcacccccaaaacattccggattcccccatggccaacagcggacccctctgctgcaccatttgccacgaacgtttggaggatacgcatttcgttcagtgcccttccgtccccagccacaaattttgcttcccttgctctagagagagtatcaaggcccagggggccaccggcgaggtgtattgccccagcggagagaaatgccccctagtcgggtcgaatgtaccttgggccttcatgcagggcgaaatcgcgactatcttagctggggatgttaaagtgaaaaaggagagagacccttgaaccactgggcagccacctcctttgccctagaccagctcctctccaatcctgagggcccctcccccaacccaactcgaccctccctcccctcacccccaaggtgtagaattgtgaatataacgaaactgcaaaaagttagtcttatgtatagacattattttcgtcgtatgtttctatattttgaaacaaaggtatgtaacttcttcatttgaaggataagctggtttgtgttaagcagtatagtattggttgggtcatttgcatcatatcgttagcatttatttggtggcagaatgtttgcctaggtacagaattaatagcccttagcaacgactgctgctggtgtgtatttttgtaaatgttatgcactctctgaaaggaaaaacacacacaaaagaaaaagactttttttttttttttttttttgccaaggccagtgttgctgcctaaaaaaaaaaaaaaaaaaaaaaaaaaaaatgctttaaaatggtgaaagcttccttctaaactgccccaagtgttgaagtcttcactttattttgttctgttttgttttgtttttctgttttgtttgcaaaatggtaagggggtgtcgggggggatggggtgtattttgttgcaagtttgtgaggggaaaatgttttggtttgtttctactgacctgaatgtgttggatctacacgtgttgttttgtttttgctttattgatgcacggatgcttttgaacagtagagcgaaatgctagacatggagaatctgctctgtttgtcctttatacatttctgtagttaacagaacactgtaatgtgccttggagcttagtaacttgtaataaattcaattgatattaactgcgctgagtcagcaattttgtctttctagggctaaggccatgcaactccgacgtaggcgacaccctccctacctccagtatagaacgaaaatcctagtgcttttgaaagccctgggagctggcctgtgggaaaggccctgtgctgccttgctgcccctccccctcggtaccaggctatttaaattcacctcttggggaggcgacagttgctgactaagcgatttcggtttactcttcagcatctctattttcccccggatgcgggcccagctgcaaatggcattgtcaagaatgctttctggtgcctcgccctgtggcggtgaacataggctgacacccagtgcagctggtgacttgacaagtgggcgaaaaagtctaggagaaaagctaggatgctttgcttcttagatatgacagacatcagtctgcatatttaaaacaaaactgccacagagctgggagcaaatgcatacactcagccttggagagtccgcagtagcttcaggctggttccttggaaaaccagttttcacctcattcattacaagttttctttcttgtattttaaataattatttttaaaggcagaaataattctaaagacttagttgattagagagggtttctgaggatgaggaagaggggggaaaaccccaaacttagttcctgaagcaaaggtttacttccaacatcaaataaaaatccattcctgctggtgaagcaatgcaattattcatctaatcagcttttggcggcgtttgtgaggtgcagagaggcggggaagcggagagaagactactgccctttagagcagagcccctgctcgtgggctgagagcagcctggagtcctcccagtggtaggggaaggcaaacaaacctgatctgaaccttgtactctcctgggaggcaaatagaagagcagaaaacaggagggaggaagcaaaacaaaacccggcaatccagtcaaattgattcctggccacatctcattcctgggcggggcgagctgggccctgttggtcccctccaaggctgaaggactattaagaaacttggatcccccactccactcccatcaaaggagtgggaagactgggaggtggggatgggtacaggcacgtttggggagaaacaaatcactggttcgcccagaactctggtgtggaggccgggctggtgtcggaacttgttaataacacccttttagtttcttttcctgctttgccactgccatcactgaagtggtggaaaccaggactctgtgtgcacgcgcactcgcgtgtgtgtgtgtgggtgtggataagtggcaatattgatggatctgctgcagcctcttaatcctggtacatgggaggtgcctgcctcacctctaagaatctccccacatataaatagatattcatgtcagcttcctgcaaatgtgtccttgcattttcatctgctgccaagtgttgtattggtgcttatgagtcatgaaacctattttcatccgcaggggtaattaacttgggggtgataatgcatagcagactgtaggaagagttaattccaaaacccatcctcgcctggctaccaatcacacattgcacttaaaggtctgggttggctttttgtgtaagttcattaataaaaaccaagcatgttttgcctggaagatcctctaagatgctcccaactcccgctcccaaggcacatactcttaaaattggtaaagctcaacagcctgagaatacagtgtcacgggtataatttaactatcattgaaggaaggagcggtgggtgcagccacccctcctccggcattgcacagtgcatgtgaatttagacatgtggatcacctgtctgggcgtggaccttatgagttgtgtctggtggctccagctgggagttgtccctgttaccggtttctgtgcacagctgctcctgccggcctgcaactgtctcttcatcactatggtattaagctcaggaacttttaggattgtaagacccttgattactagtgcacataggtaggaaaggagggcctgtctttaagcactgagaacagcatcgtttctttccttcttgttgctgggtgctattatgaacagtagaagcagcagctgtaataatgaggcatccagccatggaggccagtttggtttcactaaggaaacctgactagagacgttggggagaggagggagggagtgggagggagagagcaggttggggtggaacccaggctagaagtgaattatgatagtgcagttaattaaagtttatcatagccggggaccacttgttaaatggaggcttttttttttttttaaaccatgtgaacttttcctttgctgggacccattcagctgctagtttggttgccttaaccagcctttctctgatccctcagctggattctcctttccctgaagctttccacattggacgcctaggaagcacttttcctctctggcgtgtaaggattcttgtgggtttctgagattcagcccaggcctctggatgagccgaggctccattcatctccattttacctccatttcttctgaccctcgtttcctatccttctcactccctttcccctcagagccaaagtggccaacatttaaaaattcatatttatctttgtgcatcatttgtgcagcaaatccaaacgacatgtttaagtgggcagagtggtggggcaatgaggactcaattcaacagctttgagagaataggccaatgggagtaatttcttgaccttgatctctgaaggcagcaccatagtccaccatcgaaggcggctcaccgtatcaagtcctcaatgtaagattcaaggtgcgttttcacttgcatccagcccagactggctgatgtaataaatactgaaactcacttttgttttctgtaatacttcatcaagtcaggaagttggaattggggctgggcgctttgggaggctgaggcaggcgggtcacctgaggtcaagagttcgagactagcctggccaatatggtgaaaccccgtctctactaaaaatacaaaatacaaaaattagctgggcgtggtgacgtgtgcctgcagtcccagctactcgggaggctgaggcatgagaattgcttgaacctgggagacagaggttgcaatgagccaagacagcaccactgcactgggaatgactcttaaggtcatctagtgaaatgttctctaaacctttctggggtcagagacaccttggaaaaatctagcaaaaattatggctcctccccaagatataccagtgcccacatacacaaggatttgcatacatttttttcttttttaatatacattttatatatttgtttttgagaaggtaatacattcctttggttcaaaactcaaagaatgaggcctggagtggtggcttatgcctttaatctcagcactttgggaggctgaggcaggaggattgctttaggccaggagttcgagactggtctgggcaacatagtgagacccttcctctacaaaaaaaattttaagattagccgggcaggctgggcgtggtggcccacacctataatcccagcactttgggaggcccaggcaggcagatcatttgaggtcaggagttcaagaccagtctggccaacaaggtgaaacttgtctctactaaaaatagaaaaaaatcagccaggtgtggtggcacacgtctgtaatcccagctattcaggaggttgaggagggagaatcgcttgaacctgggaggtggaggttgcagtgagccgagatcacaccattgcactccagcctgggtgacagagctagactccttctcaaaacaaacaaacaacaaccaaaaattagctgggcaaggtggtgcatgcctctggtcccagatacttgagaggctgaggcgggaggatcacttgagtctgggaggtcgaggttgcagtgagcaatgattgtgccattgccctccagcttaggcaacagagcaagaccctgcgtcaaacaaacaaaaaaacaaaggatgcaaaggggaatatagtacaatggcccctctgctactcagttcccttctgggatgcaaccaatactactcaatttctcaaggcatttatgcacatctaaagcccattcatgaattgaggttagaacttacgtctggtctggccgggcgccgtggctcacgcctgtaatcccagcactatgggaaactcaggtgggcggatcacctgaggttgggagttcgagaccagcctgaccaacatggagaaaccccgtctctactaaaaatacaaaattagccaggcatggtggcgcgtccctgtaatcccagctactgaggaggctaaggcaggagaattgcttgaacctgggaggcagaggttgcagtgagctgagatcgcaccattgcactccagcctgggcaacaagagcaaaactctgtctcaaaaaaaaaaaaaaaaaaaaaaaaaagaacttatgtttggtccatccactctgtaatgatgaagaccccaagccacagagaggtgaaataacttgcctatggtcatacagtggcagagtctgggctagattcttattagggaacagctataatagccttttttttttttgagacggagtctcactctgtcgcccaggctgaagtgcagtggtgcaatctcggctcactgcaacctccgcctcccgtgttgaagcaattctcctgcctcagcctcccgagtagctgggactacaggcacgtgccaccacacctgtctaattttttgtatttttagtaaagatgggtttcaccttgttggccaggatggtctcgatctcctgaccttgtgatctacctgcctcagcctcccaaagtgctgggattacaggtgtgagccaccatggctggcgacttcttttttttttttttttttttttgagacggagtcttgctccgttgcccaggctgaagtgcagtggcaccatctcggcccactgcaagctccgcctcccgggttcacgccattctcctgcctcaacctcccgagtagctgggactacaggtgtgcgccaccaagcctggctaattttttgtatttttagtagagacggggtttcactgtgttagctaggatggtctcgatctcctgacctcgtgatccgcctgcctcggcctcccaaagtgctgggattacaggcatgagccaccgcgcctggcttttttttttttttttttttttttttaagtatacttgaggccgggcgcagtggctcacgcctgtaatcccagcactttgggaggccaaggtgggcggatcactcaaggtcaggagttcgagaccagcctggccaacatgctgaaaccccatctctactaaaaatacaaaattaggagtggtggtgcacacctgtaatcccagctactcgggaggtgaggcaggagaatctcttgaaaccaggaggtggaggttgcagtgagttgagattgcaccactgcactccagcctgggcaagagtaaaactctatctcaaaaaaaaaaaaagaatacttgagagctgggcatgatggtgtaatcccagctacttaggagacatgagcattgcttaagcccaggagattgagactagcctgggcagtcttggggaaaaaaaaagatgaaagaaaaatttaaggacagtttctatgaggagtgatgataaggggggcaaaaggatagcgatacctggtccagtggggttcaccgtttttactaattcttggaggactagcaaaaaacatttatcccttgtagcctttgggggaagggaatgttcagagatatttctaggtttctgactgtaaatgtcaggtgggcctgaactggtagagtcttttttttttttttttttttgagacagagtctcactctgtcgcccaggctggagtgcagtggtgcgatctcagcccactgcaacctctgcctcctgggttcaagcgattctcctgcctcagcctcctgagtagctgggactacaggcgcccatcaccacacctggctaatttttgtctttttagtagagacggggtttcaccatattggccaggctggccttgaactcctaaccttgtgatctgcccacctctgcctcccaaagtgctgggattacaggcgtaagccactgtgcctggctggtagagtctttttttaacctttgatctgtggcccttcacaccacctcccctctttgctgatgggaaacttttgaaggttttttgtttttttgtttgtttgttctttgttttttggaacagggtcctgctctcttccccaggctggagtgcagtggcatgtccacggctcactgcagcctccacctcctgggctcaagccatcctcccgtctcagccccctgagtagctgggactacaggtgcatgtcaccaccatgcctggctaaacattttttttaaagagatggggtcttggtacattacccaggcttttgaaggtttagagtcagataagcaactgactccaaaccaacagggagcaactatcttggcatggaaggagggggtaagggagggacaccaaggactcccccgttttcccttcagcttggggcttctcagttctctccctgccacccacctctgcctggccatctctcctccacagctaaagggggaactgaaggagtctagggacaggccagatgctgtgcaatgttcctggcagctgcacattgtaccattccagctttaggcctgtctaggaggaaggcgtgatgagccccactttatagatgtgccaactgagctcagagaggttaagtagccaaggccctttagacccagtgcaatccaagccccaggcagcctagagcctgggtctgcccagactccagtgttcctttgtgcagagggccacaaacttctgacctgcagagcccaggaaaccaagactcacagcaccagccccatcccttggccctttccacatctccttgagtctgagtgtgagcctcaccgacaccagtgagcaaggctatctacaggcagggctgtcaggaagccccttggggagaacactttctaggttctatgttcatctttaattatttttattttattattattattatatatatatttttagagatagagtctctgttgcccaggctggagtgcagtggcgtgatctcagctcactgcaacctctgcctccaggattcaagcgactctcctgcctcagcctcccgagtagctgggattacagacgcctgcaaccacgcccagctaatttttgtacttttagtagagatgggatttctccatgttggccaggctggtctctaactcctgacctcaagtgatctgcccacctcagcctcccaaagtgctgggatcacaggcgtgagctaccgcacccgtcctaggttctatgttctgagggaacacagtggagctgtccaagcagtatttccaatcagggattctggagcagggctgttcttctgaagtcgtcctcagttgcctcctaccctcaaacttaatttaaaaatgagcttacctctgtctcatttttgatggaacagagagatgacaggaaacaggcagtggccctgatttgtaaggtatattgcttctgtggggagtatctaccccactagctggtgtcttccctcccagtcttgcttttttttgagacagagtttcactcttgttgcccaggctggagtgcaatggtgcaatctcggctcactgcaacctccgcctgctgggttcaagcaagtctcctgcctcagccttccaactagctgggattacaggcacacaccatcatgcctggctaatttttgtatttttagtagagacggggtttctccgtgttggtcaggctggtcttgaactcctgacctcaggtgatacgcctgcctcggcctcccaaagtgctgggattacaggcgtgagccaccgtgcctggcctcagttttgttttcttcaggctgaaatgctggtcagttacctcttgggcgtagcttgattgtcctgcctctttgggggtcacaggtgtgcatccaccaggtctggggtgctggatccaggaaagcttacctctctacatgggaactataattgtggctcccaggtttaggttagactcgagagaagtgtcccaactcctgactggtctcccgtaagctctggtgtctgcccacttcaggccatggctttgtagcagaatccattttttttctacatctgagcaagtcacacccttgcttagaaacctcccttggctccctgttgcctacagggtaagtccaaatttcttagaacaacaatcaaagccatcatccaccatttcgccatcccaggagtttgtttatttatgtatttatttcaaaacagagtcttgttctgttgcccaggctgggcagtggcacaatcctggctcactgcaacctccgcctcccaggttcaagtgattctcctgcctcagcctcccgattagctgggactacaggtgtgcaccaccacgcccggctaattttttgtatttttagtagagacagggtttcactatgttggctaggctggtctcggactcttgacctcaagtgatctgccagtctcagcctcccaaagtgctgggattatataggcgcaagctatcgtgcctggccccaggagtattttaattttaaaaaaggtattagatacacatggtaaaagaaaaaaaaatcaaagagcctgagaagatactcagagaaaagtaagtcggtctccttctcattccaaatctccagttcccctgcactgtgggcagttatttcgtgtacatgttcagcagtattaaaagcacagagaagcttagatctataatatatgtctcctgagggcagatcttaggacaagccaggacaagcggaaaggtccaggacaaggaactgggcttgggtcagacagagccccaatctgggtctgggggctgatggaaagtcagcaagatgccccctgcccccacagccaaggattggttctggtgcatcctaggcttctgggcaaggagtgtgagtgagtgagtgtgtgtgtgtgtgtgtttgtgtgtatctttggcccacaggcccacatccagggcattcacatccctgtgtttagctgggtgccctgagcagcccctggatgactggacattctctggaaggacttgggggaagaagtggggcagtgactatggaggccagctatcccaacagcgtccagagccttccttaccaatagcctcattcccctccctctcccaccagccacagcagctcgtggaggctgtcagaattgtactcctaggtcacagacagggatgctgtggttgaaagaaaagactgaaggagagacattattattattattatttgaggcagagtctcactctattacctagcccggagtgcagtcacgcactcttggctcactgcagcctccatctcctgggttcaagtgattctcctgcctcagcctcctgagtagctgggattacaggcaagtgccacgatgcctggctaatttttgtattttcggtagagacagggtttcaacatgttggccaagctggtctctcactcctggcctcacgtaatcagccggtctcggcctcccaatatgctgggattacaggcgtgagccaccatgctccatgggagagaaattattgactgtagactttggaactgacagtgggccaggcactgtcatatatgacttctccttcattatggtaaatctttgaggctggtcgtggccatgattctcctttgaaaggaaaatccccacagtaggtcctattattggtcccatttcatagacaggcaatcgagacaggggtaaataactcacccctgcctggcttcactcctctttgtcacctgaaggacagttcacaccctcccctcactctgcccccacacctcgcttttcaccagcacagaccctgccagctgggggtggtgtttttgaggggaggagtgagcacttggaaccccagagctgcagt

SEQ ID NO: 357 - DNA, 3473 bp, Homo sapiens
gcgaagagagggctgaacccgtccgctgcccgggcggtggagcccccacggcgaggcgctgcgccggcggtggagactcgcgttccctccagcccctggggcagaactttctcgccccccctcctccctcccccgcagtcggactccctccccagccggccagtcctcccggaggagaaggcgccgcggagacagcccgggcgggggcctaccttccccagggcaggcatcatgtcggcggcgcaggtgtcctcgtcccggagacaatcttgctacctgtgcgacctgccccgcatgccctgggccatgatctgggacttctcggaacccgtatgccgcggttgcgtcaactacgagggcgctgatcgcatcgaattcgtgatcgagacagcgcgccagctgaagcgggcgcacggctgcttccaggacggccgctcccccgggccgccgccgcccgtcggggtcaagacagtggccctgtcggctaaggaagcggcggcggcggcggcagcagcggcggccgccgccgccgccgcgcaacagcaacagcaacagcagcagcagcagcagcaacagcagcagcagcagcagcagcagcagcagcaacaacagctcaaccacgttgatggttccagcaagcctgcggtgctggcggccccgtctggcctggagcgctacggcctaagcgctgccgccgccgccgccgccgccgccgccgctgcggtggaacagcgcagccgcttcgagtacccgccaccgccggtgagcctgggaagcagcagccacaccgcgcgactgcccaacggcctggggggcccaaacggcttccccaaaccaacaccagaggagggacccccagagctgaaccgtcagagccccaattcttcttcagcggcggcgtcggtggcgtctcggcgtggaacgcacggtgggctggttacggggctgcccaacccggggggtggcggaggcccccagctcaccgtgccccccaacctgctaccgcagacgctgcttaacggcccggccagcgctgcggtactccccccaccccctccccacgccctgggcagccgtgggcccccgacgcctgctcccccaggggctcctgggggccccgcttgtctcgggggtaccccgggtgtatcggccacgtcgtcctccgcgtcgtcttcgacctcttcgtcggtggcagaggtgggcgtgggtgctggtggtaagaggcccggctcggtgtcgagcacagaccaggagcgcgagttgaaggagaagcagcgcaacgccgaggccctggccgagctgagcgagagcctgcgcaaccgcgccgaggagtgggccagcaagcccaagatggtccgcgacacgctgctcacgctggcaggctgcacgccctacgaggttcgcttcaagaaggaccactcgctgctgggccgcgttttcgccttcgacgccgtctccaagcccggcatggactatgaattgaagctgttcattgagtaccccacgggctcgggcaacgtgtactccagtgcatctggtgtggccaagcagatgtatcaggactgcatgaaggacttcggccggggcctatcctcgggtttcaagtacctggagtacgaaaagaagcacggctccggggactggcgcctgcttggagacctgctccccgaagccgtgcgcttcttcaaggagggcgtgcccggcgccgacatgctgccccagccctacctggacgccagctgtcccatgctgcccactgctctggtgagtctgagccgcgcccccagcgcacccccggggaccggggccttgccgcccgccgcgccgtcgggccggggcgcagccgccagcctgcgcaagagaaaggcctctccggagcccccggactcagccgagggcgcgctgaagctgggcgaggaacagcagaggcagcagtggatggcgaaccagagcgaggcgctgaagctcaccatgtccgccgggggcttcgcggcgccggggcacgcggcggggggtccgcctccgccgcccccacctctgggaccccattccaaccggaccaccccacctgagtcagccccccagaacggtccgtcccctatggccgctctcatgtcggtggcagatactctgggcacagcgcactcgcccaaggatggcagttccgtgcactctaccactgcgtcggcgcggcgaaacagcagcagcccagtctcgccggcctccgtgccggggcagcgccgcttggcatcacgtaacggggacctgaatttacaggtggcgcccccgccgcctagcgcccacccgggcatggaccaagtgcacccccaaaacattccggattcccccatggccaacagcggacccctctgctgcaccatttgccacgaacgtttggaggatacgcatttcgttcagtgcccttccgtccccagccacaaattttgcttcccttgctctagagagagtatcaaggcccagggggccaccggcgaggtgtattgccccagcggagagaaatgccccctagtcgggtcgaatgtaccttgggccttcatgcagggcgaaatcgcgactatcttagctggggatgttaaagtgaaaaaggagagagacccttgaaccactgggcagccacctcctttgccctagaccagctcctctccaatcctgagggcccctcccccaacccaactcgaccctccctcccctcacccccaaggtgtagaattgtgaatataacgaaactgcaaaaagttagtcttatgtatagacattattttcgtcgtatgtttctatattttgaaacaaaggtatgtaacttcttcatttgaaggataagctggtttgtgttaagcagtatagtattggttgggtcatttgcatcatatcgttagcatttatttggtggcagaatgtttgcctaggtacagaattaatagcccttagcaacgactgctgctggtgtgtatttttgtaaatgttatgcactctctgaaaggaaaaacacacacaaaagaaaaagactttttttttttttttttttttgccaaggccagtgttgctgcctaaaaaaaaaaaaaaaaaaaaaaaaaaaaatgctttaaaatggtgaaagcttccttctaaactgccccaagtgttgaagtcttcactttattttgttctgttttgttttgtttttctgttttgtttgcaaaatggtaagggggtgtcgggggggatggggtgtattttgttgcaagtttgtgaggggaaaatgttttggtttgtttctactgacctgaatgtgttggatctacacgtgttgttttgtttttgctttattgatgcacggatgcttttgaacagtagagcgaaatgctagacatggagaatctgctctgtttgtcctttatacatttctgtagttaacagaacactgtaatgtgccttggagcttagtaacttgtaataaattcaattgatattaa

SEQ ID NO: 358 - protein, 790 aa, Homo sapiens
MSAAQVSSSRRQSCYLCDLPRMPWAMIWDFSEPVCRGCVNYEGADRIEFVIETARQLKRAHGCFQDGRSPGPPPPVGVKTVSAKEAAAAAAAAAAAAAAAQQQQQQQQQQQQQQQQQQQQQQQQQLNHVDGSSKPAVLAAPSGLERYGLSAAAAAAAAAAAAVEQRSRFEYPPPPVSLGSSSHTARLPNGLGGPNGFPKPTPEEGPPELNRQSPNSSSAAASVASRRGTHGGLVTGLPNPGGGGGPQLTVPPNLLPQTLLNGPASAAVLPPPPPHALGSRGPPTPAPPGAPGGPACLGGTPGVSATSSSASSSTSSSVAEVGVGAGGKRPGSVSSTDQERELKEKQRNAEAELSESLRNRAEEWASKPKMVRDTLLTLAGCTPYEVRFKKDHSLLGRVFAFDAVSKPGMDYELKLFIEYPTGSGNVYSSASGVAKQMYQDCMKDFGRGLSSGFKYLEYEKKHGSGDWRLLGDLLPEAVRFFKEGVPGADMLPQPYLDASCPMLPTALVSLSRAPSAPPGTGALPPAAPSGRGAAASLRKRKDEPPDSAEGALKLGEEQQRQQWMANQSEALKLTMSAGGFAAPGHAAGGPPPPPPPLGPHSNRTTPPESAPQNGPSPMAALMSVADTLGTAHSPKDGSSVHSTTASARRNSSSPVSPASVPGQRRLASRNGDLNLQVAPPPPSAHPGMDQVHPQNIPDSPMANSGPLCCTICHERLEDTHFVQCPSVPSHKFCFPCSRESIKAQGATGEVYCPSGEKCPLVGSNVPWAFMQGEIATILAGDVKVKKERDP

SEQ ID NO: 359 - DNA, 41202 bp, Mus musculus
  misc_feature (1)...(41202): n = A,T,C or G
tcacttgatggtgactgagatttatgtccccaggccagcattgaggcctctcaggagctggacaaggtattcgacgccattgagcaaaagaaactggagctggctgactacctgtgcgaagacccccagcagctgtccctagaggacacgttcagcaccatgaagaccttccgagacctcttcacccgtgccctgaaggtgtgtggtgggcccaggaggagttaggtgatgcctgagaccggagtggggtttccagccaagccaggcagaatttgcccgtttgttccaagctgtggctaggtatgcgccatgtgtccttggtatacccactgagggtcactgggttgggtgacgaggctcccgtctgtctgagcaggagaacaaggaccggaaggaacagatggcaaaagcggaaaggaggaaacagcagctggcggaggaggaggcccggaggccgagggacgaggatgggaagcctagtaggtctcagggacaggtgggacccaggtggggctgctggccttcctcgcccaagcctagcagggcttgtcctggggtggcctccggatctctgagctgctctctaaggtctgtggctctgctctgcagtcaggaaggggcctgggaagcaagaagaggtgtgcgtcatcgatgccctgctggccgacatcaggaagggcttccagctacggaagacagcccggggccggggagacactgaagcaagtggcagagtggcccccgcagatcctccaaaggccacagagcctggtgagatctgagcctgtgtccttctccccactccctcctaccacttctaccctgcctccgagaagctctctgggtcctggaccttcagggcccctacacacactgttctggagacgtttgggggcctagggggtgggatagtaaagacccaattggcacaactctgaaattggcctatgagaggactgtgcctctcttaaacattgtcatctttgggtggccaggggatgtgaggttgggggtccactgctggacacccccttgattcagggcactggagatattcagacaggcaaaccttaggaagggtttcactactgggactttagaaatggatgttttttgtggccctttggatgtcctcctgtcctccatgtgtggccagactgaagatactgccttcccttggtccataagaaaccatgttggggggctcctgagaatgaagtttacagtagtttaggaaggttcagggtcaggaacacttcctgggtgagaccagaatgcctaaaatcctggcccttgcccttacggacacatccctcaatccacagcaactgccagcaatcctacccagggcacaaaccaccctgcttcagagcccttggataccacagcagctgacgagccgcagggctgggaccttgtggatgctgtaacccccagcccccagccctccaaggaggaagatggtcctccagccctggagaggcgctcctcctggtatgtggatgccattgacttcctggaccctgaagataccccggatgcccagccctctgagggggtctggccagtgactctgggagatggtcaagctctgaatcccctcgagttctctagcaataagcctcctggagtcaagagctcgcaccaggacgctacggatcctgaagccttgtggggcgtccaccaaaccgaggcagacagcaccagtgagggaccagaggatgaagctcagcgaggacagagcacccacctaccccgcacaggccccggagaggatgaggatggagaggacacagccccagaatctgcacttgacacgtccctggacaggtccttctctgaggacgcagtgacagattcctcagggtctggcaccctccccagggtccaaggccgggtctcaaaggggacgagcaagcggaggaagaaacgtccctcaaggaaccaagaaggtaactgggaggcgggcgttggtgagcaaggctgggggacagctgggtctgaccgtgtggttaaagccgattgtcccacaacagggcctgggacctctccctgctgtcctgctggtccctctcttacccctgcgggtcctacaggctcaaccagcatccaggagagagggtgattcagtggggcacagcacttcacacaagagggcagcttggggggccactgcctgcatcactcacctgctgcacattcctgcctccacaccccttctgaggggagtggagcagggtagccctgggctcttgctgctgcagggtggtctgacattaagttcctaattgcagcttcttttgtcaccatgaccaaagaatcaactttggtccagtggttagtttctgaccctgtccaagagtgttggcacagctagcctggcccccacagatcccaccaccctaagttcagggctgtctcgtgtgctaagctgatgagtgtatttcctttatttgaaagcagagtttgtccctgattctgatgatattaaggcaaaaaggctgtgtgtgatccagtgaggtatgtatgcagcctggcttgtgttgactaatgatgacagcgggttccggggcctcagcctgctgcctggccctcctgagcactaacctagcttgtctccagccctctcgggataccagtaaacccctcccttggctcatggtggtggtgcctctgctgtgctgccttgttagagaaggcctggctgccgagccttgcctgcccagggtcttctcactcccagctggacacaacctcagaactggactccagatgggcctccaaggcatggtagagagagccaagctgcgctccctgtagggagtgggactccaggcctttgtgggcacagtgtgggctctttggggatggctgtttcttagtcctgcaggacagactgaggttgtccctattcgtgtctcggccctacatggtcaaggtaatggccgctttactaatcccagcttcccaagtaggcaccttccctccgcacggggccagtcttcccaacgctactctcgctcgcctatggtctgggttatggtcaaacatatgcctgaaaagactgtagaaatgggtgtgtcaagtgcagatgctgccaaaggcaaaggggcaggggcctcccctccttgtagccaggagcagagctggatccatgtagacgccaggttgtctttcttagtgtttacttccacgaacagagaccatgaccaagtcttataaaaacatttaattggggctggctgacaagttcagagattcagaatcatcgaggcaggagcatggcggcatccaggcaggcatgggtcagggggagctgagagttctacatcttcatttgaaggctgctatttgtggaatactgacttccaggcagctaggatgaggttctgaaggccacgcccacagtgacacacctatttcagcaaagccacacctcctaatagtgccactccctgagccaagcgtgtctgaaccatcacacaggtcttcctcatatggaccatggtgggtcttctgggctccactcgtggcaggacagccagagccaacatgtggcccaagacgttaaagatgcatttagaccagcttggggccctgtcccgtggccaggaaccatggatggaggaaggcccggataggacaaaaaagtctggccccatcatgaactgtgggagcctgaacaaaccccaaacatctctggcccggcacagggaccctgggtctgcctgcctggcactctgaactgctggccactgggctgaagtctcaggatcgaggtacaaggatgaggtctgttggtgccttgtaggcaggagccacagggagctcagagcatgagtttaccgttactcttggcccagcctgtgcagtggtcattcctcattttttcagtactgttgaccctgaagtctggtctgccccattggttagtgcattttgatgaaaaccagctcatgtgtctctggataggcagcctctccatgccgagcacccctgttctagctaacccagatgtgctccactcctgcgttggttggttcatttccccgctccctgcagtgtcctaataatgctctgggcgaagctttgacagcctctgctctgccccttttcccttcccttctgggcagattctcaagctcaaggctccaagggggaacctggagccccactcaccgctggtggaaaagcggggtttttaggcaactcggagagtattgggagcagggttcctacaggctcaggttggtggcagtttcagtgtgtggctgccagcccagggccctccctgggcagcacccagtcagataggaagcaggaaggaccaagtccggttcaaaggacccagtgaggctggttgagagcagacagtgggtatgggtctgtgaaaagtaggccatttcagcctggcgtggtggtgcacgcctttaatcccagcacttgggaggcagaggcaagaggatttctgagttcaaggccagcctggtctacagagtgagttccaggacagccagggctatacagagaaaccctgtctcgaaaaacaaacaagtaggccatttggagcccactgaagacagtccagctcaagaaatcacacctggttgtgacagcctctgagacagcagcctgcgggaatcaacttagctccatccactcggatgaattctgcagcccagagaagaatctggcaccagagtggacccggatacacttcagggtctggggatggcagtgagaccctttattgggcatctagagcttcctgacaaaggctgctgtaacattctcatttccttccccacaggcctcaggtccaggcccaaagccaagtgagtgctctcgtcggctcagcacatcggctggatgtgttgcctggagaggctcttcggggccaggctgggactgggcccccgagaaacccaaactccgtgccttacccagccaggatccttgggagccttgggcattgatgctgggacctggcctggcaccctgggccacctgcacgctcttagcccctgcttttgcaaaccactcccaccccctatcgcatgcaccacaggggtggacgggagcctcctgcctggctctagggagatggatcacagacacctgcactggggctgaaacatcccctctcccccaacccccatggctcagttgatttttagctgagtgctgttttctgcatctttattctgctatggctgagttgaggttagtgagggactgagggaatgctcgttggaagtgctgtgggtaggacctggcaggtaggctctagggaacaaataaacaaaaagttcatgtgcacaatgagtggtgaccagaccactgcagctgtcatctcccttggtgtgtgcccagtggggaacaagctgcccctgctcagcccctctcatgtgtgcactgttgagtctgcaggccagcagggattttaaccaataaagagcaaccttgtctgtcatgagtgtggtatttagaccattagaataggaagtaacactgggagggcgatctgagtcctcttctcttcccctgtggcactggggtgatgggacttagtggagccaagtgagtggggaaaaggctaggtgggagtgcgtggtgggaagattgatgggtgaaccaggggaggggtggcaaaggagcaggagaggaagcccaaagggcgggacctggacccatgcatgctactgcccagcctgagtggtctcttgggtctgcagatgcattctcccctgctcacaccaccagcagataggatgaggccatgtcctgatggtcgtcttcagcagactgtcgcctgccaccagaagagggtaaagtgggtggtaagctagatggggtgcagcagtatcacacgggagctttcaaatacctgagtggatgtacaggctgcgtgggggtgaggcctgaagccaggtaattcctcgggcgacagtggatttgcaggccgggttcctcagaggcagttggtaaaggcaggagagtcttatacaccaggctcttgcaagtggggatcccagctcaagagagaagtaggggcctagggcagggaggcaatgttggggctcatgttgccacccgtgctcaggcgcctcctgtcctgccccagaaccctgaaaactgctgtctgtctgcccttcagcctttagccagggtagtatccctaaatactatccagggaccctgtccccagactcccaggaagtccagtgtcttagggtttttattcctgcacaaataccgtgaccaaggagcaagttggggaggaaagggtttattcagcttacacttccacgttgctgttcatcaccaaaggaagtcaggactggaacacaagcaggtcagggagcaggagctgatgcagaggccatggagggatgttacttactggcttgcttcccctggcttgctcagcctgctctcttatagaacctaggactgccagcccagggatggcaccacccacaatgggccctcctcctcttgatcactaattgagaaaacgccttacagttggatctcacagaggcatttcctcaagggaggctcctttctctgtgataactccagcttgtgtcaagttgacacacaaaaccagccagtacatgcagtcactcctgggcctgggatcagtgctggcctcggcttacttctcagtcagtcagccgcagcctcctttctctgtgtaaacagagactcagccactccccaagcatctgccgacgacggttctcaagccctggggaggtggtggtgggaaggagatgggaactaagaccagacaggggcaagtggcagatggctccacactgtcatggtgtgatggctaatttgcattgtgggaacctcaccccgcactctgcaaacctcttctgccagtcaaatggccgtgtgatggccagcaactatgatcaaaaaggctaaagagatggctcagcggttcagcacaccggttgctcttgcagaggacccaggttgtattcccagcacccacatggcagatggcagccatgcataactccagtcctaaggagcctgatgtcttcttctggcttctgtgagcaacaagaatgcatgcagtcaaaacacgcatacacacacaaaaaaatttcaaattcatgatccaggttttccactaccgaagaatcccctcgtactcacaagcatctactgttctggccctagccccaccatctggctttctctgggtttgcccgttccaagcatgccatataaatagaggtattgaaactgtggctggctgcttccggttgttcttgagagccgtggggcagcacttcgcagctcacggctgagtcacagtgtgtcaccggctggagtgagttcctttttcccattcaacagcttctgtgtgggggactccatctgagggtgtgtgaatggtgctaagggcgggataggcctggtgtgaaccatttatatctctgccgtacacacctaacctgggctgcaggctgggagtaactataactttttaaaagactttcccaaagctgctaccttattcccaccagggatacttttaattttttttaactactggtgcgggagtgtgtttgccaccgcattcatgtggggatcagaggacaacttctgagaattgtcctctccttctgtgtggacccagtggaagggtggcaagtgccttttactataaacagtcttgctggttccttgggcgattgcttctgcagcctagctctgtcagctccatcttcacactctggagttcccaggtattgagttgtgaacggtctgcacctggggtggaatgcctacctatctcatcaggcaaacctgcaaggtcagcacttcacctgcctggggaggacggagagcactgcctccccagccttcctccccattgctttctggaagtcggcctcgtggctaacagacctgggaaaacccagcccagtggcagctatgaagcccctggaacctccttgcaaaggctcatgggtgccagatcatgtgcattgtctgtgtggcggtgtctcttgataacccagagggaaccataggtggcgctgtgcctgcgtgccctccctctaagcctatgcaaagcttagcagaagtcacttgtctgaggtcacacagctgcaaagccagactccccccaaacttagcagctgctacactgcccaccatcccgggctgggctcactgagggggtgggggtgctaattccggctgagccttgtgactggcagggtcccagctgttgagcctgagtgaagctgtttttagaaaagccctccccgttctatgtgggcccttggctatttatagtctcaggcttagaagcctcagtgcccaggacccgtctaagcccccatagtaggtccctctgaaccctaaatgcctctcacccagaaccccaggttccccccaggaaagggagccaggattcctttcaggcttgcagcaacacctcccaaggggacgagggcaagcattaaagtgaccgaagtgacattcaacactggcattcttaaagcgtaatctttctcacctggagaaaaagttcattgacctgtgtaacattctgccagcctctctcctccctcagtcctcagaagctgctgtgccccctacccttcctcctgtgacaacccccccccatattctcctgtttaccccttgtctccgttcctgcatcagccttctctgcctgctttgccttctgagcacaccttcctgaaagaccttatcagggatttctgcctgtcccagccactgctcaggagatcttggcctgaaccactaactctagatgccacgtctactcgcttgccccctccccactgtggcactgagtgaggtagagaaggatattgtaatctgcacacaaagactgtaaggctcttctaagaagtagtgtccagatccgaggccctgactgcttcagccatagcaactgaagagagtgtctatgtccctatgtgaaacagaagacacagaccaccatgacctgcacagccagggagggtagcagcagtgtggctgaggctgactgggaatagcctctcttccccaagctgggggagggggggtgtcagtcccccagagggtgtgtctagtctcactggtcttgtgacagtcctgcgaactgcccccaggacaactaggagcctgactgctctgtgaacctgtcccaggggtcagttagcacaccctggaaggacacgcaccagtggggggctggggggagcatgccacacaggcctcccagcctcaggactttcccttgtccctgtttccagtctggactgagtggcagaaaccatcgaccccgaggtctcttggaaagttgaatcctcctctgctcctgtgtccctcaagttgctctgaccccgagcggatgtgggtacttcatcttacacttggcgctgggctagtagctagctacagccacccaagagctgcatatcctgggccagcaggggtgactatgtggcctggtggagagagatcgtcttagttaaggtgactttctgggcggctctcaggagaaccgttcctggtcctggactcgaggttcaagacgggaaaacaggtgatcccgcaggcagatcctccagattaacggcaaagaaacatctgtggttctgcttttgttaaccgctctcttgccccggaaaaagcagcctcctccgctgtttgtgcaaccccaaaccctagtcctagcaggccagtgggcaggggtagagtccgggtcgtgcagcactggcacctctcacgtcctagggtgttctgagtcatctgcttgcccaagtcgtgtcggggcgtctagcaccctaagtgcgcgccatctgcagcgacagcggcagggacagggagctgtggccgcaggtcaccgaggtgcgtcaccgcgtgcgcaggacccgcccccggcccgcccccctctctaggcgtccgcatttaatggagcgagagctctggcggcggcgggctctcgcttggcccagagcagcagaggagctaagccagcatgtccgggacccgagcctccaacgaccggccccccggcacaggcggagtcaagagggggcggctgcagcaggaggcggcggcgacaggctcccgcgtgaccgtggtgctgggcgcgcagtggggggacgagggcaaaggcaaggtggtggacctgctggccacggacgccgacatcgtcagtcgctgccaggtgcgggccaggcgccgagtccctccctaacctgcccagcgagcctctccccttccccgggatccggacgaaccccttcctcctgtgccctgagtgggtcacagccttttggattcctccctcccaggagtaccttccccactgcctaagtcctccttcccacacacaccctctcacacaaagctcttggcctcccaccacccacccacctcctccccagggcaatggcaggagcccgagctaaaaatataagtcgctgagttgaggacatgggatcctcaggggtagggcgttccagggcggtgatggtgggccctccagtggggaaagccccaacggggtgggtcgaggtaccctaagatgcagcaaagggtgagagctgctttctgagaaggggggtgtcctcggcgagtcagccaggcagagacaggatgaagataggtttctaacctagaggaacgcagggtcaggagcctaaagcagagttcaaaggggtctggctgacatggagaaaggaggagtcacagatttcccgggcagggtgtgacccggtggctggtagtgctcagagaaggccagagacagtctttgtgcccttggccagctgcaaagtgctctgagcacccacatttgttctgactgactctggacagcgggtgggtactctcctagggctagctgcctgctctccttaagtctctgtggtgttgagctgcagctaacagccacactgcctctgcggtgccatcctcagcacagagggctcggtttgagggaagatactctgtgatactgggtttggagccacacttatggctgctgacccaaatgaaggtgggaacacctgctggagttctgtctccctggttctgtggctttcttgctgagttcccgaggactcctaggaggcctccggaggcatagcttggttccctgggccacatttgcccagctggggatgaggatttctggaaactctcttaagaatgaggagctaccctgctctctcaccctgttcacccctctcccttgaagtctctaggtcctaaggacagaccttgggcctcctaagccctacaccttgcatgcattgtccagctatgtgtatgtaactgggatttactcccagcggtctggagtcctgctctccagcgacccagcaccaaagcccccacccttcctcagagccgtttgctcctgtggcgcctacagtctttccacacaacttgctgggtttggtcagcactgtcaggggtgagcctcgatggtcccaggctccgtctccttctgcggacacagttctgggtgaagatgagctatccctgctctatgcccaagtcaccatgacagatccagatccccatttcttgacaggacattcaaggatcagcacagggtcacagtcacccactcagaggggctatctctcccaccacctgacctccccagcagacccaaacaggtgttcccctgaggaatatgagaatagagacatgtttctcttccagtctctcgtgaactagcaagtcaggagcctcccacagagctcctctacaggttgggaaactgaggctcagaaaagttgaagaaccaaactaactgttcctttgagtcccttgaagcctttatcataagccaagagacctgtcctctttccccccacttcatggacaaggcagaagagtcagccttccatcaagccctctggaaatcaactccagtcctttccctgagtgcccagcccctgagtcattgcaagcacttggtgactactctggtttcctgcacttgtccttccccttggcggggacctctttgcttgcctgtggcctcccatatcttccctgatcttatgtgcctatggccagccctgtgtgatcagaggctggcagggtggggggctaggtaagttgcctctggctttgaatgggtgcacgaaccaaatgaaggctccagaggccaagcccaaagccgtgccaaagggctggcaaacacaagaatgcaaatcaagtgtcccccctctcccccagtaagttcgctacctaaaaatgctgtatagccagctaggctacccgttccttgggcttctggagggtgagctgtcctaccacctaaccctttgagccaatggagccatcctccagatctggcttccacacttttccatgtccacagacacttgttgctggtctccactaccctgggctctgactctgcccagccctgccaggtaccctcatttcttgctttgctaccttgattaatagagggtgtatgggtcagaatgtaatgctgagtccctaggagcacccccagccagcatctctggcctggagtccagcctgcattcttctttctcccggtgtccctgctctgattcggtccatgccccacccctcctgacacacagtcagtcttcctctaccctgcatctctgaggctgctgggggctgcattgtcttcctctctggttcctctactaaatccactcctcactcacctccaggcaagtcttcctgacctcctgctcagggtctctcttcctctcccttggagccccaggcacctctgccgaggcttccactttctgagtcctccatgtttcctcctcggccgcctgactgtccagctgtgtccagatgttccttcagatgggtctgacgtacctgttacctgaagggcatgctggccactatcttctcatgcattccattgctactctaggctctcccttctatgcccacagtaatctttctctggggctgctgtcgagctgagccttgtggaagagctggcccccaggcagtagtaaatagccagggctgtgaccacaaggcttctctagtagagtggcaagtggcacacttagagctgaggttccatgctgggaccctccatgcagtctgcaggccctctggcactttcctcaagggatcataatgggaaacacgtgaccttggaccccaggctgctcaggcagcctctggcgggtgagaggagccacagccttgtgctgggaatgtctggagctgattctaaaaccaggtcttcctgttcctgcccttgttgatggctttgatggccaagcagtgtctccgggacaggactccaagggtcacatagccacacatcaccttgggaaggatctttatattcctgcccagacctgtttctccctataaggaaagaagcaagtgagttgtatgtctgtgagcatggacaggagcgggacagtgactagacggtggagcttgggacatgttagtaactaggctcagtcctgcaagcacacaggacattccacccaaggcctgagggacagccagcgcgtacagaggagagatatcgctgtggtgagcagaaacccctgcagatgctgaaggagcagatgctgaggtgaagcagagcagaggtgcaggagccctgggagctaaatgcctattcctcagcttgccccttgtgtgcacagcacatcgacacacatgtcacttacacagagtccttccctgctgtctgtgaagaggcagaggtcttaattacccaggggcctcctggctatctcagtcacctctctgtaccctaccaggaacctacagataatcaggccagaataggaaggcgatagactggaaagcaggggcccagagcaccccctggtggaaggcaaatgccacagcaccctgtccagggacctggaggacaaagatagggagagaattaggaaagccccagacatgtgctgtgggtaccctgcatccacacacaggcttcctggatggaggagcctaagtaggcagggtgggggtatctattccaggtctctgtccagcagggccctgggactgtcctgaaaggagataccgggacactagttggttacatccagtcctgaggtcctctgcgttgcttagggtctttgcactgacagggccctgggtagtccaaaggagctgtgtccagatggccacaagatggggtgactgtaggaaaatcattggagcttgtgggtgggatctcagggctgtgggggcaggtgggctctgcagctgtgtgttaggcatggataggcagaggaaaggagtcttggtttctgccgtgcatgtccacaaccattgcatatgcagcccagccagaggatgtccctacagggcctgcacccagaacccttccctgcctcacacggaagctatgggtcataattgcagggcaaagcagaggttgggaccaagttgatctgaaacaggatctcatttgctttcggcccctctttgttttccaaagacaaaagtctcttgtcttaaacttctggacaccagggcctgagggctctgggtgaccagccaagctattgaagagtgctagggggactttgatgcacacaaagtcctcagaattgtgctgtggtgagaaccctgagaggagcctgaatgtaccaagtggcgctgccgtgcccagcaggctcctggatgcccctgaccctgggctctggtgtgaacctctgtggtacagatatcttgaggtatgtgctttgagctgtccatgtagccgttccctttacctggtcttggtgtgccttggggtgaccataccaagggtactactccacgccattcacactgtaagtagagaggagctacccttgttgatgggccccaaaggctgtgcccaggtgcctggtgtctatctgcaaacataggcagctggtcatcttccggtggagccccaggaaggggagcctgagcaagtacttagctatgacatcacaggtcctccttagtgttcagcaacctatggtcatgctgacagaaggcccctacaatagggcagggtcaccgcaggcctttgggctatctctgacacactggccagtgctgcgtgggcactgctaaactcatcctggtactgaggggtcagtgagatcctgaattctacgatgccctagagcagcccgaggctggcacacatcttcatcctctagagctggagtggcgtagggagtgtttccccacctgtgtagagctccgtagggccctcaggagcctacccactcaaggggttaatgagcctccgaaacagagctgacctctgcctctcctcacccaacctcttgcatgggagccatgtctaatcagctgtactgggcaggtctaaatgtcccacaatcctttacagaggttggcgactctcatcgtgcccagatccgattgaatgtctggtctgggttagtaaagtcaaagaaatgtgcgcatgcacatgcgcgcgtgcgtgtgtgtgtgtgtgtgtgtgtgtgtgtgtgtgtgtgtgtcggcgtggggtagaggggctcctgcttccatctctaccaactgtccctgtgcttctggtcagtctaagatctcaatgagaagagggagactgtgaccctgaggccccacagggttgctggaagcccagtgtcctggaatgacgtatgccttagcaatggcctgtgccggatgcctgggcattgcagtgggctctggccctgaggtcatctgatatctattggcccatggtactcaagcttgttcctaggcacctgtgtttaccctcaacacagacaggcgggtgcttgctgtctgtgtccccaagccagctgacgtggccctgggcactcaaagagaaggtgggaaagagtacccctcctggggtgtctgggttccatggacctagccacacagtggaaggcaggttggcaccttgctgtccctggaggcctgccagcccaagcagagctcagccatctactctctgctataagcccgtcttctcttgggacctcagtttccatatctgttcttggagaccatcttgactgcctcaggcaggaaacatgactgtgagtgttcacatatttggggaattgaaaggcggcggcaattctgcacctgctgtggccaagccaagcatggatacagtcttggaacccaagtcttgccacggtccctcatgggacatgggcttgtcccatgctgatggtgtgactttacaagcctaggggcaggacacaggcatctgttgtgcctaactgatggcaagttcaaagccagagctgcaggaggctccctcagttcccacttccttcatgtccccgcccacaaatactctctccttcccactagtccctctgggcctcttcttaggcagtttcccttccagcacaacacctgtcctgctctgtgtcatttctcctgctccatgggcagcccagggtcacagaggttgtaaggacagactgcctgctacctccaggtttcccaaggaggtaacctcctgtgcctggagccaccccaagaatcaagagctccctgcaagtcttgttaagccggggagcctcccggacagtccccgccctttacacagcaaaaggctccagcagaattgtttcagaggcttcgggacagactgcatagcatgccttctctaatagttggttgtctggggtccacgccatgaagttggcctctagctgacccatctctgtcaactacatgataataagccccacagagggcaggcaaggaacaggaaacttaggcatacaggtctggggccttctcttaaaactcttggaaagtgaagtccttggagggagagccccttacccaggctctcagcatcagtatcatctgccgcctacctcagcaggagctgggagatgtgatccttcatatccccgtgcttaggggtgtcatgaaaggaggtgaaccttcactgagggtcctactttagtaggcaagggaaagatgtgtggagctgaggtgtctcagctccatcagcaaggtaaacaaaagtgtcgtgtgcctggcctgtctgtcttctggggcagggaggggaactggagctgagggtccctaaactacagtgagcacagctgctctccattgtagttaggggcaccacagcgctgtctgcaggtgggatttggtactacaggccgtaactctcaacgtgtgggttgatccctttggggggtcacatatcagatgcctggcctatcagacatttacattatgattcataacagtaaaaaaatatacttatgaagtaacaacaaaataattttatggttgggggtcactacaacataaggaactgtattaaagggccacagctttaggaaggttgaaaaccattgttctagaaggcccttgtgccttgttccccaacacacacacacacacacacacacacacacacacacacaccagcacacccagactacaagtttctgctggacagagatctgctaaggaggctcccctacctcctgtgggtgacaggattccacagtcaaaggcaagagagttttagtgactcaccaccatgaggctctggagctgtgtacttgtggtcaggtgactggctaatggcggaaagatgctggagcctgaagcctgtccttggcgtggaccctctccccaccctgaaaaccctatcccagctggactgtccacagtcagcctgaattcccaaaagaaacagcctctctagaacaggctgacccaggagtcgcctggtcctttcatttttacccagggtggggcctggtgaggagtgtgtgtgtgtgtgtgtgtgtgtgtgtgtgtgcaatctgggctgtggggtctgcgcttaccacctcattcctccctggtagagaggggaactcagcaaggtccacctgccagggctgcagtaaagccctgggaccaggctgggcctgagcacctccatctggccatcccagcatcagatactactaactcagcccaaggtcctgaccatgatttagactccccaagccctaacactggacaatacttcttatgcaccatgtcgggagagagctggctttagagtgaggctagagtcctaggcaggcccctgtgagatagtcttcaaccctcgggtaccaatggctcattccggtctctgtttctaggggggcaacaatgcggggcacacagtagtggtggacggcaaggagtatgactttcacctgctccccagcggcatcatcaacaccaaggccgtgtcattcattggtgagtgcccctgcagccccagcctgacttcctgaaccaggatgccagtgtgtgtggagagggtggggagtctcactgtacaaaccccaaggctgggcctgccttgtgtgctcccctggagcccccagccagaaagtgtcctctgagcctggtctcagcaggagtcagagggtagaggaagctttgtggcgcacacagagctctctctgtctctctgtctcagtgtgtgtgtgtgtgtgtgtgtgtgtgtgtgtgtgtgtgtgtgcgctcaagttcatgtgtatggatatgtttgtatgtgtggagatgagtgtggaacagtgtgccgtcagagcacatgggtctgggaacagcctgcgcacatttatagctgttctttcctgatgctgcctgggctgttatagccatctacccctcggacagctgttccagatgtctgacgaggcttccctaccctggtctctctgnnnnnnnnnnnnnnnnnnnnnnnnnnnnnnnnnnnnnnnnnnnnnnnnnnnnnnnnnnnnnnnnnnnnnnnnnnnnnnnnnnnnnnnnnnnnnnnnnnnnnnnnnnnnnnnnnnnnnnnnnnnnnnnnnnnnnnnnnnnnnnnnnnnnnnnnnnnnnnnnnnnnnnnnnnnnnnnnnntctacaaggggctggggtgggcggagtcagggctcaggctggagtgggcgtggttggggctcagactccacagagcccctcctctcaagtacacgctgtctctagccctccgggtccagagccaggatggtggtgacagtcaccttccacaatgaggagccccagctaccgaggtggcctgcccccgtgtgtgctcagcagagcggcagaacggggtgctgcccatcctttggggagccttcaggaaacaaactgcttctacccatccagaaccttccctggtggaacgtcacagtgacaatgcacgtgacccagatcatgtgctgctcagccctggggatggcttggagctgacaacaggagagtgactggcaactggaagcttgctcaagaacagaggagccgtgctcatccaaagggtgtctgctcgctcagagcagccactctgcaggagcaccagcctgtgcttgcgacactcctcgcctctctgctgcggggttatttcaagatgttgtggcatttgagtgaccttttatgttcagggtggcttgtgtaatctctgagtcactccgatctggactggtgttccacctccctctgccaaacctatgccatggccaaccccacgaggctagcgtagggttcctcctgagagcaacggtgatctctgcttacttggatctcctcagtccagaccctacactggcgagctgtgtggcttcagcaggccctcctcacccctctcggcctgtgtataggcatcgagctgtgtgggcttactctgaggatcctgtatttggttttccatgataaactatagcctccaggatccttgtagggttctggaaacctttccacatttctctgtgcttccgattctttttttttttttttttttttaagtaagtacactgtagctgtcttcagacactccagaagagggagtcagatctcattacggatggttgtgagccaccatgtggttgctgggatttgaacttcggaccttcggaaaagcagtcgggtgctcttacccactgagccatcggaagcaccagcccgtgcttccgattcttatggaactgcttcattgaaccatcatttacacattacgtcaggggtggagaaggagctcagtggttaaggacaccagctgcgtttccaatttccggcacacacgtggtagctcacgagtcggtaactgaagttccaggttatctgacaccctcttctggcctccatgggcaccagacatgctcagtcatatgcaagcataacacccacacacatcaaatgcaataaaataaaatattttaaattacccactgtaaaggtgaggcagcacagttgattctagaatgttctgaggcagtagtttatatttgtgttgttttgctttgctttgcttttaaggaggggtctcatgtagcccaggccagactggaacctgttccaaagccaagtctaaccttggcttgtcctcaccctgagaagtgggttgatttgaaaatttgagaacccagactggctccaaactcatgatcctcttgcctcagcctcccaagtgctgagagtctgggcctgcacatcatgtttgctgtgggcttaaagctgctgttctgagtccagagtcatagccacttagaccaggatgcagtctggtgtgctgggtagagaaggctagccctggaggtatgcaggggtgggggctgcaggaacagggcactggggaatctgggttctgtatatgttggatagaaagagggcttcctgctaggccaacctggagcaggcagcttgcgggcttgggaccctggctgtgttaaagctcagtccctcctctctggactacggtggttaccacatggaagacagcctccgttcctatttgctttctgttgctgaagcactccgactaaaagcaacttggggaggagagagtttatttggcttacattcccaggtcacagttcattgttgagggaagccaaggcaggaacttaaataggatctgaaacgaaaaccaaagaggaattctgcttactggctctcactctctggatcattcatgcccagctctatctgttagtttatctgtctgtctgtctgtctgtctgtctgtctgtctatctatctatctatctatctatctacctacctacctacctacctacctacctatctatctatctatctatctatctatctatctatctatctatctatctatctatctattttctcctcctcattctttgtttgggtcttgctatgtagaccaggctagccttgagtcatagagatctactgtgcttcttcctctagactgctgtgattgaaggcatgctccaccatgcccagcctcggctaactttcctttacagcccaggcccccgcctacgaatggcatcacccacagtgagctagggcctctcacatcaattagcaatcaggacatgctcacaggccatctgatcaagggagttcttcagctgaggtttctgctttctgggtgacttaggctgtgtcaagataaaaactaaacaggatgcctccataactgcccttgcctcacaccagctggggctgagtgtgcagcttccccagacactccatctgcctgcgttttagggtcctccagtcctcctgacagctcacttcctgaggcactaagaaatatcccagcatgtgacattcacagctatttatcccctaaccttccagaggcctcactaccctctaagatgtgtcagttataaaaagttgctatcgccatcttgggcaggctcagtgctcagcccctttgggtgaacacccaggattgagactcatggggcaccacaccactgtctgcagaactttccattccacatactaacactatggagccctaaattccagcccacctgcccatcctccgcttcccccagggtccagagactgatcgaagctctctgtctagctgataggtccagaagctctctgtcttcctgagtgtggcagcttgagacctcaccttagtgggctgtagggggtcatatcttccatgtctgagcccagtgtccccaagtgtcaccatgctgctgcatgcgatcgagtgaccacatccatccccatggtctgggtccttgagttgtttgcccttgctgttgacccataccatttgaaatgtaaatagtcatgagtctgtgccctgtgttgcaggcaatggcgtggtcatccacttgccgggcttgtttgaagaggcagagaagaacgagaagaaaggtaggtcatctgtgaccttgccccctcccccacaggcccactcactgtgcgctagctctgcagagcagacagcagagccctcactaagcagcagaagctgggcagctcagaatttctaagctctgcctacagcatcacaggcccctaaattgtcaaagtgcaggacacggaggaagaggctgaagcgaaaggagctctagcatgggtgtggtgtctcttgggttgcagtccggggagctcagcaggcagtgccagggcagggctgtggctgctgtgcactgtgtgtgctccttcagaacacttaagccaacagtactgagggggagggtcacccaagagtgcccacagtgtgctgtcttctctgccacatccctgcagggctgaaggactgggagaagcgtctcatcatctctgaccgggctcaccttggtaagcttcccatggggccctggggttggccccttcttgccctttccatagtacagagctcaggagaccctggagcgcctacctggcaccataggctgctgagccttactctttttaatgagcctcagggtagcagctaggtcaaagctggggtcatacttggttacccctttgtggagcctgggactctgggaccccggttctgctcccagccaggcacccttccgctgacccattctcctgacacaattcagaaaatgaagtccctcacaaacctctgccctctgcttctctcctgcccatgtgctggctgctggcaccagtgttcgacttccaccaggcagtggacgggctgcaggaagtacaacgtcaagcacaagaggggaagaagtgagttcctcttgccactgttgttcttcctcttcctggggacttccagtctgcctgagcaggagagggggccttgtcatccaccaacttaggggtcctgtgagaataaaacctgcaagaacaacagggtagcccagccttgggggtcacaccctgactctgttggctgccactgctgtctcctgacacagctgcaccatcctgagcacgggcacatcccataggggagcaagacgtctgaagaggcctggctgcccctgcttgaccaacagccacggcagcctgcagcaccctattcctgctcctgcccaagtgatgcttggtcttctgtccactcaggaatgttagttagaattccagatgtgccagggatgaaggtgggaagctgtcagggggcacacacacactgcctgtgcacaggtgcacagtgctcacatacatgtcaaggcacattgcttacacaactctgcatatgagcaagagtgtgtgtttgcatgtgtacatggcacacggggcacacaggtgcctgcacacatgcatgtacccaaaggttcacattcatgagcactcgtgtgtgcttgcacttgtacgggtacatgagtcacatggtgcacatgcattcatatatatgtactagcacaagcacactctcgaatgatcacacacacaagacacaggtggcgacagagagcacttgattgacttggggtcactggggcagacctgaggtaagtagaatcaacactgccacagtgttcttgctaccaaggcactaatgtcaacatttagaagcagacaggggaagccctgatgcggaaaccgaggactctcttccccacccacctggcatcctgctgctatgtgcttgagctgtccacatgtccccgctgctgctgttggtgaccttctcaccttctggccttgattcctggactagaccgcgggtctgccagaagctggggtgggatcagccgacctcctcagcagcgcccactttgcatctttcagtatcggcaccaccaagaagggaatcggaccaacttactcctccaaagctgcccggacaggcctccgcatctgtgaccttctctcggattttgacgagttttctgccaggtaggtctgcccaccctcccacagcccaggggtaagccatggaaaggtcggggaagacaggctgggaaatggagcagtcgaggccagtgtgggtcctcagagggtcacagtgagggttgcctgcacagattcaagaacctggcccaccagcaccagtccatgttccccaccctggaaatagatgtggaaggtcaactcaaaaggctcaaggtaaactgggcggggctctggggaagcacatgggggtggggcagacctgggcggagcccagaagtcccaagcaggtactactgccagctctcagctcctgtgggctctgcagcctcacgtggttgcacggtcctctcagggctttgctgagcgcatcagacccatggttcgagatggtgtctacttcatgtatgaagccctgcatggtccccccaaaaaggtcctggtggaaggtgccaacgcggccctgctcgacatcgatttcggtgagtgctccaccgagcagttccatcctgaggggctctaacccggtctttcctgtctgctggggacgataagaacataagaacgcatgaagcgcactcaccacaaggatcccgttgtcctgtttgcctaagtttagctatatcagggagcttccaaaaggctgaactaagatgagggaattgggaccgagatgccagaggggggtcaagagagccttgcaaggacaggtacttcatatcgctagccctcggcatgccagtctactgccctgattgttggggaagccaggccacctcagtacaggctcctatgtgatttgcagagcaccccatttaggccactgccccaggacaggcccccagactggtggccggggtgatccccatagagcagtggttctcaaccttcctactgctgtgaccctttaatacagttcctcatgctgtgccaactccaaccaaaaaaattatttgatacttcataattttgctactgttatcaatcgaaatgtaaatgtgtgttttccaatagtcttaggcgacccccatgagaaagggtcatttgatccccaaaaggggtcacaaccaagaggttgagaaccaccactacagagggattccaactgcccttttctgaaaaggcctcttgggccctgggatctgcacagggtaatgagtgtccactggttgttctgtcctgcagggacctacccctttgtgacttcttccaactgcactgtgggtggtgtgtgcaccggcctgggcatcccgccccagaacataggcgatgtgtatggtgtggtaaaggcctacaccacccgtgtgggcattggggccttccccacggagcagatcaatgtgagttccagcactggggtgaggtgggatatttggggtggtgtcaggtggagctgtaggtatgggaaggggaccctactgggcaattctccatgtcctagtggggtctttttacagcacaagctcagaggtgagatgttagaggctttgaaggccagtctgttccaacaccatcagcaacacacttcacaaaaggggtgtgtgtgtgtgtgtgtgtgtgtgtgtgtgtgtgtgtgtatgtgtgtgtgttcacaactccattttcctgtcacgcacatgaggcccacagatgagtgggaaatcttcagtacttagaggttgaaagcaaggcccctgttcccatctttctagccttgggagcatttcttgaaactactgaggcctcagaaccttcttcctgggcttccttacctggccttaccctgacacctgattcggatgagtcgtggctcttgtcccaggaaagggaagtgtctgagagagcctggggtgggctgtgtttagggtgggagataaaccctgcccctgcaccccaagttgcaggacaagcccccacccctacttgcccacacttaaacaggataggggaggtgggttgcctgcgcctccacacacaggctgggcctcggggacaagtcctgcctcctcagaaccatactggggagcaaagtcctgtgtgagacctcagctggaggaggatggagaggagaggaagccatgagcacaggagacaagcaggcacacgccatacctgtcctggccaagtgcccaacatggcgggcacagacggtcctttattctcacataggaaattggagatctgctgcagaaccgtggccatgagtggggggtgaccacaggcaggaagaggcgctgcggctggctggacctgatgatcctccgatacgctcacatggtcaatggcttcactgcgtaagcagcccttctgaatactcagggttagggttagggtcagggctaggcaccatcaaagcgacaccacacgggaatcttctcccatcccaaaggccacagtgcaagtagaactcctctcaggggctgggccccaacatctgtgtggagtctttttatgcaaccaagtgccctccccaaagtgcggccaatgctagggagtgacacggaagctataggtgtggagcaaacccagaacagggtcactcttccatcctgaccaatccaaaaacactgtgatggtcacgtgagagttggtgtgaggctgcccgggtgtgggaccgagtgcaaggtgaggctgatccagagctgaagtaccagagccaggacagagcatcctcgaggacaggcatctttgggagtcattcactcccttaccatgcacatgcaaatgtggccactggttttgtctgcagggcttggggacattctacaaagtacagtggtagtttctaagccagaaggacctggcatttctagaaccctcgtcccataggaggaactctgagagggggttgggaaagcagacaggcaggcagggctccaggtgccttcctaaaggtatggggtcaagccagcctcacagctcccatggaccactggaaaccgacttatctctcctgaggatacagaaccccagtgagaaaggctcccacggtcaggagacaaaggtggaaggggtcaaggttgggtaagggcctaaagcaaggcatccctccatccacaacaggggccttcccaggtcctccacccctgtaggcctgcgaggatgctctcagttgggatactagaacaatttccttcaggagtatcagggaacacagggtagacctcagagtctttgcaaaggtctgattgcttaggacagaatgagacttcataggacgctggcttccctgtctcctctccatcttggtaagaggggcagggctaccccaccagcattggaaagtctctggtagctttaagacaaccagaacctccctaggtgggaaaagagctgctaggtagctattagtatgagactggtgaagaagtagctgagaccttgtgacgtagatgtaggatagcacgtgtctgcaccccacattcagcctgagaaggcacagccagataagatctacccatgaagtctgtatggaaagaagggagcaaaaaaaaaaaaaaaaaaaaaaaaaaagaaagaaagaaagaaagaaaagggggggggaggaaagaaactttggtacaaggcagttttgaagaaagccaagaaaggccactgccaggttgctctggggtggtgcttaagcagatgcatcctgggaaagtggaagaaaaagtggatactgtgctctagcagtgggccccaaaagccccatgctacagggcaaacatggcaagagcattgggcagaggaggcacccgctggcaagagagaaagtcaagatttcagcaatgcagatgcaggactcaggcccagaggcaggcagtcctctagcctgttcagcagttgcattggaggaatcccctaatctttgccatgtttcgtgcaaacaacaggagaaaggggagggtgaaaaccagacataagcaatgacagggtacatttctccattttgtctctgtttcttgtttgggggacaggctggcattgaccaagctggacatactggatgtcctgagcgagattaaagttggcatctcctacaagctcaacggaaagaggattccctacttccctggtatgtgaggcgaagcaaacctgagttctcttcgctgtcgggatacatcttgagcatcagaatagatatccactagtttctaggtgactaggagaggcattcctgcctccagcaggcaaaggggaggggttgagactctgagggccactgcttgtctcctaagacctgcaggcagctgcgtctctcagtttcttggggaggcctggcccatctctgggaagccttgggccttctagtggcttggaaatgtgttgagatagggctgaaaggtaggctgggagtccaccctgccaccctcactagcctcagaaaggcctgtctccaggaagatggatagcctggagactcaggagacatgagctgccctgaaaaccatggatctctagggaaatgcatttcagatgagaaaacctgccctgtggatagattcctttttattttctggtgctggggataaaactcagggccttgcctttgctaacaggtgcttagtcccaaagctgcttcctcatccctgagtgacacataagggtctggcctggctcctgtgcctatgggccctgtcttttcttaaacacagggctgtttttctggcgtttgggttcttgtgtctggaatatgcctgtcagcctcaggtcagaggcagatcttatcaacagagactccctttcctacagcacactataggcaaactgcctcttgcttaccacttccaaggaaacccagacagattcagtcctgtcccttggcttgtggggccatgtgtatccttgaggcctgggtttttgaccctattgacccctgacctttgaaaggatgatccttcaaggtcatagagtcttgccggtggctctgggctctgtggtaatgtggagtacccaggaaagacactgcctggatctgaggatcctataaaggctgcctattccagcatcttccattagcaagggatgatgcaccaactactagtcatggggtcccagcacaaagttgggtgtcccaagcaggaagagccatgtacctttaaggatgtcttggctttgggattctagaatcctttataatgtccagttgtacctcagagtttccctattgacaaatctgtcagctactcagcagatgccagtgtctcacaactggccatgcttcccggctggaaggggcacagccaatgtttgagccccacggcatcccctgatcactgcccaatgctgaaaagccatcagggccacaggtcctcagcagccaagtcaccaggtgagaagacgaccgtctccacaagtgggatagtctacggacccggctgagcccaccctctcccatccacagctaaccaggagatcctgcagaaggtggaggtcgagtatgaaacactgcctggatggaaagcagacaccacaggcgccaggaagtgggaggacctgcctccgcaggcccaaagctacgtgcgcttcgtggagaatcacatgggtgttgcaggtgggttcttcttacccccacaccctcagccctggataccccaaagggcctgtacctcaacacaaggcctagtgagaaataagaacccctgagcagtaaccacatgaatgggacagacaagaagaggtagatctagaacaggtgccatcaggggcaggtcatttcctcagctccagccaggctggggtccactgactcaaactagggtgtagcctagggtggaaaaaacaggcagtgtgtatgtgccctgtcgtctagagaaggtccagggtgtgtccctatggctcaggcaaggagaagcacagggcaggagctgctttctgctgcccaaggatgagtgacccattatggggcccacagcacagttttaaatgctccctttctggggcaggggaggtggctcagtagtgtagagccgtgttgctcttgcatggaccaggatttgtttggctttcagtacccacgtgtcagctcacagctgtctgtagctccagttccaggtgatcctatgacctcttctgacctctgtgggcaccaggcatgtatgtggtacacatacatgcatgcaggcaaaacacttatatatataaaataaaattctaaaaatctaaaaatggctatttaataaaaacccaccctacttggcgaacaatcagaccctttgccagaggaatggaaagcacacactacaacgttgttttttgtttgttttaaagatttatttatttattttatatatattagtacaattatagctgtcttcagacacaccagaagagggcgtcagaacccattacagatggttgtgagccaccatgtggttgctgggaattgaactcaggacctcaggaagagcagtcagtgctcttaaccgctgagccatctctccggcccccaacatgctgcacagttaagggacattttttaaagtgtgtgtacatgtatacagaggcagagggcagcctcaggcacaccctcaggaacactggctacctctttttaagataggctttgtcattggcctagagctcacccagtgggttgtacttgctgtcagtgagccccagggccctacccccctagtcctgggatgaccagaactccaccagactagcattagtgttcatggcctctcttctgcactcacggcctctcttctgcgctcacggcctctcttctgtgctgttgcctttcagtcaaatgggtcggcgttgggaagtccagagagtccatgatccagcttttttagatgccaagtggaagccggcaggccacaccacagtgtgccaccgtgagtgacagccgcagccgagaccctcggcagtgccaccaacaccttcaacgaaacagtctgaagctattttccatacttttatttttctatgtatgttttcagcttgaaattgttgagccctacaacaattttacatgtgtgaaatcaacactgtgtacatttaaaaaaaaatctgcttttaaaatgagcctaagtgctcataacagaggccttcactgactgattgtcacatggtatgtgttcagttggagccatgtcataataaacatagccaggggtcactgagccaccgagaggtcattacacctgtcttgacttcgtccttgttacttttaaccacgaatgacagcctttcccaatgaccatggcctacctgatgccctcccagaaaacaaaaccccagcagccgtctgaggagtgttgcccccagcccaggacccatgagaggaaaatcagaagcagacagaaccagactgcacaaagtgcagcttcctcggggcttatagacagcgaagcaggaacccatttcccagggtgagagaaaaaggctcacacaaagtcagacaaaagtggctccaggtcatctgaaaggtgcctgccttcaaaacaaaacacaacgattgtccaatcaagcagtggtgtgtgtgtcttcacaatggggtggctgagggacactttcctccagagcctgagagagtaccagcattccctggtgggcaatgtgcatgtttgtttgtttgtttgtttgattgtttgttttgagacagggtttctctgtgtagccctggctgtcctaaaactcactctgtagaccaggctggcctcaaactcaagaaatctgcctgcctctgcctcccaagtgctgggattaaaggtgtgtgccaccacgcccagctgctcagccggactcttacatttttggtgtcagggagctacagtgttatgcttgctcagaaaacaatatccagggctggtgagatggctcagcaggtaagagcacccgactgctcttctgaaggtccggagttcaaatcccagcaaccacatggtggctcacaaccatccgtaatgagatctgactccctcttctggagtgtctgaagacagctacagtgtacttacatataataaataataaataaatctttaaaaaaaaaagaaaaagaaaacaatatccagcaagcgtatgcaagacagatttgtatattacagggttcccagaagtgagcatctgagcacacacatttctagagctgccagggtatccttcctgcctccagggacagagcagcccagacagcccctcatcatcctagccagacacttggtcactgtccccaggagcttctccagactgaacgagacatgtcttactagtactgcctctgctccatgctcactgcgacatcaagaggcctcgaatgacgtgccagcatttggggtccattaggccatccccactctggagacatattgtgttttcacttccatgacaaaacatctaaagaaaaaaaaaatggagaggatttattttggatcactgtttcacagattttagtccatggccaggctggctccgttattcggggtctgtggtgaggcagaagcatcgtggtgggaggcatgccatcacgaaggaaggagtgagacaggacagagatgtggtaagggatactgtcagacacactctcagtgcgagtgcggcgtttcctccaaccaggtctcacgtagaagctgattacccagaaactcactgctgtgaacaggcaccatgaccaaagcaactttttttttttctttttcacatcttttctttttttcttttttggttgttttcaagacagggtttccctgtgtagccctgggtgtcctgtagaccaggctgacctcgaactcagaaatccacctgcctctgcctcccaaaggctgggattaaaggggtgtgccaccaccgcccagtcaaccaccaaggcaactcttataaggataacatttaattggggctggcttctaggttcagaggttcagtccattatcatcaaggcaggaacatggcagcgtccaggcaggcatggtgcaggcagagctgagagttctacatcttcattcaaaggcagagaggagaagattggcttctagacagttaggactagggtaataaagcccacacccacagtgacacacttactcagacaaggccacacctcctaatagtgccaacccctgggcccagcatatacaaaccacagccatcctgaccttattacccttcaatcatgacgtcatctgaggacggagccttcaacacttcatattcatactagaacgggagtcaggcccagtggaaccccatggcgcttgtacagactgcactaggaagtgcggattctgggaggaaaaagtccattatcttaacatgaacaacagccttcttagtggtggttcctgggacaggtcgctggatttaagccatgcagtaggggacaaacgcatgactccacacagaggtatcatccattctgcacagttctacaaccggggaaaccaccatttgggggtgggggtgggggtggggaagcacagcagtcagtagtcactggaccctattgtcctatttagaattgtgctccttctttatgtcgaaggcctaactcccaagagtcagagtgtgattgtatctggatacagttttttgttcggtattttgagactgggtctctctacctagcccaggctggcctccaactcacagagatcagcctgcctctgctttctgagagctgggattaaaggtgtgagccaacacacagggctggtggatatagtcttaaagagttaaaacagggtccttagggcagaacttaattcaaagtactgggtgttattatgagatgaggacacacacacacatccagtaaggacacaaaagtttttatttgtagattctggaagacagaagcctgcagagaacctgacactttgatcagagacttccattctacaaagtctggagaattaacgggtgctgtgtgtacactccgggtctcctgtactccaagatgagcacaaaacttaatgcacccgaataactgacgttccgattgtgtagaaatagaaggactgagaaacccctcagcatcactgttttgcctgttcaacatgttagaagacaccacaatatttttaaatcctgaccagcggacccgcaggtgacgccataaaccctcaggctccctgcccaagatcagacctaagggaacacaagaggaactcgtaggggaagatgggtgcccgtatccactaagatcaggagctgggacaaaacccgccaccctactgtttgatactgatatctcacctatcacctatcaccgttgcttagcgacaacagagccttctggcttttcgcgcgctgagccccgccctcgatctcgtgctggtttatgcagagccccttagcacacgagtcccgcccccaacgtagcatcccgctaatcccgcgccccaccccagagccccgcctcttagttcccggcctatcctgagctgtgacataaactagccccgccccaacacaacccccccccccctcggcctatcccgtgccacgccttgcgcagacctcacctcgccgcgccagcgcccttggccttttcccgcgccctgcattccagccactgcctccctcagcctatccctcgccgttaactgcgtaagtcccgcccccgacgtcactccggcctatcccgcgcagcggggcccgtttgaggcgagcccccagcctttctccggcctattgggcgccgcgccctcgtcggctcgggcctccgccgcggtccgagggcgccgtgacgtgtgctcggcgcgcggcgcgctgcgcgctgctgaaggctgtgtctggtacccgctaccatgcccaagcggagctgcccgttcgcagacgcagccccgctccaactcaaagtccacgtgggcctgaaagagctgagccacggtgtgttcgccgagcgctactcacgcgaggtcttcggtgagtgtggacttccgtgggtagagcgcgctacgccgcgcagggcagcgggagaccgcgggagcgtcccgagcgctcacggtggatgctgcttcaggcggctcccggagaaatccgagtcggacccgagtgctgccgagcggactagcctagcgcgggaccgacgcggggactgggttcgagtgggcgtgatggcgtagactgccctgagccctcgcaagtggcctttgtagcggatggatgttgctgagcattgccttgcagtgatggctttctggggcaggtgtaacgcagtgtaccgtagcttggcgcagtttgcggccgtataactttgagcggtgccgctgcgcctttggaatgtgcgggaaaacaaactccctacgcagccccagtatttgtcctttccctctctgtactctgggaatgcaaactcaagtgctgagacgcaggggcgatgcgtgaagggacaggactgagctgcaaagagtgtgcctccccccacgccccccagtctagacatggcctggcgtcgtggcttgttttttgacgccagcactcagaagggaaaggcatgggctttatggtgagatgtcttaaaacagcaataacaatgcaaacacggcccagaaaatgcctcagctggttaaagtgcagtctatgcaagcctggacatgagtcaggtcccaagaacatacagtaggagagaattcctgaaagttgtcttccgaccacactcatagtaactaaatagccaagtaaattaattttttttaaatgtaagcatgcagttgaaaagaaggcctaagtgttaattggaacctaacagcctggctctacccttctgaggacttgtgtgttggagcatttgccaggccactcagagccagccagtcaggaaggggtgcagggctctagcgagttttatagtacacacagtttaccaaaaccccagcccacactctggactctgctggaccaggaggccttaaggagaaaattgctctcataatggaatgtgggtttgagccccacctgtgttaagagtacccctccaggaactcttcccatttcttgtttttcagacaggctttcaccgtgtatcttagcctggccttgaacttaagtaattctgtcttaaagtaggaggcaactgagctgggaatagccactctctttgagtttttgtttgcttccagtgtcacagagaggtccctgggtcgtgggagtgagtatttctagaactcgcaacagtgtttccctttagggctccctgggcctgaagcccgaaaggaagcaatccactgttataggtgtgagcagccagttacccggggttggtgggtggcagggctggaacatctgggaggtctttgtcagggggttgttgtcattgtccctttagtaaagttgttcactggcctggcaatggttgtaggtgctgttctaaactcgtgtctgttttctgcctccttgggacacttgcttttgggaatgaatggttctgagccagagctttctctggcactgagacaagcttacaggaggaggactgggagtgcaaagagggcaccaaccaggtgaagtgaatagctgtggctgctgacaatagaataatgggaggagcaccggagtggagcacagcctggtggctgggaacaggcaaagggggctccgagccttgtgggtcataggatatctgtgcaaccgctttgcggtttggagagttatcttaaggaaggctcttcctccccagaaagaaccaagcagctccttttccaaggggctcgggcctatagagatcacatatcgagcgaagattgttccgtgaaccacctgcaggagtcactgaagtctggtgtggtaggagcccctcaacctgcgaggggacagatgttgattggacctgatggccgactgacacggtgccaagctcaggcctcagaaggtggtgagtggccgccagtggggctgacctgctgttacacctagggaagatggtggcagtgttctgttcaagagccttgactacctgggcaaacaggatctacttagagcagtggttctcagcctgtgggtcacaactcttcgacaaatctctgtctttaaatatatttatgttgcgagactcatgacagtagcaaaattagttatgaagtagcaatgaaaatgcttacatggtttggggtcaccacaacatgaggaactgtatatattaaggggtcacagccttaggaaggtggagaaccactgccttagagcctggtaagtggagcaaatgttgctgggcagtctgaccctcacaggcatccagagtggacgtcaacaggttccaactggcatctcaagctctcctggtgccccacctgcagtaagaagatgccagtccgttccctgttgaggggtggttctcgtgtgactcgtgaaaaacaggactctgcttcagcccagaagcctctgggctgaccagtgaaacagtaaaccccatcttgagacccagacagatagagagttctgatagagtactccggccatcctagcaacaggcaggtgatctgtcctggagtcctgtgaccagtcctgggaatgaatgcctcatcgtgagcctttagtctagtgctccaggtggctgatagataggttgccaaaaggactcggttgcaggggaagaagggtgcctgtcaccctcgtgttcttccagtgtccttccaatgctgacagcctcggtgttttctcctcacaggccttcccaggacagcgcccatcgcttgttcatcgtgcatgagatctgtggatgggaaggcggtctgcagccagtgcgagcgggccctgtgtgggcagtgtgtatacacctgctggggctgcggtgctttggcctgtgtgctgtgtggccttgcagagtgagtgctttgacctgatcacggtccctctccgtcagggcacaggtgctgggtgggtgactcggatccttttggaagaagtccgtgcttcccagtagtctgcggcctacttaaagcagctccctggcttgcacagccttgtggtctggacttctgagtccttattagggctccaacagtccacactgttgtctagtttcagtttctgtccagcgtgcgtatcatttgaggattgcctcacacacgtcactgggtgtatgtacattcaggtcatgcctacccctgtgtgttaactgtgtattagcagaatggaatggatgctgcttacccattggctgcagccagatgagtcagctccttagaagtgctcagtgagtgggtggacagtgtagagccctgtccctttgttccacactgtagggacttgttccaccaaatgagtatgggatcagtacagtggatccggataagctcagccccaacattctctaaagctaatgcgtcagatggaaaaccacacttcatatggcaaatcctcgccaacagagtactcttcagtggtttggagagatcaggagtgcttgcaggggtactctggggagaagtctcaggaaccttagggctgattcatgctaaggtgggagggagagtttcccaggctgcctccaggcttgtggtgactgctataggtcctcaggtttgtgtcagtggccctcttgttgctatgtcttcatgtcactcctgtgtgtctcttatgacatctcacccgtctggtaaaccacaaaggcctggaaccaagatgcaagacccacaggatgtttgcatgctaggcctccttccagagacagtggtgtccccaaactgtccctgaaatgcctatcacctgagtctgtcttcagacaagttcccattctgatgtgtgatgcgattagggcctcagtgagaggggatgcattcagctacttaggtatcttctctctctcccaccaactgtgcagctatgccgacgatggtgagaagacactgtgcaccagctgtgctatgtttgaagcctgaggtggccacagacagcacaagatgttcacactaaagagagagaaggtggctttttatatgttatgttttatacccagtaacaagtgaataaacctctttatatttgcacaaggactccctcccttccatctgttaaccgttcttagggtggcagtgacggctgcaggggcaagccctcgcagcagcgtgcagctcagctgtcttggcattgagacccctgcttattacccacatctaacaggcaagccagacccagcaagttccttcctgtcctccctcagctgtaagaggaagcagctggactccaggagtcagactgcagaatggtcacctgcgtgctagacaacctcaggcactgaattgccactgtcagtcacataggcagccatcaatacctacactgctgggttccaggtgatttaatgagcccttgtcctccaggggtttggccctgtggaatgtccctgtgtggttgtgacagtcctcaccatatcttcagaggtagtttatgcagggctctaaggagttcacaggaggtaacatggcctggaagataatggtgggccagtcactgcagccacctgggtctcctacttacaagtggttggctgggtagatagggcagaggtctccttgtcctgatctctaagaacaactatggttagttcccatacatatcgaggaggtgctgtcctagatggggttggttcaagtttccctatactactgaaaagttggcccagaggccctacgtgagcaggaggctagagagggctgaggtggggaaaggccttacgcacctgggaagttcccttattgctgtggataatgggactctggctggttttaagtgtggaagctggtggtctgtaggtagtgaccaggagctgggcccattagggcccaaggtagcagttagctgctgtagccttgctgggggtggggcggggcagggcacccagataggccagcgactgcggctctgaaaatggaatctggggatcctaactggagtctgtctatttgtctgtctatttaattttctttgtggcaagggctcactgtgtagccctggctgtccttgaactcagagatccacctgcctctgcctcctgagttttggaactaaaggcgtgcgccaccacacctgactcgattagctggcttgaagccactaagccacttgagctggctgttggtggccaaagcaaaccctgaccgtaccccacacccatcccatggcttctggtgctgttttatcctggcctagagtctttgtactatgagcttctgctgtagctagcccatctctgtcaccagtgggaatcattgcccagtccccaacaccttcaggctgccctctctcataaacaccagactttacctctcctgcttcctgccccgctgggggttcagtctacctcccagcatgctcaacatgctttctttcaccttagaccttcttggctcccttcttggctggaggcccttcctctgggtgtttgtatgttcgtttatgtctctctgggttgggctcagaagcatcctagtccttactgcacagccctgtaggcttttctgatccaccatagagaatacagatggatgcttgttattccttccagctgccatgcagattcctgagagctgtgacgtagcttcaaatgacatcttacatgtcacagacttgtagtaatctgcccagcatccagccatgaggtagcggggagtgtatttgagtgtgcatgtcagtgtggggtgcatgcctgagtttgcatgtgtggagccagcaatctacttggtgttgtttgggttttatttggtttgtgggtggtttggcttttgaggctaggccccatttggcctggagctcacggattaagttaaactgtggacagcaagcctcaggccccccgccccgcgtcggcctccctagcattaggagtgtaaaccaatgccaccgctgtgctttgtaaatacaattgtgggggccaaacttggggcatgcttacatggcaagcattttgccaacagatgccccggtccctagccaactttaaaaaaagaacaaagtacttagatattggacagcacccagcgtcagatgataaccccagagggggtgagatgaacccaggttctgctgagaaccctgcctgctgagcatccacctgtggtgtgggaggagattgagagagcttgtgaaaaggatcgagaagactgggggatgagagctaggatagccaaagtttgcacagcagattgccagtggatcaaagcatccttgatggtgttaattaat

SEQ ID NO: 360 - DNA, 1734 bp, Mus musculus
ggcccagagcagcagaggagctaagccagcatgtccgggacccgagcctccaacgaccggccccccggcacaggcggagtcaagagggggcggctgcagcaggaggcggcggcgacaggctcccgcgtgaccgtggtgctgggcgcgcagtggggggacgagggcaaaggcaaggtggtggacctgctggccacggacgccgacatcgtcagtcgctgccaggggggcaacaatgcggggcacacagtagtggtggacggcaaggagtatgactttcacctgctccccagcggcatcatcaacaccaaggccgtgtcattcattggcaatggcgtggtcatccacttgccgggcttgtttgaagaggcagagaagaacgagaagaaagggctgaaggactgggagaagcgtctcatcatctctgaccgggctcaccttgtgttcgacttccaccaggcagtggacgggctgcaggaagtacaacgtcaagcacaagaggggaagaatatcggcaccaccaagaagggaatcggaccaacttactcctccaaagctgcccggacaggcctccgcatctgtgaccttctctcggattttgacgagttttctgccagattcaagaacctggcccaccagcaccagtccatgttccccaccctggaaatagatgtggaaggtcaactcaaaaggctcaagggctttgctgagcgcatcagacccatggttcgagatggtgtctacttcatgtatgaagccctgcatggtccccccaaaaaggtcctggtggaaggtgccaacgcggccctgctcgacatcgatttcgggacctacccctttgtgacttcttccaactgcactgtgggtggtgtgtgcaccggcctgggcatcccgccccagaacataggcgatgtgtatggtgtggtaaaggcctacaccacccgtgtgggcattggggccttccccacggagcagatcaatgaaattggagatctgctgcagaaccgtggccatgagtggggggtgaccacaggcaggaagaggcgctgcggctggctggacctgatgatcctccgatacgctcacatggtcaatggcttcactgcgctggcattgaccaagctggacatactggatgtcctgagcgagattaaagttggcatctcctacaagctcaacggaaagaggattccctacttccctgctaaccaggagatcctgcagaaggtggaggtcgagtatgaaacactgcctggatggaaagcagacaccacaggcgccaggaagtgggaggacctgcctccgcaggcccaaagctacgtgcgcttcgtggagaatcacatgggtgttgcagtcaaatgggtcggcgttgggaagtccagagagtccatgatccagcttttttagatgccaagtggaagccggcaggccacaccacagtgtgccaccgtgagtgacagccgcagccgagaccctcggcagtgccaccaacaccttcaacgaaacagtctgaagctattttccatacttttatttttctatgtatgttttcagcttgaaattgttgagccctacaacaattttacatgtgtgaaatcaacactgtgtacatttaaaaaaaaatctgcttttaaaatgagcctaagtgctcataacagaggccttcactgactgattgtcacatggtatgtgttcagttggagccatgtcataataaacatagccaggggtcactga

SEQ ID NO: 361 - protein, 455 aa, Mus musculus
ASMSGTRNDRPPGTGGVKRGRLQQEAAATGSRVTVVLGAQWGDEGKGKVVDLLATDADIVSRCQGGNNAGHTVVVDGKEYDFHLLPSGIINTKAVSFIGNGVVIHLPGLFEEAEKNEKKGLKDWEKRLIISDRAHLVFDFHQAVDGLQEVQRQAQEGKNIGTTKKGIGPTYSSKAARTGLRICDLLSDFDEFSARFKNLAHQHQSMFPTLEIDVEGQLKRLKGFAERIRPMVRDGVYFMYEALHGPPKKVLVEGANAALLDIDFGTYPFVTSSNCTVGGVCTGLGIPPQNIGDVYGVVKAYTTRVGIGAFPTEQINEIGDLLQNRGHEWGVTTGRKRRCGWLDLMILRYAHMVNGFTALTKLDILDVLSEIKVGISYKLNGKRIPYFPANQEILQKVEVEYETLPGWKADTTGARKWEDLPPQAQSYVRFVENHMGVAVKWVGVGKSRESMIQLF

SEQ ID NO: 362 - DNA, 21728 bp, Homo sapiens
  misc_feature (1)...(21728): n = A,T,C or G
cccacacccgcatgcgcccggtgcagcctgccaagggccagtcggggggtgctgcgtcctgccagtgtccaccacagctctgcctgcccttcagcccagcaaggtttaatcaaaatgcaatgctttgcaagtctttactgcttggaggtggctgagttgggggccctgggcaggggtaagctggcaggcagtgccatggcaggccagggtcccctcccatggggtctggcccccgttccagcatgtccagcccctgaagttggagttgggggcggtctgcctttgctgccactgccaggcctctgccctgcagctgaaacttggccatcacatcaacagaaaacccctcccagtgccagctgcccagcgtgggcaggccctggggacaatacaggtccacctgaggggctgcagggtgacacccagcagccgctgccccctcactgcccacccagcgagggcagcctacccgagcctgccccctgccaggtgtgtgccctgaggctggcggctggatgcgtggccaataaaaagcagacctagcccggtgtgcgactgtcgtgttcagaggctgcgggagtgggcggtggacgtgggctcccacaaacatggtgagcgctggacaggccccgtgtgaacactcactgttgaggggcccccaggccccgtgtgaacactcactgttgaggggtccctgggcccccaggcaccgtgtgagcattcactgttgagggtcccccagtcccccaggccaggggctgtccctggagccctcaggaggcagtaagaaacatctagaagagggcagacccagtggtgaaccgcatccaacagtggtgagatgggtgcagctctacaggggcgtaatttacaaaccaccagactccctggttatgtgtgtgctgcggtggtgtttgctctccagcagatcaaatttgtgcaatgatccattttgagaatctctccgtcaccccaagaagtcctctcgcacccatcagtccgaccccttccccgtgctcctccccagccctggcagccactcacctgcactccagacgctccagatgtcatgcatgtctcctggcttccttcggctgttttcacgcgccatcctcacggcaggctgtatcaggacttcattccatttcatggctgaagcacattccattgcatgcagggaccacattttgtttgtctgctcttctgtccatggacatctgggttgcttccagtttggggcttctgtgaatcctgctgctgtggacatttgcgtagtcctcgtgtggatgctgctgtggacgtctgcgtcgtcctcgtgtggatgctgctgtggacgtctgcgtcgtcctcgtgtggatgctgctgtggacgtctgcgtagtctcgtgtggatgctgctgtggacgtctgcgtcgtcctcgtgtggatgctgctgtggacgtctgcgtcgtcctcgtgtggatgctgctgtggacgtctgcgtcgtcctcgtgtggatgctgctgtggacgtctgcgtcgtcctcgtgtggatgctgctgtggacgtctgcgtcgtcctcgtgtggatgctgctgtggacgtctgcgtagtctcgtgtggatgctgctgtggacgtctgcgtcgtcctcgtgtggatgctgctgtggacgtctgtgtagtctcatgtggatgctgcgagttttcgttgctctggggtagattcgtagcggaggaacaactgggcgacacgctaagtttatgtttaactttttaagtaactgcctaactgttttccaaagcagctgcaccatttttcattcccatccatgctattgtttttcagttaaatagctccactcctccccctccccaccctccacagaactgccagtaaaactggactatggagtattgggtggggtcacctacaaggtcatctgcagcaagtgagatcatcgcccctcctgcctggagaggtgggactggggaccctgtgacaggaggagctgcccttcctggagcctggtttttctttttcctctgtgctccatgagaagtcagtttagtgggctacagccagcaaaggaaccaaaaccaacaggagctctgggggtgccttgcatggcgaggctccgtggctgcacgcgtgtatgcaggtggctgtgggtgtctgtgtgtcctgggccactgtgtgcgatggtcccactgggaggtgtggcccccaaagagtggaacccacaggtggacacacccatgcaccctcgttcttgcccaaggtcacacatcgagacagcagggcccagatggatggccccaagctcggtggctcccgtgctgcccacacctggggacaggcccactgtggggggtaaggggtggaggtgttctaattcgggctgagccgtgtgactggcaggggccccagctgttgggcctgggcaggactgtttttagaaaagccccaactccctgcccctacccgggcccgtggctatttatagtccgggcctggagaagtcagtgagtcactagcgttcgcctctgcagggtcagtccaagcccccttagtgaggtggtctagcatgtcccccagtcccccaagcctctatctgacatctgctagcccagagccccaggggtccccaggaagggctcagagctggtggccccccccaggccttggcagcacctccttgtctgatgggactttgtggttcctggtggacatttaacattgtcggtttctctcatctggaaacaaacctccatgacgctcttggtttctcctgttgcagtctgcctcttccctacctgcacagctctctgctgtgccccaaattccctccttgacacccccagacccactgccccaccctcaggtgcagccccttctcagcaggctccaggttctgccaaatctcagagccctccaaccctgctccagccccttcccaagctgaggccggtggtctgttcacccccgaccagctgtcacccccaaggtggcactaggaagttcatgcatgaagactgcttttccactgaggccccactgactgcttggaacccatacaacggcattttccccgcaaggatgctgagggagaggaagtgtcgatgtgcccggtggaagaagaggggactggggacatgggtgcagggggcaggaggccaggcttcaaacagcccctctcccccaggctggggcacggtcaggtgccaagagaggaggggtggggaggctgcaggcaggggtgggcagtggtgtccttggctgcacctgaatcactaactcagtgtgagcgacctttgctgtgacaggcccaagctccactccttcctcacagggagtgtcccgtctccatggactccctgtcactagccttggagttgccctgagcccaaggagcctcgtggctccaggctctttggcaactgagagccgtcagggagggaacaaaggaccccgcctccctgctctgaagcaagaacctgattctcttttccgcccttggggccccaggacccttctcttggccaccagggctggcttcctccaagcctcatctacttgggaggggtggggcgggatgggtgagacaggacaaccagccgggaacacgggagcctcgcagaccatcgcctccctctggggcctagtccctccacaggctgggccgggaaggtctggtgtgggacctcttgggaacctgggccccacggtggcgtgcatccctgggggttgctcccatgccagccaggtgacgctgacaggatgggtccctttaccccagacttgggtgctgagggccggagctccatgctggagcccgcctgctcgctacagccaggcccgagccacagcgcgcccgggcgggacgcggggcccctgccgtggggcagaagtgcgggcagttgcggggacacaaagtcctcggagaggacgcgctgcgcggctcttcgcggccgccagggggcgcgcccgcgcccagggcactcggggttccacggggggcaggtgcgctcctcgagagtgcggaccctctaggtggggtgcaggacgcagctccccttttgcaaaccgcactccttccctggagggaacgaccacccctgcagttgctggaaccccgaagtcctgggcccggcaagggcttggtggggggtgaggtcgcggtgcacaagccctggtccccgacgggctagcgagaaactgcctccgttggcaaattcgtgggggcggctccccaggccatctgcctgcctggccgttggtccgtcggcccnnnnnnnnnnnnnnnnnnnnnnnnnnnnnnnnnnnnnnnnnnnnnnnnnnnnnnnnnnnnnnnnnnnnnnnnnnnnnnnnnnnnnnnnnnnnnnnnnnnnnnnnnnnnnnnnnnnnnnnnnnnnnnnnnnnnnnnnnnnnnnnnnnnnnnnnnnnnnnnnnnnnnnnnnnnnnnnnnnnnnnnnnnnnnnnnnnnnnnnnnnnnnnnnnnnnnnnnnnnnnnnnnnnnnnnnnnnnnnnnnnnnnnnnnnnnnnnnnnnnnnnnnnnnnnnnnnnnnnnnnnnnnnnnnnnnnnnnnnnnnnnnnnnnnnnnnnnnnnnnnnnnnnnnnnnnnnnnnnnnnnnnnnnnnnnnnnnnnnnnnnnnnnnnnnnnnnnnnnnnnnnnnnnnnnnnnnnnnnnnnnnnnnncccctgtcctccctgccctggccggtcactcacccgcttgggatgccttccttccggggagcacctttcccagggccaccccacccacgcacgcacacgcaccactcacacaacccccgacccacacacaccgccctccttccacccacccctactccaccaccccggcagcgggccagggcacagctataaatacaagtcgctgagttggggacacccgatccttagggggtggcgcatgccatgggtgtgacgctggaccctccatgggggaaccagaggacccagccccaggatggtttgaggacccccaagacaccccccttcctcatttacagtgatcacctggggcctgtctgggtctgggatagggcttacctggctccccgcaaggtctgcaggtggtggagggggtaaaagctgcctgctgggtgggggtgaccccggtgagtcagccaaggagaggcagaggtggaagggggccaggccgtcctggggggcaattggggccgcgcctgagggagggtgcttgggatgatcctagccagacatgggagagggagggccacagacttctggccagggtgaccccgtggctggcagtgccaccgaggaggccagacctgctttgtcccccagggcccagggctgggcctctgccagccggcagctgctctcagcgcccccatctgttctgactgagctgcacactgggcactctctcgggccgccaccctggggctacatgccccatgccagggcagccaagtctgctgcccatgggctgacttacagctccaggcacaaaggggtcaactttgggatgcacgcgtctggggtttggagcctgcctggggctgctgccaataatggaacaagggcccccgcaccgtcccttctccgggttctgtggcctccttcctgagctccagagaggagggctggggcccaagacgaagggagtcagcccagcaccctgtgtggctcagggctgtccgagcccctcctgccggaagggactgtggcttcctagaaagttcttcctggaacggtgggggacctccccccttgctctccgtcctaagcagcaggcaagcgcatccctcgctccagagatcccccaggtcctagaggtggtcctcagcccatgctccctccacagtgcctctgccccgccaccttgtcctgggccgccagggggcatgtccagcgctctactgctcttcaccctccagggcgccctcagcgtggggcagccccggcccctgaccctccttagacctctctgctcccgtgaggcccaggcccctccctatgagctgccagctctggtgggcgccatgcacttctgcagggcgggctggggcccccacaggtgctgtacacagcattcacctggctccgcgctcccagctgtggagatggttctggatctgggcactccctgctgtgccccccacccagtccccccacagccccgctcactcgcagctgcacacgggagcacggaggatgcagcaggctggagcccatcccgcactccggccaccaggctgcccccgccaggccacccccaccaggccaccctatagcctgagggagcccctggctctccaagtgagtgggaataaaagaggtttgtccctggagcccacacctgtccccctgcagcctcctcacgagccagtgaggcaggatcatcctgaagagctccttcacaggggaacagaggctcaggcgtggaggaatgagtcactgccacatttggagccctcactggtgccacgtgcccaccatgatagcccagggcctggccctttgtccccacctgcgagtgcggggaccgagctggatctcagcggggcgccgctctgcaagggaaggtcagggactggtcttctttggggccccagccccaggctctctgcaagtgctcagtgacccctacctcacagtgcccatctctcctcctagcggtgggggttctcccctaccaccgggctcccagcacctcccctgttcttgtgcacaccatgtctgaccaccccatgtcgtcagaggctggcagagggtctggctggatctccccagggaagactgcgtctttcttacttggagtgtggatgcctgaagccagatgaaggtacccgacatgggggtctccaggcgcacagaggccaaacctcaccctctcactcaaggggctgagcagaggacagagcgagggccgagtggtccaggtggtcaaagtgcacgccgtgggcagagcgggctgggccgcatctgggaggcaggctggctgccaggagggctgaagctgccagccctggcaacaagcctgttctgctccccagtccccaaagggtcacctgggcctggggccaccctgggttttggctatgctccttccctggctgcccaagcctctggacacccaggctctggctctgcctgctgctgacgcctgcaccagcagagccatcacttcgagcccagctctcaagccccctggtggcccctggcacttggcaagagttgctgctttgctcaccctggacatggactttccactctgcccagaggtgatctggggctgcccaaagccccgcacggctcgcctcattcttttcccatcccggtggtttggggcctgtggtcagagtgcatctgggggcccctgagagtgtcgtcacctcccacagcctcccgccttgggtccacctttaggacctgtttcctgggcggcctcccttctccaggctgagcctacattttgcatcccccaccttctgaccacacccccacctcacacctcggctgtctttcctccattccagggcggctctgggtctgttcggctgcactatgccccctggccccactatgccatcttcctccttgcctgctcccctggctgcttccaagcctctctcccctccaggctgagtctcctctgagccaggtctgccctccctgctctgcggccacatcacatcgtctgcctgtctgtgctggggtcctgtgttccctctcttctctctgggcacggacaccccatcctacttctgagggggtccccaggtacctccgcctgtgcttcctcccttgcgtccatggcgtttccttcccctgcgtgctgtccagctcctacccctcaaatgggcagctgaaggcaggtgcacctgggtctcccctgccccctgttcccaggctggcagtgcccggccttcaccccctagttcctccttccatctccaagatacttcctctggataactgggctccctgccgaggaccacagggctccagcgcgccctggtcagggtttagaatccccgtccttctgctgcagtgctgacctcagggcactgggctgtttatgtctggccatgcccagtacacgggctgaaggggcctgccctgggtctccatagcgcactcccagcctcccgtgccctccaggtctagctagagccagtgtccagccagcagacgggtggaaagctatggccatgtatgcaggggtgtgagatcacagggtgtttctctgtggtgtggcagcgccaggtgggagctggcatcctgtgcattgagggcccctgtgctgtggctgttggggctctgggcaccctttccaaggggccatcaggtaacgctttgccttaggctccagggtgcaccagagaccttctgggagtcagaggggcagctgccttggccagggaatgcctggggttgcttccagaaagaggtcttccccctaccccacctctgcactgttgatggtgctggttactgggccgtggctccaggacagagggtccctgcagttacacacagccctgcctcattgcaggaacaccagtcccgggcagctgagacctgcacacctgtagcagtgacctcggttctgtcccagacctcaccccactaccaaaaggggcagagaacaattcctttgggttgaaggaatgaatgaatggtgggagcctgcaagcagagcccagaagggagtgaagcagtgtaagtgggtgaacccactgcaccacactggtagtcacaggtgtgtgcacactgggcgccagggccccttgctctgtgccgggcacagtcgtcgtacaaactgccattgagtgccagtgccaagaggttgggcccaggagcctcacggcctctgaaaagcaccgccggcctccccctgcgcttgccactctgctgccttcactgcctggcgtgagctcgctgacagccaggccctgggccagggctggggatggacacagaggcaggagagctggtcgctcccattccagggggagaggtgcaaacagccactccactgtcccctcctccccaagcctgcatgagagctgaaccaggaggtggtatagcatgggcctggcacagctagggccgagggggaagcgggcagagtgcagtggcgttgaggcacggcgccgtcagacatgcagtccgctaacgctgtggggaggagaaggctctggagcatgggaggtagcgagcctcgtccaggtgttgctgcaggtagggctgacgatgggggctgcattgcaggggagaaaggggcctccttgggaaccctgggccaagaagacgctgtggccagaggagtcatccatggcagtaaagggcctatggattgcagggcagagaagggcagtggcaagtgggccgggagtggagggggccctggcaggtcaaaggaggtcaatggacagcccccaagccaggcagatggcaggtggcatcccaaggatttagggacggggtggacaggagcaggacgatggctgcagggcaaggctgggacccgcacgggtgacaagctcagtgcaggggcagggcatgcgccatctgggcagtgtggaggtgaggagcaaggacaaagcctgtgtgtggagacgccttgcacgtgtcagcagcatggcgtcggcgtgggagggaggaggtagcgtcggcgtgggggaggagcgtggcgtcggcgtcgtggggaggagcgtggcgtcggcgtggtggggaggagcgtggcgtcggcgtcgtggggaggagcgtggcgtcggcgtcgtggggaggagcgtggcgtcggcgtcgtggggaggagcgtggcgtcggcgtcgtggggaggagcgtggcgtcggcgtcgtggggaggagcgtggcgtcggcgtcgtggggaggagcgtggcgtcggcgtcgtggggaggagcgtggcgtcggcgtcgtggggaggagcgtggcgtcggcgtcgtggggaggagcgtggcgtcggcgtcgtggggaggagcgtggcgtcggcgtcgtggggaggagcgtggcgtcggcatggtagggaggagctgtggggtggcaacccagaggcaaggaggtgggcagaggcccacgaacctggccctgaccctcagctcgtccccagctcacagcacagccctcccctggctgcctccaaggagtctccagttactgagtggccactccgtgccagctcagcccacccctcaccttcccagtgcctgtggaggcccaactagggtgacgctgggagaggagagggcttggaggagccacgggtcaaatgcaggaggccacacctgcctgcccaggaggactgcaggagccggatccttaacacctggaggggagcgggtgggtgcggtggcgtacatctgtaactccagcactttgggaggccgaggcgagcggatcacttagggtcaggagttcaagaccagcctggccaagtgaaacccggtttctactaaaaatacaaaaattatctgggcatgctggtgggcgcctgtagtcccagctactggggagggtgaggtggtagaatagcttgaactcaggaggcagaggttgcagtgagccaggatcacaccattgcactccaacctgggcgacagagtgagaccctgtctcaaaaaaaaattccattgtttaaagctgtccaggctgtgtattttgttttggcagccctggagactatagatagatagatgatatggagagaggtgtagagagatatttacttataaatatatgtacatatataaaatgcctggagggaccagcaatggtgggaggactggggagtggccccgagaggtgctgcgggtgtgagggtgcgcacagcctcctggaggggaggggcctgagtggggcagtggagatagggctggccacagggccgtgccttccctggcccccagaggggtgagttgggtggacccgcagggacaaagcaggggtcagagctgtgtttggttcctgagtgggccttgtccaggatggagagagcctcttttcctaaactccctgccaccagggaggcagctggcacggatgtcccctagggactgtgagtgacaagccagactagccagagagtgggggggggggtggggctcagtgtccgtgggggctcagaagctgtgtcctgacccaagcctgcaccacagaggggaagaccccaagagaaacctggaggcaggtagcgccagggggccaccaggctcccttggtgcccctaactctgggcccccagcctggtctgagcctttgggtacaggtcactcaaggcaggtgttctgcaccatccatcttcatatcgtctctctcactcgcacccttgcatcactgtgcttctgagagttgggggcttaccttaatctactgtccctgacctggcaaacagtgcaaaggtggcatgatgtggccctgcagctgctacacctctaggcgccatcattcatgccatggctctgtgacagcaccccctagagttgtgcagtgtgcaacatgggtgactgtccatggcagctcacagcatgtggctcagcccattggccatgcagggggctcctttcctaggagcagcagggctgggcttcctctccacctgtaggggcagcagtgggcatcttaggtaaatgcaggactctgcagcccctagaggaccctgagtggtggctgaaggatggatgtgcccatggccttcccagagctcaggtgcctcagctctgctttcagaggagcagggcagccgaggggtgcctggcagagaggcctgccggctggacgtggggaccctggagcttggcctgaggggctgtggtgggagccgtgcctgagcagggctgtcccgtggcacacactcgccctggctcttctgcccatcacttatccccatgaggcaggaaagacagagtgagtgcggctgccctgggggctcggcactggggggatggtgacaggactcggggctcagggccgggctgcctggaacaagcagaccctgaggggccccctgcagcaggatccatggacccatctactgggccagcaggggccaggaaaggagaagagggagaccggtggggctggaggcaccagtgcgtctgtgcaagaggaggaagccctgtgagagggcagcagcctccggactgccctgcacaccgtgctgagaggcctggcgtccacctgcagcccaaggcagctccaaaagaaggtcctggtgcttctccaggaggcgaggctggccctgatgtttggtccctcctcatcggccagcctcatggtcagccttggctggtggctcccatggcaaggcagaccctggcctggacctgaaggctctgcctttgtgcagagccccagcctgacggtaccagttttcctttgttcccctttgtccagccctccttggatgcctttgctgtgggaatcccaggctgaagctggaggaaaggcaggaggacttcttgtccccagcctctcaccacgtgcctgtgcagcctgacgtcctgagacctcaactggtgatggggaggacagactggtgtctctctggggccatcgtcctgggctccccagaactgggagcccctgcggatcagcaggccccaggctcagcgtcctgagctggctcctgctcccaggggtggcctggcactggccctgcggtcattggacacccactggcctacgacaagccgcgcctgttcctaggagcctgtgtttgcccccaacagagccagggtgtgcctagcagggcgttcctgggcctgttgacgtgggcactgggcactctgccatggtaggcagcacttggcctgactgccaggtcatccctcgacgcctgcccccccgcccaggcggggctgtgtacaagggataggcttcccttctctcagtttccctacctgtcctcagagacctcacccctgactgcccccaaaaggcagcagatgcagtcgtgggcatgaaggtactccatgaccccagcggagaggaattaccacatatgtgccgaggcaaggacagagtaagagtgggggtctccaggagggtgctgtgacccccaaacccagaatctgttcgagtcacgccagggcctgccccgtcccgatggactgaacctgtgcgcccagggctgactcagcgtctgctgagcagcacaggctgagagccctgcccatccgcccaggctgcagaagtaccctgaccctccacccccaccctgccttggcgcctggcagcattagctcccacaaggcctccaggtgccctcagaccaccctccctcctgccaccaggcttcctgcatctctccacctcccaggatccccacccagttcacccagcaccgccccgcccagagccactgtcctgaactggtttcctataaggactgggcccagccaggcagggccaggcagaagtcagggcgtggaggtggggactcctgccctgcgaaggggcttcagggctctgagtgctgcctaatctgccagtgtgtgaagttacgtcccaggagggtgagccccctgcctggcatctctggatctgccccccctctgtccccagggttgccctgccacgaggcgccggggctgtttccgtgtaactcttgtccagatgcatcgtgaggagctagtgcagagggagggggccgccatcacggagggtcctgcttgggcaggcggggaaaggctatgtgagacaccccactgccaggcttgtgagggtgggaggggagctgagacccctctgccgggcagagagcagtggggtgtggctgggagaatcccccatgcatagacaagttgagggcttttctgccgggaggtgaggcaggaaggtggggctggatctgggctctggggtcctggggacagagtgggccccaaaagggaagtagtgaaggagagaccagaccagtctgtggggcagggtatccgtgtgtggccccccgcaaccccaccgggaccctgcttaccctccaggtggagctcaaggagagagggcaacaggaagggtcccccatgccatccagtggctggccagaagtggggctggagacctggccttctctcctggggcagagaccttctggggctccctccaggctctgtcacactgggcctacaggggtctcttatggtggcataaagaccaaaaggtgctgtagggatatcccttgccgttggtgggggcctggcttcaggggcaatgagccatcatgggccatcagagatgctgcctcttcctcagctgtgaagcggggcctcctgcctgcacgtaggggagccctatcagccgtgccttgggactggagtgtccctgtatccatcatgccaccagcccacctgccctgcaggagcagagggtgggggcagcaggggacacccactggacctgtgccctgctgagcagagccaagcaaaaggcaggagggctttggttcttgccccacctggagagggtccctagcttatcctctagcttccactggcacaagaggcccttggggaagcgaaggcagtggcatccagggcgtggcacagtttgcttgtatcatgtggctgtctcatggcaggagggggattggagcctgcacatgctagtcccaggccctctccccaccatcagcaggaatccccccagagaggggagcctgtggctgggtgtttcccagaacagggctggctcagaatggctttttctttttcattcttagacgggaggtgcctgcccaaagggaagggtttctgctaaagtgggtgagggcaggtttggccgtgggggtgctgaattcatgttctgtgggagggttaggcctcctcattcctgcatgagaggagcgagctccagagcggggcccgcagctgcagagacctgcaccaagccacctggaggtgttggcaccagcctgggccagaccctccccgacccaggcccctgaccaaactgctgccctccttccaaggtgcaggatgcccacatcccagtcccgcacagacgcatcagagctggccaccaaaccagacaccccaaaatccaacagcagtgccctgcagggacagacgaagccccatgtgggtcagtccatgtccggggggtcctcagtacccaagtgccttcagctcagccgggtttctgttccaggggggcaacaacgccggccacacggtggtggtggatgggaaagagtacgacttccacctgctgcccagcggcatcatcaacaccaaggccgtgtccttcattggtgagtgccctgccccgacctgtgtgtgagcaggaaagggggtgtcagccagcccaggagccccacgcatgggggcacggggcaccagagcctggtgatgactgctctagcagtaggctggaccccagcctccacccgccccaccaggcactgttgcacagaaacctgcatagccggggcctgggctgggaacgcagctgagaggacacagggctgatgggaggaggggcagagtcacatccaccgcgcaggagcgggagtgcctgatccctgatccctgatccctcacatgcacatacttcctgtgtgggcatggagaccacacgcccatgtgcccgtgactccatgtgcatacctgtgagtgagtatgtgcttgcgacaggcctggcttctcgctgcgtggcgaccaggctgtgtggacaaggccgtgccctccccggccctgccgagccatgtggccgtcctcttgcctgggctgctgtggccacgtggcaggcctggttccagccccttcccagtccgtgctgcagagggacctccttccacatcgcctgccccctcctgggtccggacacagctcctcccctgcagccacctgtgaccactcagtgctccaagaggcgagccacctctgtccccagggttccgtggctctttccctccttctctcggtcagaagcctgctctgtgcaccctggcctcagctcttagcccaaaacccccttgctcagagaagcttttcctgatcccagtggccaagccagccaggccccttcttgtactttcccttccagctgtttccagacttcagcaaggccatccttgtgatgtatctgaccccttcccagcccgtcaggaagtgggggtcaggcgcctcaggtgtgtgcccagcagatgcatgggcctggacccattcaatgtgagcagagggaggaagatagcgcggaggtggctgccgcaggggccatgtgtggtcaggggctgagctggagtgactcacccaagaccatcccctggggtgcagacccagtccctggccctcccagcagtggggccaggacagtgtgggggcggtccctagttcacagcagggaggccctaagcagtgaggtggcctgcccgccatgtcgcaggagcccctagccctggcagactgggcagtagcgctggctggccactccgggttgtgctgcaggaagcccttctccagccgccagcctcgtcctgcccagccctgggccccacatggcaggaaacaaggccaaagaggcaccgcttagcaagcggcaggacgtgccagggctcacacagacaccctgagcttgcaacactccgggcctctgccgcgtgtttatttcaggatgccgtggcatttgggtgaccttttgtgctcaccatggcttgcgtcgtctccgggtcactctcgtctggactgaagtcccgtctccctcagctgagcctgtgccatggccagcctcagcgggaactggcaaagggaaaggggttccttggggaggcagcaggggtttctgaaggcttcatcttcaagcaaggggtttagagctcaggagtgtatttgtgtttttttgttttttgtttattttgagacagggtctggctgtgtcactcaggctggaatgcaatggcacagtgcctggctcactgcagcctcaacctactgggcccaggnnnnnnnnnnnnnnnnnnnnnnnnnnnnnnnnnnnnnnnnnnnnnnnnnnnnnnnnnnnnnnnnnnnnnnnnnnnnnnnnnnnnnnnnnnnnnnnnnnnnnnnnnnnnnnnnnnnnnnnnnnnnnnnnnnnnnnnnnnnnnnnnnnnnnnnnnnnnnnnnnnnnnnnnnnnnnnnnnnnnnnnnnnnnnnnnnnnnnnnnnnnnnnnnnnnnnnnnnnnnnnnnnnnnnnnnnnnnnnnnnnnnnnnnnnnnnnnnnnnnnnnnnnnnnnnnnnnnnnnnnnnnnnnnnnnnnnnnnnnnnnnnnnnnnnnnnnnnnnnnnnnnnnnnnnnnnnnnnnnnnnnnnnnnnnnnnnnnnnnnnnnngtgcatttgtgacaatcgatgaacctacactgacaggtcatgatcacccagagtacatagtcacctctgggttcacacttggtgctgtacattctaccagtctggacaaacgtatgctgtgtatctgccactatagtatcgtacagaattttttactgtcctaaaacccccgagctccacccatttcattcatctctcccccctcaaccctcggcagccactcaccttatgctgtctcctcagttttgccttttccagaatctcagagttggaattgtacagtatgtcgccttttcggattggcttctttcactcagtaacatgcatttaactttcctctatgtcttttcatggcttgaaagctcatttcttttcagtgttgaataatactccactgtctggatggaccacagttgatttctccttttgtttactgatgggcctcttgactgctgccgagtttcggcgattatgaatagagctgcacatctacgcgcaggtttctgcagggacatcaatttccagctccttaaataccgaggaatgtgttttgcatccatcaccaccatccacctccagaactttcttatcttcacacactgaaatgctgaaatatcaaataactccccagtctccctctcccagcccctggcgcctcccattctactttctatctctatgaatttcacttttccagggacttcatataagcggaatcatcctgtttgtgtccgtttgtaactgccttatttcactcagcataatgtcttcgaggcctgtgtcagaatttccttccttttttaaggctgaatactcttccatcgtatgggtagaccgtgttctgcttacccattcatctgtcaatggacagctcttggctactctgaataatgctgctatgaacataggtgtgcccatttcatgctgggttgttttttgttgttgtttgtttgcttgtttgttttttgagacggagtctcgctctgtcacccagagtgcagtggcaggatctcagctcactgcaacctccgcctcccaggttcaagcgattctcctgcctcagcctcccgagtagctgagattacaggcatgcgccaccatgccaagataattttttgtatttttactagagatggggtttcaccatgtgggccaggctggtttcgaactcctgacctcaagtgatcctcctgcctcagcctcccaaagtgctaggattacaggcatgagccaccgcacccacccatttcatgctgttcttaatgtatgttttccagtgtctgggacacaactctgtctctcatgcctctgtctctcatgcaggcaacggggtggtcatccacttgccaggcttgtttgaggaagcagagaagaatgaaaagaaaggtaggtccaagctcctgcagacttgccctgtcccagacgcggtgccctgagcggttgttggctggagccttcctgagggtttctcccacggaggggactggcaggggtgggttcccaacatagctggcccagctcatcacccgccggctctacccgcgcagaaagcgagtgagctgggcaacccagaggcctcagatgctggtggcctcagcatcacggggccaggtagcacctgggaagtccaggaaggagccagggacctggaccagacacccagtgggaagtggggactgctggcctaactatgcctgcagggaaggatgtggctcctgggggctctgcggagcatctggccaggcacgcagaggccagacccaccagctgggggtgtgggcaagtcagacctagtgtgggcagggacggacggcagcctgagtgggtctgggaggacgctgagctgcagcctcaggctcaagggcgggacgggtgtgaaaagagcaagaatgtgattctggggacatgggcaccagggggtacccagactgaggccctgagggggcaggtcaccttcagagtggcagcagctagggaggaaagccgggcactcacaccagctctggcttcccagcctggagtgggcgaagcctgcaggcacgagagtgggcatcctggcggcggggtggagtgagggtccgggagtctcagctggggaggagacaacgaggggcgggtctgccgcttgctgcgcaacagaggtggccctgtcagcctcctccctgcatgccttacctggatgggagccgggcgagctagcccagctctggcccctcacgtgtgagctgcagcgcacctgtgaacactgacccacctgtgtgccgtgtccccgcaggcctgaaggactgggagaagaggctcatcatctctgacagagcccaccttggtacgtttcccactggagtacagggaacagcccctcctgcccccaccattgccagccggccctgctcctacatggccaccgagatcagggaagtccccaaggccttcttgctccacatggctccattagcttgtacattacccttttcaaagagcttcaagttgggagctgggtcaggggtcactagcccatttgcaggtggggagactgagccccagacactcatggtcacaccccagtttgtcctctttgaaatctcaaccacccccttcccaggagactcaggccagcaggaggtgaggtccatgtatacacatctgtcctctgcttctctcctgtctcctgctgccctcacctggcccgcccgacagtgtttgattttcaccaggctgtcgacggacttcaggaagtgcagcgccaggcacaagaggggaagaagtaagtctgccgggacactctcaccctcggggagtcttctgggcccgtaagccggtagactgtggggcgtgtctggtcctgggcacaacgaggagggtacctcaacccactcaaagcccctggagaatggcaccgtcaaaattccacagcgcatcacccaacccccggacgagccagcccgtctctctctggggttgcacactgtccttgccggctgccactgccacgcggctccccccaggagtgcataagccctaccgtcacctgtcacacccaccacctttcctgactccacacggccccagggaagacacgaggaacactaaagcagtttagtagaacctcagatgtgccaaggacacaggagtgaagcagatgagtgtcctgcctcagagaggtgatggtcacacacttacccactcacactctcacacaggcacacactcatgctcttacatacacaccacacgcccacgcatgctcgcacagttatgcacatgtgcacacgccacacaagcccacacacccacgcaaatgcacaaaagtacacacagccacacatgcacacactccacatgcacacatccacccacaggcacacaccataccagtacatccatgctagtgcgtacacccacacacgcacacactcacagctcagccagacacaggcagcaatggtgggcactggagtcatgagccggcgggggtcatggcctcagtgggatgcctgagctcctcagggctcctgggttctcatgggtacccactccccatctttcagtataggcaccaccaagaagggaatcggaccaacctactcttccaaagctgcccggacaggcctccgcatctgcgacctcctgtcagattttgatgagttttcttccaggtacctgagccgtctgcagtccccggggaggatggggagaagttgccggaagggactgtggctagtggggagggccctgaggaccagcgtggaccatgacagggggtgatgatgactgtcccttgtgcagattcaagaacctggcccaccagcaccagtcgatgttccccaccctggaaatagacattgaaggccaactcaaaaggctcaaggtgaagtcggggccgcagtgtgggggctgcggaagtgctcctccagggaggctggatgtcctacctggtgctcgttgaacacccttggggcacacctgatactaggcattgttatgggctggccaaccttcttgggacgcaggcctcccctgccccaggccacaggctcactctgctgcttggcccttccttgcagggctttgctgagcggatcagacccatggtccgagatggtgtttactttatgtatgaggcactccacggcccccccaagaagatcctggtggagggtgccaacgccgccctcctcgacattgacttcggtatgtccgggagggtgtgcgtgccaacgacctttcgtgcctgccagggaagacccagctgcggagagccgtgggaaccgatgggggagggaggggcagacccgctttccaaggccacagtgccatccatgcccgcggaaatgatcctcgtgtccttagtgttcctattgtcagcaagggaggggagaggagaaagggctgggctagagatgaaagaacagggtgacaaggtcaggggtgggg

SEQ ID NO: 363 - DNA, 945 bp, Homo sapiens
agcgtggcgtcggcatggtagggaggagctgtggggtggcaacccagaggcaaggaggtgggcagaggcccacgaacctggccctgaccctcagctcgtccccagctcacagcacagccctcccctggctgcctccaaggagtctccagttactgagtggccactccgtgccagctcagcccacccctcaccttcccagtgcctgtggaggcccaactagggtgacgctgggagaggagagggcttggaggagccacgggtcaaatgcaggaggccacacctgcctgcccaggaggactgcaggagccggatccttaacacctggaggggagcgggggggcaacaacgccggccacacggtggtggtggatgggaaagagtacgacttccacctgctgcccagcggcatcatcaacaccaaggccgtgtccttcattggcaacggggtggtcatccacttgccaggcttgtttgaggaagcagagaagaatgaaaagaaaggcctgaaggactgggagaagaggctcatcatctctgacagagcccaccttgtgtttgattttcaccaggctgtcgacggacttcaggaagtgcagcgccaggcacaagaggggaagaatataggcaccaccaagaagggaatcggaccaacctactcttccaaagctgcccggacaggcctccgcatctgcgacctcctgtcagattttgatgagttttcttccagattcaagaacctggcccaccagcaccagtcgatgttccccaccctggaaatagacattgaaggccaactcaaaaggctcaagggctttgctgagcggatcagacccatggtccgagatggtgtttactttatgtatgaggcactccacggcccccccaagaagatcctggtggagggtgccaacgccgccctcctcgacattgacttcggtatgtccg

SEQ ID NO: 364 - protein, 311 aa, Homo sapiens
  VARIANT (1)...(311): Xaa = Any Amino Acid
MVGRSCGVATQRQGGGQRPTNLALTLSSSPAHSTALPWLPPRSLQLLSGHSVPAQPTPHLPSACGGPTRVTLGEERAWRSHGSNAGGHTCLPRRTAGAGSLTPGGERGGNNAGHTVVVDGKEYDFHLLPSGIINTKAVSFIGNGVVIHLPGLFEEAEKNEKKGLKDWEKRLIISDRAHLVFDFHQAVDGLQEVQRQAQEGKNIGTTKKGIGPTYSSKAARTGLRICDLLSDFDEFSSRFKNLAHQHQSMFPTLEIDIEGQLKRLKGFAERIRPMVRDGVYFMYEALHGPPKKILVEGANAALLDIDFGMSX

SEQ ID NO: 365 - DNA, 137454 bp, Mus musculus
caccttgtgatggtgttgttagagttttgatttttgcagtcttggtttctacggccttctgccctctcccactttacaacgcagtagcgtttccttcttgttttttgttttaaaatccctcctgcctcagcgcccccggctgttctcaggtttacacccttgtttatgaacctgggttcagtgcgctcagctgtttgtggcctcctggaggatgggtggtactcctcagtctacacacggtgcgcgcttctcggaaacggaggtttgtttcgcagagctgaaaccacctttgttgtgttgattcctgtcagctgtcagaaatcagagaccacccctggaaggagcctggggcggggccagggcggcagccacgcggcaaaggcttcggcagaataaagtttttccatagcaacctgagctcatatttaaaaggagaattgtcttctaaatggtagaagtgaaaatagactccctcctgcgcctaacctgaggacagggagagcaagggaggaagcaaccaggcctggcagggatctaaccagctggcactgtgtccacactccccctccccttccctctccatcccttctcccacccctccccttcctccctcccttcccccttttcctctccctcctctctccccctcccttccctctcccttctctctcccccttcctctgttggtttgttcgttcgttcttttgttagttttcattcgaagcagcttctttctttgctaaagttgctggctggcacaggtagagtgggagaacagagcaactgtccaccccaccagcctggtggattggcgctgactctgttttctgagaggagaccggcttttgtgctctgcttcttagaagctgcaaacttgctgcctacctaaggcaaggcaggggatattaagaggtcagagtcaggggtcaccgggcctctttcctcagggcaaggcctccataatgctgggacacagtctctttagtttgatgtttagcctttaattgctgctttctttttattttgttctgttttttcaaaccagtctcatgtatcccaggttgacctagaacactgttgtgtagttgagctaacctgatacttttgagtgctgggatgacaggggtgcagctaccccaaggcgcctggcttctgtgtgctggggattgtccagggcttctccagctgagccacatctgaagccttcaccactgtccccttcagcctgacaatgcacaaggtcagggagaatgggggtttctcggtctgcaatgctccattttctccaaagcaacccagccttctcagctgtctgcacggtgctggatgtagcaggtttagggctcatccaataagcagggagcccaagagtgacagcttgagtgtggcaagaggggtgggccttgtctacagcatcctcctctgtccacagcaatgacaggcgtggagaactggggattctgaagtggtggctctttcaaataaaggagtgtttcgagacctcctccaacagaatctttgaaataaccagatgcaataagtgttcccctttcaaaagaggaatattattttcttccatggaatctgggtgtggggtgtgggtgttgttatgctattacttttattttttattcgtgtatgcatatgtgtgtgtgtgtgtgtgagagagagagagagagagagagagagagagtgctataggtgagcagtgctttgggaagccaagacagagtgttggatctcctggagctggaactacaaggtgaaccactcagtgtgggtgctggggaccaaacctgggtcctcccgcgtgttcgagcaggatgaccttaactgccgcaccacctttcaaggcccttctttggaatctttgaaaaaaagtttccttcaagttattgttctgtcctcagcatgtcacttagtgactgagaggtcagtaagatgcaaatattgaagaaaggccacacaagtcacacaaggaagatgtttccttgcgctggtgaagtggcttaagagataacagtgcttgctgcctacagtgagggcctgggcatcatccccaggccccacgtggtggaaggagagaaccaactctgacagttgccctttgaccttcatgcaaacactgtgatcccctcccaccacccataccttacctgcccctgcacaagcaaatacatacatggaaacaaaaattagagttttcaaagtattattatgttcaagtccttaattctgaattcttgtgtctttgcttctcagtggaggaagtttggggtttggggagatttcagatctgtgatttttcaattatggatgttcaatctgtgggcagaaatgaagttactaagcccaaatctgcagaccctcatgtcttcagggctcctgatgttgctttctggcctgcagagcgcactgggcatcttcctgcccagtgtaagggctgcagtaatatctgtaactgtcttgtttttgttattattgttgttggtttgtttggttttgttgttgttgttgtgtttgtttgttttttggtttggtttggttttggtttttcgagacagggtttctctgtagtcctggctgtcctggagctcactctgtagaccaggctggcacggggaaacaatgtatcaaaacaaaataaaacaacttcccctgcacccccccccccaaaaaacccacaaacaaaaagtcgctaaccactcactccaagcaatcaaaccctgagcccacagctctgaggtcacagaccatacccaatgtcagtctttcctgaggggctttatgggttgttctcctttctagggaacaaatagatttgttcaatgagcaatcgccttgtaatcttactgaagaaaatccattgttgaccaaaaaagaaaaaggaaggaagaaagtatattcaggagaaaatatgggtgatcatggcctggcaacagagacttgggttcccccaaactgcatatacaatgtgaaagcaatatcatgaagtttttatagtagcagaataaaggatatacatcaagatgctttgaagtctttggtgggatcaatcgtcatggagacaggttgacaaccaagtggagaagcctcagccccagcctcacatactatgtgatgactcagcttttggactgggagaagccaaagatctgctcagttaatactttcctaaggaaaacaagtgcttcgtataccttccaatgattctcctagtgctcacaaagtctctaggtcaggaagagagacgggcaacaaatggctattaagaggactgaagatggcccaagataatttgactctggacctgctacattccaaactcttcacaattattgatgctctaatctgctgaaagtccagataccctgaagttggaacaatatgcaagaagcctgaaaggcctggagagggctgttatcatctctttgaatcactgggacagccgtactgttggtggccatgatcttgtggtcacagcactttgcaattagacacatcttatgtgtatttttgctggcaaagtcgcccaacgaaaaggttatttctagctttgcaatcttttcagtattcccccgtgattccagctactccacagtttcagttcctctctcctaccttgttcttctttctacttcttttacatctatttagttcatcttctctcccctgttcttaagttggtaaatctgaaaaaaaaaattgttgaaaaaattgctgaagagatggctcagcagttaagagcactggctgctcttgtagaggacctgggtttgactccctgcagccacatggaaatttacaaccatccttaagtccagttccagggaatctgatgccctcttctgatctccataggtaccaggcatgcaaatggtatttatacataatgcaggcaaaacacatgtacacacatatacacacacatgcacaaaatatacacaaattacagactgagattattgcaacctaattcttcataccaaaagataataaccttttgttaatattccttgtcatgcatagatacactaagcacaaatacttttacctcagagcttcccactgcacctaagctctggtagatagatcattattatttttcaaatgaatgaatgaatgaatgagtgaatgaatgaatgaatgaatgagtgaatgcaagaaggaagcagtttctcagggcaagaagcaggccttgcacaattgccatcagacttacataacaggaagaatatagagtacccaaatgttgcccatccctgagcttatgtgaaggtctacagtgagacttagcccacgtgtgaccaatcagcctttggtccaagtgactgaggtgcatcctcacattgattggaagcaaattatgttattctcctcttaaactgcttttactgctgtctgcctcactgagaaacttgggcttcactttccctttcagatgtaccccttccttcttagtcacagctccctctgcacaaagaagtgacgaatgtctgagacgataaagggcaattacttcaatctgatcactgcacgttggatacatgtatttaaatgtcactgtgcactccataaaatacataattgcaatatgtcaagtatgataaaaagtgtattgcaaaataagagtgattagcactgtgggttggggatatggttctgagcagctaaaatgcttaccacgcaagcatgggggccagcgtacagctccctaaaccctcgcaactgggtttccgacctgaaaaggcaaacacgtgggatccccagggaaaggtggctagagagactaaccatgtaactgagagatgctagcttacaagaaaaagtggaagatttctaacatcaaatttaggtttccaaacatgtacacacacactcaccacaggaaaaaaatgaaaaacataaaataaataaataatgtcagtttgggtcctcaacctgtcacagtctagaatcacctgggaagagagccccaatgcagcgctgtctagatcgggttggcccatggtcatgcctgtgacgtttcttcctgattgtgttaagttaggtgggaaggcccaccgctataggaggagctgttcctttggtttgagtcttggactgtgtacaggtggagaggaagaagcctgaacaaaagcaagcatacatgccctcattctctctttgctcttcgcagtggctgtgaagtccagccttgacttcctggagatgatggcctgcatgcataatgatccttcctcccttagggctacttttgtcgagtgttcaacagaaacaagcacactcctgaatctctctccttcccctctccctgtcccttcctctctgcttcctgggccactgagatgtgaacaagcagctgcctcatactcatgctgccttgcagccagtgatccccataccctccctgttgtgatgaactatagctcacaaaccatgaaccatgcctcccctctctgactttgccttttatctggtatttggtcacagcaatgaaaaaaaatgtaactaattcgggggttcatgaaagagatagctcttgaactaagctccgaagataagtagacattttccaagttgggagaccagataggaggggccttctgggtaaggaagccatgtaagcaaagacttgcaatggggagctgaaaacaaagcccattacccttattccttacagatattctggtcagcatggtgtagtattgaaggatgtggactctgaggcctgggtcaaatgtcagcctctctgccacttaccagactcaagatttgggcaagccactttactctttgaaccttaaattgcagatactaattatacctgtgtataggcttggtgtaaaaattcagtaagccaataagtttagagctatatgcagcattgtatatatgttagcttttacttacacatgttctttttccattctgcccacttggggatttttatataaattcaatcatactatttgtgttgtataagatttcttagtttgtgtaatattcaggaaattcttacatataaatgcattatctaattccattaacttttctcctcacctaaccatcaaacatgcacagcttctttctcaggtgattgtaaaatctggagacaaaggctgtgttttctgtatctctgcgttcaagagagtcttcgcagcttctgccctgattttgttagttatttttaagacatctcaattggagcgaaggagactagaggagagatgatttggatataaaatatctcccatgggctcatgtgtttgagtagttggtctccatctggtaacaccatttggggggattgtgagacctttaggaagtgtgtcttcagaggaagacgtggatcagtgagtccggttatgagatatacaccagctgttccctctgcttcctcacagctgatactattactctctcactgctgatacatcattctcagctgccacaaatataagccattcccaaccacagcttccgtcctcctctgggatgaactgtatcctcttgaactgtgagagccaaaaatggaaatttcctccttcaccgtgtttctgtccttgtctctgtctgatatcacattctattatggcagcaaaaaaagtaactgatccgagtactgagggttactgagactttatatagggcatgtgtcttagtcactgttctactgctgtgaagagacaccatgcccacggcaactcttataaaagaaagcatttcctcgaggctggcttacagtttcagagatttactccattattatcatggcaggaagcatgggggctggagaggtagctgagagttctgtatcaagatctacaagcagcaggaagagagagacactgggcctggcctaggcttttgaaacttcaaagcctgctctctaatcctttcaaataatgctgtgccctgagcattcaaatagatgagcttatgggagccttcttaccaaaaccatcacagcgtagggaaggtgcattctccatccccatagggactttgaaatgtgctctaagatgccccatggggcttttagatgggatgattagaacagaaacttactgtgcactgttgtcttcgagttttatttctgtgaagagacaccatgatcacagcaacacttctaaaagaaaacttaactggggctggcttacagttcagaaattcctcagcccattatcctcatggcgtaaagcatggtggcatacaggcagatgtggagctgtgtagttaagagttctacatctggattggtaggcagtaggaagagacagacacactaggcctgccttggacctttgagacctaaaaacccaccccagtgacacacttcatcccacaaattcatacctactccatcaaggccacacttcccgtgggactattggggtcatttgtattcaaactactacaacttgtgtggtcctgatttaaattattctatttaatcctcaaaactagccaaacccgtgagcacagttgtttgctgggcctgtcatgacagtataccatgaactaggtggttttcaacagtgatactcactgctgcatagttctagagcctggaaaccagaggtcaagtgtcgttagagatgattccttctaagggatgagagagaaagcccactcatgtctcttctcgtgctttattggccgtctatggtattgttcatagatctctgcctttgtcctcaagtggtgcactcttcttcccatgtctctctttaaatgtcctcattttataagagacctgttcatattggattaaggatccctgttccattatgataatgagctcaggatccccctactgcattgtgatgatgtgtgctcatgttcaccacttatagtcatcacaagccctattcccaaataaggtcacatgacgactccagcgcctggttctgcagggacacagtttcacttattcagaggtagggaaacagacctgaaaaggttacattgacacagatggttgtgaccgaacacctggcaaaaagcaattgaaggaaggaaggaaggacggaaggttggctatttggctaaagggttttagggtctagtccaccgtggctgggaagcacagcaatggaaacgcgaggcagctggtcacattgtgtctgtagtcaggaagctgggagatgaatgctggtgtgcactctctctctccttttcattcagcccactggatggtggtcggtgggacacacttgacgaggctacgaacacagggcgatggctgagaacgactcggctcccatcctctcttttgtctcaactgcgcaagataaaactctataccacagccaggttctgacatctggacctaattcactcagcttatgctattaattcaccagaaatagcattttcataggaactggggtaaggaggtgggtggccagaagcaacggagatctagggcaagctgtctgcctcttgctatttttcgagtgaacactactggcttttgggacaagacagttcctcctaccctaatgggcagttcctgtccatttgcaggaagcgtcctgccctaaggggcaagacccatgtaccataaatgatccccagccattgctcaatcccagcacacagcatttctaggctttccctgaagggcagtctctgccctggttgagatggccggtgatcccagcaggactcagcatgtccctacttttgggggaacctccccataggaactggttcatagatagaccctcgatagtgctgctggtccatcctcaacgactcttgacccctgggttaactgcttgacttgcttagccctaccatcaagattccccttgggaaacaattggcataattccaaggcagttacagaaggaaggaacgggctctcagcgcaaaggtaacactgggagtcttcaaaaacacacagtaaacaagactaaaaataaacacttggggtgaaccacagctcctcaactgacaccttccttcatttgcatcttctgcctctagaaaagccccagatggggttgtagtatctatctgtcacacactggtggaatctgttgggtagttctgggtggtggtgcaaaccactggtggtcacgtgaaagctgggctttaactcctcccttttggagggactgctgctgggttgggttgttttttgtttgtttgtttgttttttaagctacattttctttgttctccttcttcttcttcttcttcttcttcttcttcttcttcttcttcttcttcttcttcttcttcttcttcttcttcttctccttcttcttcttcttcttcttcttcttcttcttcttcctcctctttactgatgaaagtcctaagtatcagaatgagtaaatgttatgcaatggacattgtcagacacagacctattatctgctcactgatgtgggttggttagaactaggaaaagcccgggtgaatgctacagttgctttaagtgttactctaaagttgccctcaaatgaaagaggtttacaaaggaggaaaacgcaactgttgctaagggaaacaaacaaaaaaaaaaaaaaaaaagctcatgtcttccaaatgcaggctttggtgtagcacaaggcttgctttactttcaaataaactgtcattgaagcaaaagcaagatatgagaaatgtgagcctttctctttcaacactacccattgtgttgagattcataagcaggaaagctaagagcccaccgtcctctcaaagaaatatgaaagttggtgctttgaaatagaacttatcaaactctgcctgagtgatatctatgctggaatccgactggatctgcatccccttccgaaacaagtctttcttctcagtggtgagaattacctcacctggagttcacactgcaaaaagtttcagaaggcttttcatatgaatgaagctgctttcttcagggcagatgcggaagctgccctccccagggcttgggcaatccgctgtggggaaggaaatcgcctcccaggcagtgtggctgctcagagctaaagtggctcccgtgtgtcctaggttgtgagtgccttcagctcctggtcttcccacaatgcaattccttgaccctgaggatcttctggatgaagaggatgacatttttggcgaaggtaaacccatctctctggcaggagccaggctgcgctgctctactgtgggaacctttcaagtgctttgtatgaaggaagatagttgttcggagcaaggcgatcataatggggcacaaggcaaggcaaggacattgcagttgagcgattgttccgaaggttatgtttttaaaggattacagctaagtaaagatctgctttaggccagaaaaatagaacggagattttatactttgtccctcatatgtgtgctctttgatgacatccaaagggaaggctgtcacagtactttgtgtgtgccaggccctggggtaggaactgaatgaatggggccagagggcttctttctcctggtgaccagccagccctcctctcctcccacctcccacccccttctcttcctagatccttctcctccctccatccctccttctacttggctgtccccctccctttgttctgtcacattcatttgttaccaggctcttcatttttcttttccttgtgtgtgtagggggtcggggttgaatcctgggcacacccgacaccctctggcattgcttagctttccatctcgattcacagatcttcagttaatcgtgcagttgggcttagtgttttaaaaaggcaggcagtaacctccagatgtcttattctaatgctgcaaccagatgggtcataggcaaaaacctttctagaatttggaattgcctaaatggatgggaattgggactgggggaacctcagatttttcataaaataccttgtttgggttttttttttttttaagtctgttaagtagtataaaagggatactgggagtgagggggtgtaccctgtctcctaaatcttacaagttcaaccaggtaagaatcaagtgtgtgcactgagaagccctgtgctccaggctattcctgctatctacgcttactttgttttagccatagaaatatttaaaattagagtttatgagtgtggcccggggacacatccttgtaattccagcactggtgtgtggagacaggaggatcggtagtcaagggcatcctcggctacatagtacattgagtccagcctgagctatgagagacattgtgtcaaaagaaaatgtaaatgacatcatacgataataatgcaggccaggcatggtggcacacgcctctaatctcaagacttaggaggcaaaggtgaggagttcaaggccagcttgggctacacagtgtgatcttgttagaaaaaaaataagcaaaaacaaaagtaagataagatcatgattggggtttttatcagtgtctattggtgagagggatccctgttgagctttgctgctggtgactcaggcttccatctgatgctttgcttgactgatgggcactgagaacggcgggtgtcttgaagtcttaggcttgggctctctgttctttgacttcccctcctggagttggtggttacttagaaaccaggttaacaattacaactagaaagattcgcctactttggataatcgcctactttgcagccacttttccctccaggtgtgacactctaaaatgtccagtccacattttcctatccagagggatttttctttgtatctgggtccggtgccgaagagcgccatctacaggtcagagcacaagcctggatcaggcatgggcccatcctgaaaggaaggatcacaaagcagggctccgccaatctgcagacctcctgctgagcacccatagctatcaaggtcattgttttaaattattgttttatatgtacgggttgcttgcctgcatctatgtctatgtgccacatgcctgacatctgtggagaccagaggagagtgtctggtgtcctgggataggcttaacagacagttgtgagatgtcagtcggtgcggggaatcaaacccaggtcctctagaagatcagcccatgctcttaaccacttatccccctcaacgccattattttatcctcagtgaccggtgtcatttcagagcagctttagacttgaattctagttctgtcttgcacaggttttgcaatgtaacttccgtttcctcaatggcaatgtgagattgcagcatccatttggctgtatagcttagctttcatcgaagggtcctaactatttgtcttgctcttccgtggagcatattggttaacttactccttagagaccagagcgaatccttcgagaacaccaatcagtacgctttcattggttttcacagtcatggctcactgctagttcatgtgggacctgggttttaagtagtatctcactttaagaaggaatgtgtaggctctgcctgggttttgcccgttaatctgctttgtgacctcaaacagattgtctaaccccttgtcctccagtttactcacttgagaaatggagcacaaacctcctgggactgtgtgcagattacagcctattccagggaagtacttagactagtactccgtgaacagtaatgtacttactgccgtgcttgcaaacatacactcatgtcatagaatggggattctgttttccctgccatgtagaattgccggaacatgggcaggtcattgatcctctctgagcctcatcctgtattgaaagcacaagacttatccattgtctgaggcctctgttttgttttgtttccattttcctgttaaattatttcagctagcatacaaaatgatgggttttattttcacacacttgggtgtactgtactttgctcatacgaatccctccactcccactcatcccccactttgactctctttgctgagacatcatttctaaaaacctcggctctctgcctgacctcaccatcaggacatttgcacccggagtgcatgaccacccaggtttccctgggctttctgttctctgacctgctggagaaagcagtgcagtccccacacagtgagtctcttcccacacacagaagggaaccactcaggaagcttgttgttagggcaaccctgttactttacagctgacacatattttttttaaaaggaaccatcttccccctctcacaggttttgtacagatgcagaaagagctggaaaggaaaagaaagccagtagtgcttacaaggtgttcgctcaccgcctctctgagatcctgtttgttctctgtggttagagaaaatgttaaggttcacagagctaagaagcatggggtgccactcttgttatttccagagaaagggggagggagagagagagagagagagagagagaggatgtttacttacacataacactctaattcttcttcctccctctcccttcctctcccctccctccctctcttccctccctcttcccctctccaccccccactcacacccacagccttaagcatgctttctagacatccacaacctcactgtgtcattggaaaacagttactatcgagtagccatgaacttttcatagaaaagtgggtgattcgattatcaaggcattgaaaaattgaaaatccaactgctggcactatgcgctgtttctttttgtggtttcacacttatcaaattaaagggaattcatccatgtcattgctaggcaaccttgacagtggtggacacaccactgtatggattgtctttcagagaagagaccaccaatcctgcgggaagactcagttctaaggccgtcagtcagcctgttagcgtggaaattgcaccttagcagcctcctggtttggaagccccagcctggctgcttctgttttgagaactgctcagtggctgcggtccagtgcaatgattgggacagtaaaaccccacgagttcacaatgtgtgtgcaaagtatcgcttggactcttgtgttcccatagctcttaagatctcacttcaagacctcatccaactgcaaacgttttgcccgctctctctgttcccagagctggtaggccacatggtagcagaggcacacacattcatatcctggaggagcttcttcggtctcctcaaagaaggcttctaggtatgccagggtagggtggtacccaaggggtaccttccccttctcaaaggaagaaaggggagagggcctgtgtgaggagggataggggctttgatcagaatgtaaagtgaatacacaaattaaggaggggaatggcttctatatggagaggaactagatgcctctagtgcctaagactgaagagactagcaggtgtttggaacaaattcactcattttttaaaaaataagtatcatctttccccagggcagtcagtcttggcacgtgctgttcttgcagaggacccaggttcaattcccagcacccatatgatggctcacaaccatctgtagctccagtaccgggggttttgacaccctcttctggcaggcacacatgtggtgtgtagacaaaatacccatatcattaaattaaacgttaaaaagaaaaaagaaagaaagttggtctgtgtgctttcctttccaaaggaaactttacctcagagcaaaaggctctcaaaatgtatcaagaaattgttaattaggatgcaagctaagctctgcctctctatgtagactgtttataaaactacatgtttccccacatcaggtaaaggagcctagccctaacactacgtggcactccaagactcagagactggatagcccagagacctaagatagaaccaaagatgcccagaaaaaaaaaaaagttactgaagtgattcctagtgctattctgcaatattcatagattggtgcctaccccattagccatcagagaggcttcatccagcaactgatagaaacagatgcagagacccacagccacatattagacggagctcagagaatcctgcagaagatggagagaaaggattgtaggagctagaagactcatggacactacaagaaaacccacagaatcagccaaccttggctcacaggggctcacagagagtgaatcaccaaccaggaagcttgcataggactgacctaggcccctctgcacataggactgacctaggccctctgcacacatgttacaattgtgtagcttgaccttcttgtgggactcctaacagtgggagaaggggctgtctttgattcctttcttggcttttgggacccttttccctcatgctggatgatcttatccagccttactccaaggggaggtgcctagttttactgctacatgatatgctatgcttggttgcccaagaggggcaggagaaatggaggagtggggagtggtggcaaaggggaggtgggagcagggactgagaggagaggagggagggaaaactgaggttgagatagaaaattaatgatgatgacgatgatgagccaagatggcttgtgaattacatttgccccttgcaaaattaaaacatgacaggagggaggaagagggaaggaaggaaggaaggaaggaaggaaggaaggaaggaaggaaggaagggaaggaaaactaaattaagattatatataaaagcaataaatccaggaagctcagactggttgaaacttcacagaaaaagtaaaggaaacaaaacacaagccttggaagagtgttggggcggggtggggtggggtgctctatgattattctacatttcctttcatataaaagcatacgataattgttacttaactgtatttgatctttctcaaaaatatctggggttctcaagtggacccacacgggattggaaagcaggcaggaagaggctgtcctagtttgacagagtaagaagaattggtaactctctgctttcaccgtttgccaagactgtttggatccgttcgtttccagcctgggttcctggataaacagtttggatggaaatcatttccctgctctctcacagggtccggagcagacacagacctccccacagttattcatgcctgtgtgacctcggccttggatcactgaacattcccttcccatggatgtctaggaagctttctttggctggtgccagcaagatggtgtcacttcagggacacagaccaaaatagcacactgaactaaagctatgcaggccagagcagccaccagtctaccctctgatttatggcctccagtgacctcacagtgacctatttagatctgccgatgctaaaagggggttgatagtacaaaatgggcaggccagatgtttattttaatatttttgaacagtcagaaaagtctgaatatgttaggaagactggaagatatatttgagcatttatttacagaacttgtcttgaaaactaaacttctgtttgtacccactacagacaagagaggacaaaggagtgaggaaggagggagggaaggagggagggaggagggaaaggaaaagagaaagtagtagttattagttaagtagttattatgactaagatgttgaaataaattgagtctaacctttccttcctcttagataaaagctatttactcaagtccatgtatctattgagtggtatgatttctagagctaactatgcctagtttgtttaattataaagcacaaaatgtttctttaaaaaaaaaacactgctgttctgagagtgtgtgacatcatgcgcccttcagcaaatgacttcaagaggaagcacttttgcagacatagtgctgcagaaagtactgtgcacacagagagtctgatgccagggctgttcctagactgtggactttttagcactcagccttaaaactcaggtaaggcagcagtaagctgctccctgtgtgaatgatgacaatactgacgtcagtggtaatgatgatgactttaaggaaggtggtgatggtgacatcatcacttggtgatgatgaggacagcggtgatgacaatggtagtcctggtggggatagtggtactgttggcactgatgatggtaatcatgatggtaatggagtcacgatgttggtgctggtgatagtggtggcaatgatgttagtggggtttatgatgatagtgaaaaggaaggtggtagtggttctagtgatgatggtggtgatgatatttaatggttgtagtcattctggtgatcatggtggtaatggtggtggtggtggtggtggtactgttgataatggtagtcatgataatgaagtgatagactgtatgttggtaataatgattactgtgagggtgatgatggttgttttcataatggtcatgatggtatggtaatgatgatgatcatggtggtggtggtaatgatgatagtggtgatagtcataatgatagtggtagtcaggatgatgacagcggctagccatgattgtagtggtagtgagtggtggtggtggtagtgtggtggtgggtaatggtagtagtaatgattatgggtggtagtattagaaataataatgatagtgatgatggtagtggttacgatgatgtttgtctatcaaaaaattttgtctaggttaaaagaaagaatatgtaggataactcaaatccttaagggcttcctacctagaagttgctcattatctctctgatagtctcagctgttccagcatactaggtctgttcagttcccctcctccactcttggcctttgtcacaaatcactaaggtctggcttagtgagggccatagtctgatgagagcagagccattgagactgctgccctcagaagcttcctgggactacagggttccctcaggctcaaaagctgaagcctggctactatccgggtttcaccatgtggctgaagtagggctcagaataacccagtgctcagcacagaaaaagtttatgattgcttctctatttttctctttcattcattcatctggcctccctttgaaaatgctttccttgtccaaagcaatgtatacagtgttgacagcactgtaaacagattattaatatcctacatattaattaatgttaacaattaatataacagtgattactccttatccagatagttcctcaaatagccacacagaaaacttttaagatttcaaagcttaggccttagctgggtagactctcaactagctaatctaaggtaacccaactacctagctccatccagtcttcgctagctatacattccaggcccataagcacatcatctcttcttatgtctcctctcgaaaggccatcttctttcttcttcccagagttctttctccctcccaggaagtcccaccttccatttcctacccatcagatttttattaaagctaatcagagaataccttaggtatatgaagaaagacagagacacaacttcacacagtgtaccccaacattccactactgtggagaggccctaatttccttcagaaatgccaacagcgaggaatcccatcttcaacagtattcttaacagtgtttggacctatttccttggtaaatatttccttggttgacatcacaatgactgcctttcctgtcaccactcaactaagtgcttttataaaagtaacttgagaaaggctaaactttacatatttattcaaaacacctcttatacaaagctggtgcacatttaaaacgtgtgtgtgtgtgtgtgtgtgtgtgtgtgtgtgtgtgtgtgtatgtgtgtatacatatttttcctctaggtgggaactaaccagcagaggtctacaaagcatcacccaggagtctgaccagaacagcaggctatgagattgatcttcttcgtgtagaaagacagtgtgaattgaactgtatgggacaggaaagggcccatgaggggtggggaagaaggctctagtgctcaccatgcaagcaccacaacctgagttttgatccctagaacacatatacaaagcccaggcacaatgcttcatgcttagaatcccaatagggaggcatagacagaggcatccctagggtttattgcccacccagccttgacaaattggtaatggcaaggttgagtgatagattatctaaaaattaaggtagaggaaaacgttcaatactgacatctgttctctgcacatacacacacatacacatacacacacacacacacacaagtacttgtacgtgcatttatacacgcactcaaaaaaataaaaacaaaaaaacaatgagtcatcagaactactcacagtgattcagtggatttctgcagtgctcttggtctagccaggggttgataagccatagccttcaggccagaggtagcctattgcctgcttctgcttctgtaagatgagaatggctttcacagattaacatctatagctgatgtgatgacaagagtcacccatcttgaactcaaataagcaaaacattatcccaaagaattcttttcttgtcttaggagaacgctattactagaaaatgttactaccatattttcaatttgtcagtaagaactatgtgaactgctgttttctttatcagtgtgtggtttctggatcattttctcatttttaacctctccaacccacaacgcctaaaatatttactaacttcttctgtagagaaaaagcctgctggtctctggtttatgtaggccattaatttcaaagtcattttatacttatcttttatgtatgtgcatttgtctggaagacgatatgtacacagtgcgtgcaggtgccctcggaggtcagggggtgctggatttcctggaactggagttaaaggtggttgtgagcgcccaaaatggatgatgagaactactctggtcttctgcaagagcagcaagtcctctaaacagctgagctgaccccccagccccagccccagcccatttcaagtcattctgcctctctttgggccactgcgtttcttaaggacttttttttttttttcctgtagcactggtattacatctgtgccttctctctaggaggtccccatgtgaggaggatttatccactgggcttaattatattttctcttagagggaacatgtgtcatcatatggtgttgctttttagtaccacttggaaaggcgattttaaaaagttagtacttcgatacagactgttctggataggcgaggaaagagaagtcaatattgtgaaagagaaggaacacaggaggaccagtgctctcttctcccacaacagcgataaagtagctggaaggagatatcacatatgaggggctcggggtttttcctgattgcgccccttagatttctctctccccttgactccggattcatcggtccctgggacctcctcgtggtgaagggctgatgtgcaggaatagctccaagctctcttcctctgtgccttcccacactgagatgccccagcttatcaatgagcagtgtgctggatctcaaacaacatcttccaaagaaataagactgaacccacagtatctttctgttaaaggattacacggaggtggccctgtctttatcatcgccacagagtaccagttctcttccactacccccattctgtgaggcagagccgtgcatgtctgctcacgtgcatgttaatttgagaatgaagaagcctttgcaaaatagacatgacaagagaaagctaacgtaagcacacacacgcatatagagagaattacaggctccctgttgctaagtgctggaagaatcaggaatgtctagttctattaagcatctttgggcagttctcacaggctacaggggaagaaaacgctgctactaaaaagacaggaaactctcttgtgcactgttggtgggaatccaagtgatccaagtggcaccacagctgtgggcaacagagtaacagctcttcaaagcattaggaatggagtgaccatatgatctgggtactccacttctgcgtatacaggaattgaaagtggggtcttgagatgtttgtgcatttgcactcatgaataaccacgttattcacgatgctcaaaggatactaaggagctcaagcacccactgagggaaaatggagatataaggcgtagtgtgcgcagacaatggaatattagctgctcttcaaaaagaatggatgcccagtgtgcataactcttaaggacattatattatggaaagtaaatcaacctcaataaatgtaaatgtcgcatgattccacttatatgatgaatttacagtcatcaagtctattgaaaacaataagtcgatagttcctagggctggaataaaaagtgaattattaaaagatataagatatatattaaaagatgtaaaaagataaaaagtgaataatattgcttaaaaggcttacagttttggttttacaaaagcaaatgagctctggagattggatgcaggacactggaaacaaacatatgcattgaaaattgataattatgtgtgtacatgcctcaagaggctagaagagggtgtcaggtcccctaaagttggagttacaagcagttgtaagctgcctagcatatctactggagccccaactctggtcttctgaaagaccatcaagtgttcttcacttctggactgagatgctaaatgttatgcaagttttaccacaactatttatgtgtacatatatagacatatatgtatatacatatcagtatttgaaaagttagttcaaatttttgtgcagcctttctcttgaaccctatagctctaagagacccaaattctcacaaaagacaaatttgattctagggagttagccctaatcaaggtggactctatccaacacaattttagaacaatatcattcttcctggtgttactggagttttaggatcaaagtgtcttgggtctggcagcctacaccaccaaggtagtcatggctatcaatcctcaatacttacaaagacaagcaagagcaaaaagcagagaaacaatattgattcaatatagtcacattgggagcaggaacaaagaggtccaacggccctcaagtctgtcttcaggggcacagacatggggtttctgattaaacaggagtataagctgttaatcagtcctggtcaatgactgatccagcctatcactgacccatcttgtctctaatgctgtctgttgtgcaaagtagtttagtaaattgtcgaaaccgtgtagaatgtcttcctgggaggcaagtgcatcctgtagctgaggtcaagccttcagcccttcccttccctcagcatgggattcctgagaccaatcttttcaaccacccaatggctgaagggtgggacacaagtgtttctctttagaataactttgctcttgccagaactttggcatgtgcaagctttagagaatgggaattctttctatgaattcctaactaattgggaccaggtctgaggatcactgcataaatgttttgtgattagccctcatggaggctcctgagagaaatgccacccacggcagatgcggtctcccgaagaacttatggactattttccaccaatgaaagactgtcattggaagcctgccacatgctaggctcagttctattctggctcccaggatccagcagtgactacaaagtccctaaagtcccaggtctggtgaagtcacacagcattagagaggggggacacagacaggaaaagatgcagaaatgcccagagttgggggagagatgtgttgttgacaaatgaggtgcaggatgggaaggatcagacatggccgcccaggagggattggctgacaaatgcctgaagcctaaaggaagtcaaagtctggccctgtggatgtctaaagggagagtgttccaggaatagcaaagaggccgctgtgtctgtagcacagcaggaatggcagagagtggtagatgagatccaagaacttggggcgcctcaccacttctaaagtcccatagagtgtgtgcagactcgggttttgactgtgtatgagacagggctcattggtcagtgctccgttgaatgatgctatattacctaccttctagcattctggctgttcccttgacagtaaagtaaagggttcagcatgtacctcagttggtggagtgcctgcttagcatgctggaagccctgagtttggtaaatgtcgcatgataatacatgtctgtaattctagcaatcaggtgatagaaaccagagaatagaagttcaaggtcatccttggctacataatgagttctgggtcagcctgggacctggaacacacagggtctgaccccaaaaaagtagaatacaaaggcaagcaaccaatgggagcaccattagaggaatccagatgacagctggtagaaactcgatgagaccctactgtgcttgagccagggatatgtggcgtgggatgagtaggcaagaatgagaccaagttgggcttgaatatcttgaaaggtatcattgttctttgtttcttgagatgatggtggctgttgagagagctggtgggggctaggggagccagcgtgggctgaggagaccagaatcagatatggacagtcaagcttatagaaattgggatggctttgggaagtcctctatatactcaaaatagtggagactcaagaaatgtctgttgaaatgttgactgtaaagcagcataaatatgcataaagattatccatagatgtagccctagtttgtgggaattcaagctatagaaatctctatagactgttccagaagaccaggagttcagcaatgcaatgttaactgttggaaactctccagggagggtcagggaaagtcgagggagaaagggctagaataccttgtgcaggtataggagttttcacctgcagacgtgagagtgtcgtatcactggaagctgtgtgtcatacccttgctaattatagaagtgtgtatgcaaactgcctctgaccactctcagtctttgatgctctacatacccagttctagtgcttgctcttcggccttttgggtccaaggctgtacctcacaggctctctgctggaggagacctacaggggttattgatttattctacctcaaagaaggaagcaggggtgtctcccagttcttgaactccccacatgctgttttcaatttctctttattgtaatctttctgtaagacggtcctttgcagcagggctttgtattggagcatgttacttcttcagtgctagggctcaaactgaggaccttaaggagaactctaggcaggtactttactgctgagctatagcccccttcctctttgtagcctagaaaaaaaattaaaagaacctattaccataccaggaactctcccaaattctgaaatagacagtccagtatttttccatcaccaagcacttgagttgaataatgtatctactgcgggacaaaaggccagtgcgttctggttctggttccagaagaggcccatatgtctgagaatcagatctgaacgtccaggacaccaggtcttcagctgtgggagttgaattcctctgtaaattcggcctccaaggctgagaggttgactatttagaacctgccaagggctgatccttaattctggtttagcatcatctgtgtgtgcagggagcaaactggagcaggtgttcacatttatctttctcaagtagcctcttgaggctctttggaacagagtctacaaaaggagaggctgaaatggagccttccagccatcccagctttggccctgccaggagacagctgtttctcagcctctccctactgcctaatgaaaatagctgggttcagtaggagatgcttgctacattgctggcagaagccactttctttggagatttgcttaaaccaatgtccttggctttattactgttgctgtgaaattttcagctttaacagctcaagcatgaatgacctattttgaacgtgacaggcattgcacttcagctgtgtgaataatttatgagctgagagcgctgtcatcactctgatagtacagctctctcctttgcctggctaattatggagggcaatgatgttccgtcctgttgtcacagctcctatgcgaagccaccagggacttgtgtgtgagcaacgccgggaagggaagaggggaactgggccagggccttcttgctcccactgctaaacaaagaagtctccaaaggggatagatttccacctgaacctctgcaaagtgaagctgggaggagcccttgggacggatctgatatccagcatcctgattttgcatcatgagtgttagctgggagaggtgtgagctgtgaaagggacttaggaaggaaagagatgctagaccttggagtgagttaggattcctaatggttccaatcctccaggacaagagcagacatctgggttcagaggttcactttcctatgagaatggaggcacagacgagggatgggggacctgaggggagatgggggagcctcagtgggcacctctctatgggtacccctgtgtcttaagccattttgaggtacttctagctctcttgagctgttctggagtagtgacaactcacttaactaccatgcggccaaatggaaatcacacttctaagtaagatccatgaagacaggaagattagccactagaggtaagggactcatcattaggctcctgtccctatcattcctccaaactccacctctggcgttaaagagctcaaattcaggaattagaaaggaccgggcctttggggagacgtctgccaagctggataagggattaaacaagattacaaggaacaacagctctgacttgaagtggaaaagaagaggaacgtccatttatagtgaagggccacctgagtgagaaatagttaaaatatgaaagattagagaagagatcttaaagagttctctttttaaagtaacaagtgtatttttttaaattgatctcagatgcagagactcggagaaggtcactcagcaatcactttggtccctaatctcttggagccagccttcccctggagaggcctgagggacaggattaactggttgttcttccttccagtcaaatcagccacagaatgggggtggggaggggagctttgtatcagctgaaatacatggctgacaggcaaatcccatctcttatcggtccggttttctctttagctcttcttcttatctatgtagatttcacacagtcctccgaaatctctttcagctcataccaggccttgtgctcaacccagctctgagctccatcaacctaagctgttctgtgccagtggctaggggtctctgttacccacactcacctgtctgcaatggccgtggacaaatggtgtctcaccagccactagcataagcttggggttcctcaggctttccaagcactgagtaggctggccccagaataggcctgtctcggcatccacagcagtgggattgcaagtgtgccccaccaccctatgcttcttcatgagggttcctcagatcgagcttcgttccttgtgcttttggaacaagtacgtccagccagcccgggaggtgattcttagtgagtatccaccaggaaagccaacatttgcactaatcagaagtttcatttaataaagacatgaattccagaggtagggagggtacaggtatttaggaaccagcaacagcattatggaggacgtagatagaggccattctccaccggggtgggaggaggttactctttatatagggacacagccagcccaagatgaccttatgaggaagagtctgggattcataccttgaaggaggccattcacgatgagccccagggcagagagaggagcgagaggaaggagactaaacaggaagtggccagactgaaagcctgggactaacagcatccttctaggagcactaaaggcatcaccttggaggggttgatggtttcctttttactgtgcttcctacggctccatataaggaaggggctttttaagaagtaaaagtttatttccaaccttagaaacaaaagtgcctgcctgcctagttcttagcactctgattgcagataccaatagtttccaaccactctacctgcattttgcaatcttttatacccatttgtgtgtgtgtgtgtgtgtcctaacacttttcaattaaaagtatagtcttcactttgtacctcttgggattcagaactgaaaagaactgtcgatttgacatactgccgaaatctttgtcaatctccattgctggttccaaaaatgagatctgacgacccttgaggttgaccaaagctctttcaagttctgcaacttgaaagcctcaatgtgtgtgtgtgtgcgtgctgcgtgcatgtatgtgtgcatgtgtgcatgtgtgcatgcgtgttctctccagaccatgtacatgtgaaggccagaggttaataacaactttctttctctcttcctctccttatttttaagacacaggctctcactgaacctgtagctcagtgcttcagatagactagctggccagtgagtcccctgtctctgcctcctaagcactggggttacaggggtgtgctgccacatctagattttacacgtgctggaatccaaattcactccctcatgtttgcatagcaagcatttactcactgagccacctccatacttactgtctatttgtttatttttgagatatctctggctagctgggaactccagagtgactttaaatttatggaaatccacctgccttgggctcctatgtactgtgtgcacccctcatgcttggcttcagtattatgaaaaagcataaaatggtcgaatgatcttgggaccattatgctgtattttttaaatgttaaagcattctcttagaaagtagaggatagaatattggtcaagattatactatataatacaagacatatatatatttgtatatgtatatatatatatgtgtgtgtgtgtgtgtgtgtgtatcagaaaaagacctcaaggtgttatataataatcatgtataagaaatatgatgtaaagtttctgaagaggacatttttgtacttgaagcacattttctttcccatcagctctgagtatccagctgtttgtgcctctgaagccttctagtcactcagtacagaagctagacctgtagatggggcttaggcttagggtcatttgcctgaactcattggttctgtaccttttctgtacctttgagcaactagtttctgggacatactaaaatgacaacagcgttgaccaaaaatgttcccattgcaaaagcaaatatgtgtgacaatgggaaggaaatgcctgagtgtttgcttctgtgaggatcttaacagaggcaccagatatgcataggaggtctggctccctgcagttccattagtgatgacacttccatgggagctgctccagtgcccggtaaatgctggcttggggggaagggagctcttcaggggaaggtggcagaagccagcagggaagtgcatgttcaccttcctcactgagccaattgactccccttcctctagacacgttaatactaatacagagcttattacactgttcatggcacaaagcatagctcccgacacacagcttattgatagtgagaagtgtgctaaccagctctcccagaaggcagggatgtgcatggatctgtgttcaggggacaaagctcctatttaaaaaaaaaaaaaaaaaaaccagtgtcatgttttcatcatggctggaacagggctttcgaaaccaggggtgattttagagataaacctcaatagtaggaggaagtgtgatagacagagaatcagttaagaatttctaggcaatggattggcctgagcaaaacaacagaaaaaaacaaaacaaaacaaacaaaaaacaaacaaaccaggaagtgtggtgacctggctatccagacccttcatatgacagatgagacacagaggccgagattggccaagttcctcctcagcagcattaagacagaactaaagtctctcaacttcaaatccttctagggactgcccactgcctgtgagggtgatagcaaggtggggacccatctgggaaggtttctgaagccacacccctgatgcctcaggaggttgggtgataaaggagctcaagagtctccaaaccaaagacaggcatggtgtgcacctctaatcccagcactcagaagacagagacaggaggatctctgagttcgaggccagcctaacctataaattgagtgccaggacagtcatggaaaccctgtctcaataaaacaaaccaaaacaaaacagtgtcagacccagagctgggattgtggcttgcctagctagtattcttgcctagcattcacgaagccctgcattcaaaccccactgcataaaatgtgcatgatagcccaggcccgtggctctagcactcaggaagattgaagcaggaggatctgaagttcaaggtcaggtttgggaatattggaaattcaaggccaacttcgactacttgagtgagagcctatctcaactaaagtaaaaatctcaaaaccagcagcatttcaagctaccccatagccaagcactgggatggctgaaagtctctaagggagggtcatgtgattagagacaggtcttcaacatgaggtcctgaactctgctcctctcatggacgtgaggcatcccagttagaaaggaagcccagatctcaggctagatctgatcacctctccaggaactgtcaacgaaggccaggagtagaagccagaagtcaccagtgtcctaggcacaggatacacagaaaaattaaacacagaaggatctgatagatcccagggagaacatcagcttcacttggcaatgccgggcattcctcgggcacatgctgagctctgagttacagagatggagttctaaattgggaaatcaaatcaagctttccttgattcttctgatgaacggtgtatttatcaatctccaccaggctcactgggctgattctgttagccaaacatcggctcaaaaattctccggaaggagaatgacacagccttactgtttcggaaagggaaacttgtcggtactgctgaagttaaaacacagtttcatgctaccaaaaataaagccgttcccatagcacccagagcacttcctctttcctatggcacacctcacttgctcatctccaggaccaccccaccaagcaggtcgggttgctgcagtagccttccctagcccactacctgatactgtcctcacccaatggtccactgatagtagctgccatttttatttgtgagtattcttgatgaggaatgacgtgagggggtgggctgaactatgctctaaggaaccattcttttcttttttaagtcaacaaatttttacttaagggattttgtatgtcgctctctcgctgcctattgaggtcacgtggctccttcaaagcagaattcaacattttaagacagccctgttctaaaagcactgatgctcaatccaggcatgcagtcagcccacatttccctcatttgagcttcttctgtttccacatgagtggagaacatattcatgaatttagagtcctccatctgagatgagagagacacccatgacagtgtgacagtgctaagtggtgacggtattcgtgacaaggctcctactttgaaggtgaagcctggagctgaaggcacgagtcttattataaatggatggagtttgtttggtttgctttgttttaccaacatagcactggcacaacctacatacagacctgtgtgcaatatcataggaatgagtgtggtctagattccttcgtgttaagagaagtggagtctcagaaattgagggggcagatcatgtatcctaaagtggaccataaagcaaattgttccaggaaccattcctttctgccggcatgaggaaatgtaactgtctcctagtgaggaggttcccagagtacccctgcttccatgaacagaacagatctgtgcttcattatttccctgggtaaagtcacaagaatgcccttggcggataggaatgctctgaattctgcttagggagcggtaaatacaccacaagagaaagtagaaataaggagaaatccaccccttcaagaatggggactctggagatctcagcagagacagtaggtggagatgcctgctgtagagctttggactgaggtgcctggcttcttctgtgtactcttaatttggttgccctgacggacaaatcacttaacttctctggcatgtgaaccacagggccctatcaggaacgaattctgtctcgttagacctatgatgctccgtccatccgtaactcatgctcatacctgctgtctgaggaggatttgtgctaggacccatagcggctacagtcatccaggacagatcccagtccaaagaggaaactgacctgggttcaggatctacccttccatcatatacacactgcctggggaaccagctcaaagtggcactttgctcaacccacttcctatttatttgcaatttcagttctgccccaggttgaggagttgagcccaggaaatgtaacactgtttggagcaatcacacttcagtacctgcaatattactcaaggtagaggttctaggcatcttgagatctggctgttaggaagttcagaagtgagaggacaggaaagggacaaggggccggagggaatggagatagctgggggctttttaactgagtgtgaataaatggctgctgctatctggatgtgggcaaaggctctcccgacggagataagccaggctgacaagggaaaggaaatgcttgtagactcaggaactgcttcagaatgcagttatccatcttccatctgataggcctgggacacagtgggtaaggcagaaatggtccctgccccgtgagctcacagattagtgacaggcaaagaatggtcagcattggaagacaagtggggatggaaatgatcactggggacatggatgtactaaagatgccagtggtctgcgatgacccaggaaaaggctgcgaaggtttgaggaaccagagagaggccctggagatagtggagatctataaagggttggctcaccaggatcttgttagcagtggtgctgaggttatgtttcttgttgctatgatcaaatacctggctccattcgagaggatactgaccatcatggccaggaagtgctggtggcaagtaccttctctccttgtattcggaccagagccccagcccaggaatggaaggtgctatccacatctaaggccggcctttccacttcaattaacttatctagggaaccctttacagactggtccaagggtctactgcttaggtgagtttagattcgaccaacctgatgatgaagattaaccatcaccagcagtgtggactttgggttttattctgtattccatatagggaactgaagcaggatttaaagccacagaagagtcacattgtggtttacagggttgttttttttttttttaaggccactgtttctgcaatgtagatagactattgtctatcactgcctaagaaatcaacatacagtcatttaaaagaacacacagcattaactcacaatttccactcgtcaggaatccaagcccggctttgctgtgtcctccaaaggatgggtgtgccatgaagaatgtctccccacaagccatgtctcttttttgcatgagcatctaaagtcgatgaggctgggtcatcttggacaagttaggctaactctctgtaaccttagtttgcctgcctataaagtgggaatcaaaatactgaaaggttacagccaggtgtaaacagtctaatgtcaggggataagaagatcgccataaacttacgtttagttctgtacggattgatgcattagggacttgcttgttgagcagaacacccatgaggaaacacacagagagcttgcttgccctctgtgtgctaagctgtcacatgtgtagtcgtagtcgacgctttcctcctaggaaggaatgtccacatgggaaggtggcttcctgatggggagtgtgttgagttgagagaagggcattggagaatgcagctggcaagggtagcctgtctgagctcctctcaagccatggcctcgtggtccaggtgagaggcctgtacagtgctcctccttgggtgatccctgaagtctggctgtatccttaggtggggtgtgattcagctgcttgcgttttccaggtctaaggatgtccaggtttcctgatgctgccatagactcctctcctagcctttgttggtcaaggtttatacttcttgattctaatgtcctcataaagtgactaggtctcagcttggaatgtgatggatgaatttgtgggacactttgattttacatattgtaaatacacaattgtatgagtaagacagtttccctgaggaggaaactgaggcctggaagactgccaacctaaggatggacgcagagtccactcttgggctccaggtccttagaatacccaacctcatactcttcactcacacacatataatagcctagttaccaatgctgacctgggatttactatatataacccaggctggcatcgaacttacagcagccttcctgccttagcctcttgaatgccaccacactcagcttctaaaggtcctttttctatggaatgtttctgtctgtcagacccacctacattttatagccttatgtataattcaaattcacaccaaaagagaggtttcaaagtcaaacaaaagtcttgcttctccctatcatagtgaaacctctgtcgaaacaagccctgggtacttgtacccagaggccctctccaaccgggcttttcaacataactcctgccttgagccttgaacttcactcttcaccactgcacacaaccctcccccatctcatcatttgcaatgcacggccctttttgagatccccaaaggctggctgcacaggcactcttgtctcagctgagatctcctctaatgctccgtgtccggctggtctcaactcccctgcggcggagtccttctaagctgcgccacaagctagtgtcccagagcctgacgtgcaggcagacgatcagctggaggcaagcacccaagcgcaccctgaaggagtcgggctgaagggaccatcaagcagctgtctccacccgccctcctccctcgccccccccccaccggtgacgcgccagcccccgcgtgcgcgcctccccaccgccctctccgctaccgcgctcgctccgctctctgccacccgcgcgtcctctggccccgcaacttcacccggcgcggcggcagctggtgcgacgcccgagcgctggggccacgactgttaccctcggacctttccctgttggctgggaggaacgagcaccggtgtccgcggagccggaggtgcacggcagcgaggggcggtgcgtgggtgccgaggtggtacatgccacccggtactaagcgtctccgggcactaggagcgttctcggcaggtaggtgcacgcgcctcttaaacacattctctgcggctgattttggtttccaccggcatgaggtgggtgtatggaggagtgtcctgggcttgaatgagcctggcatattaagaagaacccttgggtgtccgggcttcctaggtcctggcgaatccggggagcctgatgtgggctgggacgagaagggaagttattaaggaagaggggccgtgcacttagcgcaggccgacccaaaggatgtcccgcactgtggaaggaccgattgagaaggctagagaagcctgtggcactacctaaggtaggggcttgtcagggacaggggatcccgcgggtgggatcgtggatgaaccctggcttccgaaagacttccgggcacccagcagcgatgggtgatccagctcagagggaggatcgcaatttccaagggcttcatgtgcctccagactgagcaattgagcttggctgggacccagctgttccaaattggccacgtgaaaccggtgagaatggggaagagggcaagccaaaagaaatgtgttgtttttgatgccaacctgtgtttggaaagactggggtacggggtcacacttggggaacactctaaccctagcaggtgtctgtgatattgaacgtgcgcggggggtggggggggggttctgtagttctccctcaggctatttattacctcatagctccctcccacagtttcctggatagggatgcagacccctcgctgtagaagagggcgggcgttggaattcgctaagcagagccattcaggtgcgagaatgacaggactgtggacagtcacagctcctgagtgagaaaacaagacgaaatcctagagaagctagcaatgttttttggggagtgggggtggggcagagtgggatccacagcccataggctctggtctgggggacacctatatgttgcatgagtgactgtgaagaaatgtcaacacttcagctgggggaacaatgtgattgtctttaaagcacacacacacacacacacacacacacaagctgcctttcctctcagctccccttgcaaatatgagcacccgcccattgtttcctgacacagtcatttcttccttcttctgtttcgttgtttttgatgttagttggttggatggttttgttttgttttgggagagttttctgggtcaggtttgcctcgctcctccttcccaccctcacccagtattcctactagcctacttctcttagagcaggctctgagagtcccattcataaggtttagctccactagagccttctatctgctgttacagcaagagaggtcagggcacaactcctgcaaagaaccagcaccctcaatccaatctccagcagttacctgtaaagtaggcaccctcgctttgcggcaataaatcttagggcagggaggggggtgtctactcagtccaacctccaacaacatcagagctcctgctgacgtcccaagagtggagatccagccacaaggtggcctttgccctagaagttaatgcgtttgcctgtctaaaagctgactgcacccaaccatctgaaaaagaacattggagaatatgtttagtcaaaacatagcacatgtgttgcttttccaaaagccccctgatgggtgttgttgctctcttcctctgacactctgatgtgagatgttttcactaggaatattttgtcctcaatataaatatagagactgccaaacccgagagagggaaggctgttagcccggccagaggccttgcccggaagcctgattaccaaaacacaggttctctgactcctttccttttgttgattagcagagaagcagagaagggacttgtctgctttcaggagtgaatgccccaaggaggaggtttttatgcctattgtttggatctggggaactacacctatataagtgtccaggctttggaatggggtcatgataggcgtgctgactaaatcttctgtcactaacaagaaactatccccaccaggatagaccctaggactcagctacattattaaccatgtgcctccttctaaatgaacccaaccacttctgttattctttgtccctccctcccttcctgcccctcctccattctgtgtgaatgtgtgtgtgagtgtgagtgtgtgtgggtgtgtgtgttcaggtgtcttcttctgtcagtcttcaccttattatttaagacagtctcactgaacctgaagctcatcaattcagcaagattaagtggctgagagctctagggacttcccactcgctgctttcttggccctaagattgcaggtatgcactgccatgtccagctttttacgtgggtactgggcatcaaattgaggtccccatgcttgtgtgacaagtactttactaaatgagccatcttcccagtccctcttgttacattttgagctcattttattacaccccacttctgttaagaggacccaaacagagaagggtagctatagagagtagacaatatacccttcagatttcatagttaatgatcagagctttcttacaatggtcctttggggttaaagagtttacaaacaagtgctctattctaacatcagtgcattcaagggctggaaaaaaattaaaatgcagttttatttttattctgaaaagaagcaacaagtctgaaaccagcctcttgctttccttgagaggaagtaggagtggaagtgaaagtcatttaatctgcacaatggatgatccccaggcaatggcagacttggctttccatctgggcttcccttgcctggttctgagcaggggcttcatgcttgcaaacagatcttttaccagggttagtctcatctaccaagaaaagctcctggatggtgaggggtgggggtgtactgcttgtgtttgaggccattcaaccagaaaagaataccaactgaaatcagacaatgggtcaagggagttgggtgggggtgtgggaggagctacagataggcaagtgtttggttccacaaaggcagacctcagtgtggaatggtgtcttccatcagtcctcatgtaaacagcccacaatgggactgttgggaagatgtgttcagaaaggggaagggattatgaaactgcacctctatatcccagcagagccccgctgtgagcttcattcctctaagctgtcatattgtattcagtttctccaggcagcatccttcctgtgaaaacctcaatgtaacaggcataggagccttctcaggcactccacggaacagtccattccatatcttgcatgagctaattcagaaatacccacgttttttggtcctccttgtgcgcctcccctctgaagccacaggcttcctctctgggctaacggtccaggtctttgtttggttgatttggtcaagtaagcttatcccttacttacttagattggaatcatcccctggaaataataggtgtttttctgagtgtggcggctatctagtcaggatttgttagtcatgggtcctcgaggggtttcctccttctaaggaaacccagactgcctcgaagagaggaagctggtccagcttattttattgttctttgtttataagatactgatgggggaggtcactgaatgtttttatgttcattacactaatgaaaaaagaaattggaatttttttcacagtgaaagaaaatgagatgcagtatttttatgttgtcttccgtaagaccaacttgagcttctagccagagcaagaagcaagccttaaacaaagggaatggtttatcacattcttttaaaatggcatacagattttacactattctaaaatacatataaaaaattgattaccaatcacttttaattctgacgtggatttttaatgtccattgataggtaatgtggggtaatactactttttcttttcctcctgcttatgcatgtgttccctgagcaagttcttgggatctttgccagagtgagatttctccttcatagtaaaaacataaaatatgaattctaacttccaggaagttcaatccagaagagaagaaggaagaggcaactggatgactacatagcctggttagtcctgtgtgttagtcagttctttgtcataatagcaaaatacctgatgcagggtgcttaggaagtaaagagacacttatgtatctagctcaccgtttggatggtattatagcggcctggtgagagccacctcttgactgcatcacctcctagcaggtaactattaaatgagcaagtatgaagcaaacaatgacatcttaaaccagggacagggagagactagaatcccacacccccttccatactctctgtatgctcccaattaacctggggatcaattctaccactttccaatacttccattgtacaactcttagaagacatgggagccacactcaaagcacagccctgcatttacacatgccgctgtaagatcattgtcgataccaaacacaccccttcactcagaagcatttggggtttggacagtacgaggatgatcaccccaggcaaagagctaaggtaggtcagagagcgctacaccttttaggagaggtgagtggaagggaaaagagaaactaccagatgaaaagatcagcaggctccctggctccctagggctcagaggggctgtttggcttcttcctggggcccctgtggtttgtgccaagccaagagaagacattgactcctgatcgacaacttgtgaaccagaatttaagagcaggaacctaaaagaagatagtgaagatcagggcatagagaggacaagcctggcccggaaggtcacccgtgaaggtcacctaggaacagtagtgaaataagctgttgctaatgatagtcacgtcagagaaagattggccatggccacactacaaagcaccttacatatacacagtgtctcttaacagtttcttgtgtttgtgcttccttttgggcttaatgttactggctttcccttgaagccctggaagagctctcttccttcacaagctgattgttctgaaaggaacctaagaaacaatgcgtacattctcttcagcttgtctgtgcagtgcttcattcacccttcagggagggcaagggcagaaggagacagcgcaatggggatcgatacacagtccaggacagattcctggatctagaccaactcccaagagattattcctcacatggcatttaatttcgttgctctttgcaacacatcaagttcaagaataaccttgaccttaactgtttcccttccaacactgggggccctgctgacagacaggctcaaggctgatccttgaagggcagaaccgcaccaatactattagttcagaaggtagcattggccatgtggatatgacccatgtccttcactggctgaaatctaacttaaacttgtcttagtgaggcttcattcttgggaacaactggggcttggaaaagaaaaagagaggtggatctcaggtgacagacagcacccagggggtccaggattccccaggcttcagttgtagagtggagaatccggacagcagaaaggacagggagtcaagagggcttgcaaaattatgtgctacactgaagagggctaagcaagcacacacagtgtaaacctcatttgtaactgaactctaaatgtccctactgtctgatttagtatccagaagctgcctgatgatctgagaagctattggcatggccaggaaacaaaacaactaccaggaagctactgcaggaaaaaccagatacttagtatggtggctcgtcctctcaagaagtccatgccaaatctctgagagctaaaattccgattccctttatgacaaaggagactttgcccatttgattatgccaagaatttagcagtatcctagattacccaccacctgggccgagtctagtacatttcatccttagaagcaaaggaaacaaatggctctctgaaaggaccggcagagccaaagaaagttatcacctttgaaactgagggacagagactcaggagaaggactgttggaatctagaagagattaggaaacaggttttcctatataggctccagaaggaaacataggcttgcgtgtttccagatttgtatctagtaagacctatttcagatctcagtctgctagagctataagctcataagtgtatgttggtgtttgataccactagctttatggtcattcattacaacggccatagaaaagcaacactttcaccctcccactcacagctgcctttagagctcaggagagtctgggggaggctcctcctccttgggggtgggacagatctagctgtagagggttctggcaaatggtatttcaatacagggaagcaccctaaaggctgggggcagtagccaatgtgacattgaatgccaagagagcataacccctgcagctgccacaggaagtcgtgaggctttcaaggaccacaggtggatgtgtccaacaccatcacggtccttctgtgaggggtggtagcatttggcagaacagaaatggatgcctgagattttaggtagtttaacaaatgttgctatgtcatgaagctataacagggagaggggaggaaggaggcttcgaatagctgcccactttagcttggtagtagttattgtccagagagtgagcacattgcacaaaaagcatcattgttagagccaagttctgacttactgcagctcgaccctgagccacacagcgaaatgttgccctcagcattatcccctttcccatgtgatcttcctacaagggagactctgatccccctctgatggagagatgaaggtctgtgtctgttccttcaaaattgcaacattcctgatcaatagagaatacctttgggtgtcagttgttgttactgttgttatcatcgtggtcatcatcatcattgttgctgtatgaagcttcactgagcatcccagggtagcctagaacttgttcagggctttgaactcacaattaacctgccacacaccagctggaataacagggatatactgttaggcctagtttaagcatatatcttcaggttggagagatatctcagtggttaggagcactatctgctcttccagaggtcataagttcaattcccagcaaccacatggtggctcacaaagatctgtaattggatctgatgcccttttctggtgtgtcagtggcagaatgctcatataacattaaataaataaataaataaataaataaataaatttatttttaaaaggatatatcttctatgcccagatcacaaaatgcaattttatttgtttgcttcttgacagagtgtcttacttactatataacccaggctggtcttgagcttacaatgtagcctagtggcctaaaatttgtggcagacctcttattccagtctcctgagtgctggcattacaaatggcaccacacttctccctgagaggttatttagctttcactcttgtcggctggagcaaagctcttgaagctgggatccagcattgcaagtgtctcagctgagaccactatgatgtgaggaaacccaagctagctgaccacaaagacagatccgagactttgagaaaagagaatgggtcactgtcagctgttggcaacactggttcctgacatttcatcacctactgccctctgactggtaggagacatggatccaaagctgtctgaagtttgtgactcattgcaggccactgtatgtatggaatgatgaatcacctaacaataagtaacccacttggttctaacaaatgtagaacgaagtcagtgaagagcatagttttgttgttctcaggtgtctttactgaggtagataacaagtcagtggtccattgtagaaaccagcccagatctgactcccatctcttcctccagttaattttggctaagaaactgaaccctaccaccatcaccccattcccccatctctttctcttgggataaaatattactctgaagtccagctggtctcaaatccacatcaatcatcctacccccgcctccaaagttctgagattactggtcggagccaggaggctggacttcagttccatgaaagatggaagaagtgtcaggaactgctcctattcaggctcccatgacgttccaagggaaaaaagaaaaagtttgtcccttgtatcatatcatcttgctccttgccctaaaataggacagcaatgacgcgtggtgttctttcctttgagggtcactttcttttttgggatcttcggtgtgtgtttctccatggtgagatgttttccagatgtttccttttttatttatttattcatttatttatttacttacttacttattttgctttctgctgcaaaaatgtctcttccctgctaatggaagaaaatagtcctagaagaagctaaagggcagtatcaagctgtttccctaactggggactaagtgaaagacagagcaagggggacagcagtccctcctgcaggagactgactgacctcactccctagtgatctacctggagagaataagtaagactaaaccatgaatgcaaattttcatttaaaaaatattttatgtattaagttatgtgtgttggagggtacattaatgagcattggcgaggtggaagatgcccctggagctggcagcataggctgttgtgagccaccccaggtggtgctgggaacctctgttcttctgcaagagcagtgtgcactcacaactgctgtgtcatctctctagtacccatgtaagttcctagatacaaaagaagaaggggaaaaaagccattcaagttgcagaggtggtaggattgcatcagatctgacgttcagcttggactatgtagcaaaaccttgtcttaaaatacactatgccccatcccaaagaaagaaagatggggagggaaggggggaagacacaagaagaaaaaaagagaaaaaggagcaataaatacaaatcttgagtgacaattttgtgaatatatatatcatgttgaatgttgacataaatcttccattgttgaaacagccaatctaaatttaaaaactaatctataataccaataataatatagctcttgttcaaaagcatttttgatgccccagttatgtgtaactcaccaagtttttgtgataacctgtgtaagacttaattgcaccatctcatagatgataaaattgtggcacaaaaccattaaaatgcaggcagcccagctttaaatctaggctaggtgggatccaagtccaggcaatggtaatgaatataaatacacagagactccaaaagcagagctacagttcccacagcaactagcagtcagcagcaagctgagaaagccagagttctcccacataactcagctgggttgtggctgccgggtcttttggcttggcaagtaaaatctcagaccgtccatgtgggctgaggttttctgctgatagcgagacaattaacagggctcttcgagagtctattacaaccacggagaggccttttcacattatctaggggaatggatcatcattccagccaagggcctgccaaggtacacccattggggtgaaatggacactttctctgttgcatcattggcaatatgcatcctgacaaacaatgccatattggtagaactgactgactgtcaaatgaaccagcgcagagcaggagaggggaatggagagaaaaaaacaaaaaacaaaaaacaaaccaaaacaaaaggaatcagtgcttcaatgaggaggttttttatcagctccatgtccacacataaaatatctcttgatcaatttcatcttaattactgaatgtaggaaaacaagaccattgctaattgatgtggctttaatttatgcatcagagaattatacaggataattacctgcagttgaagaaaaatgaatactgtcaaatctggctaatacatgcgcaattcacccttctgcgtcttcatctgaaaagatttaaagtggtaaccaacctaaatgatatgcataacggcactggcttgcaagcagaagtattttctggtgtataccctttgatttgcatcacaaatagagttctcagattgagactgatgagatttgaatattatttctagaacaatagctgtgattcaccaatttaatgtgtatttgatctgttccagaagttcccatttttcaactcagtaaaagagaagttgtcttcatagccccatgtcagcccaggcatgatttctcttctgaggataacttggtgggattgatgatggtttcccttatcgagattcatgggagagttccagtttccatcagtaactgcttcccacattgtcccagaacctccacaaagcagtggcttccaaaaatctgaaactcaaacaagcagctggaaagaattatgggtccacaaaagaacaccaatggaaatttcctgatgacttgagtcaggctgacaaagcctctgggagctctctcactgtgtcgaggggagactaaggcttggataaagttgacttaaaaatcaggttacacacctgtcatcacaacactcagtagaggaagggggttggctgtgaatttgaagccagcccagtctgtcttacaagttcctgtccagctagaataaataacaaaaaccctctaagctgcagaggtagcttggtatagaacatttgtctggcactgctctgatcaccagcacaaaggtcttgccgtattcatgccatattcatattccatattgtcatattcatgccatattggtagcagtggcaggctttgttctaagctttcttacagccaggcaaaaaaggcaacatagcaagttattacttaagttgttgtgatcagaagtgtatatgtgtatatatatatgcatatacctttgtgtgtgtgtatacatgtacacatgtacacacgtacacacatatgtatacatatacatgcatgtatgtatataagctggctaggaatatatacagacaggactggcctcaattgtgatgacaggtgtgtatccctagtttttaagtcaactttatctaagccttagtcttctctcaatatgagagagcttgtatatatgttatggtatagtatatatatatatatatatatatatatatatatatatatgtgtgtgatatatattagttaatataataacatatattccttggagggcaaacctttcaaagtgaggaattatgaagaggtgtcttaatgagggaaatgaatggaaccaaagcaccacacaaaactcaaagacaacagccctgtgctcgttgctcttcactcctgtttccttatctctccttgaagctcttcccaaggcctaaaaatggcaagggaaagaaatacttaaaaaaagaaaagaaaaagaaatgtctatatttggttatcaattgcttctttctgggaaaagccatataatttaatctaggccaaaattacacaccataatcagatcttgttttcagcaaatattagcaagaggtgttaaagatggttgaccctagccccacagtcctttatagagagcccaacctagagtggggccacagctgctcagcggtctcatgactgggccagaattcgtcatttgacactttaaagttctgagaagactaaagtgatcagcaaaactgagaagtgtcaaagcacacaattttcattgctaggcaaggtcctttgtctctgcagccttgactttggtgaatgtgtggatgtgaacagcaggccttggtttatatgagcatctatttggtggaactttccacttggcaggcctgatgccttttattcctcagaaattaagatgcaaatgttacactcaacatcttacagaagaggaggccaagtaggggggcacttgtccaaagagaggactcatagcaatagggtgactgcaaagtgatgcctcacatgctatgtgtgtgttcttaaccttgcagagccgtctacttccttgtttgtgctccttacctctcttgacctgctattaaggacattggctgggaccatctctaagcctgtgtaacacaaggcctctctattcctgagagctgtggttagtcaggagagaggtactggactcatgtggaaggccaagctgcttttgcacactctcagactaacactttgcttcaatgctttgtgctgactctggaagtgctaaggaaagtgaagttggtagatacttgccctttcctgctgtgaatattaattgtgtcaccctgtaatcccctctctgacacccctcctccagagctactctagagaatggcagaagtgggagggggttgcagtgactggctgcgtccagccacctgttcaagtggtggcttcttctctcttggccccaaatacccaagtctgaacagttggagggcatctgctctctaagctggaacacccgcactgctgactcttgaaaacaataggcccagcctgccaaacaatgtatttttggtacagagaaaaatcctgtccctcctagggatcaaaatacattcttactcgaatgtgtgtcttttttttttttttttttttttaaagaaagctgcctggttcacattctgaattctactcatcccatttgactgtcatcaatgcctacatgtcaataccctcagtacttctgattccaaaatctgggttgagctttcagaagcaagatgaatgtgcctcagtgtggttcactgaagccccgacaagtggtgccttggaacagggactccgaaagcttccccagccacagtccctctttgccagaggaagatttatgcactctcaagcgtctagatatacaaaataagaatagagatcagacattcgctgataacaaatcataaagaaattaattttaaaacaactcctttaagggctggggaagtaactcagaggttaagagcacaaactgctcttgcaaaggcccctactttcttcattcttggcacccacatctggccgctcacaaccacctgtaactccagctcaggcagatccaacacctctggcctctaagggcacatgcccttgtgtgtacataccacatccctgacacatacaaggatatataattaaaaatactaagacaataaatcttggaaaaaaagtcccttcatatgcatgtaatttttgccatttcttggtgaaaaacttgcatgcacagaaactggctaggcttatctattcacagaaggagtttaacattggcagaatatttgattctgtaagacagaaggtcttcagtgattctgagctgaccaaaattctgattttataatcattagtgctgagaatgcaactttaaatacttacataatacggaagggcagaagtatgcttagcgccatttcagaaattgctagaatcctagtaaagacttgcaaataaacacttgttaagcatcttgagtgaagttgggatcagatgaccagtcactattaagcacccaaaggtcaaatgtgactctgcttactgtagcctgtgtgcatgaagaaaacctaagccctaggaagaggtttttcaaatcttatgcaggagtcccagtccagaccacctaagttggacaatcagggaatgagtcttaaactacaacatttttaaaaagaatctccccaggaaatcctaattgcagccagtctgaagagtgctcttttggctcttgtgtttgctggtgacatcaagggacagtggctaagatataggggccttattttagtgcaggaagatccagtaattcagttcctaagaatgcatgtgactttctggatttaacacacgagataagatgcagggcattgcccctcgagcagtagaggctgcctgatcgtttttgctgaatctacagtgttgtcatcaccataccggggccatccatacctaataggcaaccttgtggtggagaatggttgaagaataaaagagtaaagtctatgggagccgtatgagacccacctagtcttctccaaccataaaagcattggcttagtagagactgaagtttataggctgacaaccctatggttcaggttgccagagagtctccctaaggaacaggaaaataaaactcagcatggtggcacacacctgtaatcccagctctccagaggtggagacaggaggtcaaggtcatctttggttatgtaggaaattcaaagccagcttggactacagaagacccttcctgggtcagggatgcgggagagaagaaacaacaaaaccatgaaagctgtagtaggatttgtacatctcagctaagggacagtggacatgaagggtggcaggatgggctgattctggttttagttttgccatccatcttattagaacagttgcctgaagaccagtttccttatgtgtaaaggaatgctaataactgtcactcccaattcacaggctgctatgaggcctaaggacttgggaacatgcaggctatactcatgagctatggtgaagaagtaggctcactgatgagatcctttcctgatatgtgagatatgaacagccttgtagccaccaagacagagccatctttctgttgattttgatacctgctgggctatctgctcctaaaagtatttggttccaggtgttttacaaatttaatacagtggagaatgcctctgtcaggcagtatcaatgagtcccctacacagaaacatcattccatttttgcagggctgatgttatctagcctgatattgccagcctgctcaaaacgtatgtgtttctgcaagttctgtcaacatgagacttctgtgttctcttagccgtgactaaagtcctagaaagctcccacgtgcttctggagggcaggaagagagtcaggggctccctaaaggccgctcccattcttctgttggtctcttccaagtccaagagccatgatcccaagcttgggctttctatgtttatacagatgtccacccacgtggagtggaaagctacatggctatggaaatcattaaagccagctaattttaccacccgtgtggcttcttgttttctttgaagttgtatagggttgatccatcaatttaaaaggccaaaccaattctccttcctttcctagagaaaatagacaaattcctcctcactgtggattcatcttcacctgcttcacatctgggggtgcaggttttcatgcgttactattatctttggtcccccacagggttcactgtgccctgatgagctcataaggactgtaaaggttttgtagaggagacatagcttcggtgggtggttcctgagaagtgacatcaagtcagacctttgctcccccccacacacacactggagaatgcaaatgattaaataaataaaattaattattcaaacatgcataaacataggttgcgtaaggcaaatccctaaatatccatcatccagttgtaaaaattgtccaagattttctatatttgcttgatagatcattttagctttcgtaactgcagaagccaaaccagacctcatgtcatttccctggtacacacttcagtgtgcattttgaaactatggtgttttttttcttggataattccaatgtcatttcataccaatgaaataagtaaactttcctgcctattgtttaatatctaaaccatattaaatgctcacgcatctcagaaatgactcctcattagcttgtcatgatgagaagggacaagcattgcagagtgagggctgagttcccaaacagcaaaagcagtccttcacatggcctgatgtggtccagaggactgagagattgccttgatggtggcatgggtgtaggagaaaccagcatctgaataccgggacagggaggtagccaagctacacaccagggcttccagaacacttaggaaaagccatggtcaatttcctactccataaaaatagttgtggctcccatccaggtaaattggctgaagacaacaaccgggcaaggcaggcatccgagtgcttgagaggctgagacaggaagatcacagcatgttccaaaccactctgcctcctctgtctgtctctatctctgtctgtctctgtctctgtctgtctctctctctctctctctctctctctctctctctctctctctctctctctctctctctctgtgtgtgtgtgtgtgtgtgataagcagggaagaaagcagcttatgcttgcccaggtgtcagcctgatgtaactgactaggagttccgtacgctcacaaaagacaatgtgacaaggccttctgagctcaacgtgcaagcaatgtggcttccacgtgtgcactagttacgctctcatatgttcttttgtctctgttgctggggattttccctatgtcgttaaatccagtgctgggttccttctttacactgcactgttctcgaagcttaagagagagatgggtttctgcctcgttactgttttacagcttcatatcctttgaacaagacataggatactaagaaatcattggaaacctcactgtccagtgggaaggcacattattctgctgtgcttgagcacatagctgttctgcatttcgatgataaacaatttggctttggcagccaagaataactgtgcagatgttctgcacccggccacttcttggtatgcagcagcaaggaccagcagaaaccaccccaattatagcagattaatgtgctaaaattaccacaaagagagcatgcgtatgagcctctggaaagccacttaactttgaacccgctggcatatgatgggacctacacacacacccctgcctcagactaactagttgggcatagatgcacatacctttaatcccagctctcaggaggcagatcagtagatctctgtgagttcaaggctagcctggactacataatgagtttcatggtgaactacatagtgagaccctgtctccaagaaagaaaaaaaaaaaaaagactaattctgaagccaggtttttctgcaattaagcagtttgttggcattgaaatgttgcttttgaaatgttgtcataaaaacaagagtaaaatgatggattgacctcagtttgaaaggaatggttttcgagtactgttacagcctagctgagatgtaggcattatcagttcttattaccatgccaacagttgtgactgtatttacatcacagactccccggtccaacctctgtcaactcagtacctcacagatgccttgtaacactggctccaagggatccgatgtcctctgcagacttttatgggcacctacaaatgtgtgaatatacattcacacaggtaaatcatacaataaatctccaaaaaaaaaaaaaaaaaggacaataatgaggttgcaaggggaacctgttgtggggtggctggtgcatttggggagaggaggtgtgtacaatcataatacatttgtatacatatataaaattctctaagaataaatacataacataacataacataacatagaggacatgaaaaaatatggccacaaaaaattagtgggtcctacaaaaaaaaaaaaaaacactatcagtttgattttatacacctactctaagaagattttaattacctgtccattctctaacatgaatgcagcatatagctttatgtataagaactcagactcattttctacctgactcttgtcccattaaagaatgtcggcgtttgtcaagcttacaatatgcaaaagcaatccctagcacactgctgggcatggtctcccagaacccaaccgctgtttctacctaatgtctcaaagatggagctcagttctgttgagaacaataaaacacaggcactcgtttaaaaaaaaaaaaaagtgacaattttagaaaagccaaatcggacggaagagaacctgtcagtatcattttgaggttgttataaagaaaccacgactaagggagtggccaggccctagggatgatcggtccggtccgagtgcagagtctctgggaggagctcactttcttccacaccacagcgatgttttttcaatctgatgatcaaaaaggggagggggcatggtgggtgtgtttttctctcagcaggatcagccaagctgtctccaaaaccatgttcccaagacacattccccttttgatactcacggtttaaaaaaaggtggagggaggagggaggaggaggggggcaaaattacttattattacaaacagcctgagcctcctttaagcgcaaaacgctcttgccttctaacccactttgatgtgtagtgtgtgctctgaagtcctgtgcgtgttctaggctttgcattttaaaatgagtaatgccaacattagtcaaaatcaacccaacccctctagagatttaagtgggttttgtgtcctgaatcatttctcgtctaattatcctgaggccagctgctactccctgcatttatttaatccaccagaacggaagaaggagcagaattgtcattttccccagggctgaagcacggccaattatctagaagttcgtacaattgactagcccgatgaatagatgggctgttaacgtttcttctttactcttcacatgactcaggcaggcacttaaaatagcatccacatactgtactgtgctgtcacctttggggaggggacttaggagagagactgggggcagcacagtacttcctcactgtgtgttttctcagctatcaaatgattgaggcttataattcgcatgctctgggcatcatcctgagtgaggtaacacattcacaaagaaactcacacaatatgtactcactgataagtggatattagccccaaacctgggatacccaagatataagatacaatttgctaaacacatgaaactcaagaaaaatgaagactgaagtgtggacactatgcccctccttagaatggggaacaaaacacccatggaaggagttacagagacaaagtttggagctgagatgaaaggatggaccatgtagagactgccatatccagggatccaccccataatcagcatccaaacgctgacaccattgcatacactagcaagattttattgaaaggtcccagatgtagctgtctcttgtgagactatgccggggcctggcaaacacagaagtggatgctcacaatcagctaatggatggatcacagggctcccaatggaggagctagagaaagtagccaaggagctaaagggatctgcaaccctataggtggaacaacattatgaactaaccagtaccccggagctcttgactctagctgcatatgtatcaaaagatggcctggtcggccatcactggaaagagaggcccattggacttgcagactttatatgccccagtacaggggaacgccagggccaagaggggggagtgggtgggtagggaagggggggtgggtgggtatgggggacttttggtatagcattggaaatgtaaatgagctaaatacctaataaaaaatggaaaaaaaacagataaaaaataataattcgcatgctccgtttgattgatgaaactcaagtgtgtcttcaagctgcaattctaggtaatgggaaagaccattgccccacactaggctatgcttttctccttgaagcaaccttgataacttaggacaagaaagagtagggcttacagaagtaaactgagtggaatgcttcaacctggccccaaagccaagcttttgtttgtctgtggatttctgatttatttcttgggtcttgccctgtactgactatcttagaagccttaaaagacagctagtaaccctcaaaaaagatgtggcttggttaaagacataagacatttggaaaaataatggtgaagggaatctctaaagatgctaagttatggctgggctgcacagaaaatgcttccagaaacagctgagccaggcatgacggcacatgcttttaattcctgcatttggaatctgaaacaggactgtagattcaggaccagcccagggtacacactgagatgctgtctcaaaaaaaaaaaattaatagaaaaacaagcaagcaagcaaacaaacaaaaaacagctgcttctttcttaagatgatagtagtagattatagcccactggggaaaaaaatccacgagttcatattaacaacaaactgattaatgaatataagcagtggtaggaaaagccccttcttacataccaaagaatgataggattcaaagatggccatgatgccaccatcatggttataactgactgggacaatagtcagaaaatggcttaccagttcagctgggctgactggagagtgagccccaagaattcacctgcctctgtttccccaatgctttgattattaaagtatataccaagtacctcaagcactttaccaactgtgttctctctccacctttctctgtatttctaaacgaaagccttcccatctgtgtggatgtctgtagtttagaaaagacccaagcagtcttgagattgacttcaagattgaaggaagtttcagtctcagttgaaatgcttaatgcttgcattaaaatggagactactggctaacaagatggatcagatggatacttgctgcaaagcctaatgacttgagttagattcccagggcccacatggtaggagagagcctactcttacaagttggcctaagactttctcatacatgtaccatggaaagtacatacataggagcacgcacgcgtgcgcgcgcgcgcgcacacacacacacacacacacacacacacacacacacacacaaatggatatattgatgactgaatggatgagaaaaataaataatgaaatgaagaattgctttctctgtttcacaaagacagactccatagctgctcaagttacacttgcttaagaggcctatcggacctaccttggtccctccatctgcttgctaaggagtgagattataggaagtcatttatacattttttccatccatttgtatcacttatcttagttagagttggttatctgctttacaatgttgacatttgagaaacaattatcgacactgccttggtttactttagagcatcaatactttaaagaagtaggcaatgggagctggagagatggttgctcttccagatgacccaaggtctcccagaagccacaagcagctcacaaccatctgtaattccaattacaggggattcaaagcccccttctgtcctccacagccatatgcacagacccacatttaggcaaaacacccaaacacataataaaaataaaataaatctaaaaatgtaggcaacgacttaaatacatctcctttttctaaaagattagtcaactctgtaataggtgccttgtagatgtataataagcagatacctatttttaggattcatttcacataatcatttagcatagcaggctatttacattgggctcacatgctcattgagacaactgaattatacttctgctcttgaccaagatgtggaggaacacaaacagaagggcacactgttagggaaggagggacctgtcaggcatggagaaatgactcagagatcagtgggcccagtgctgcctgggacttggccttactaaaaggatcaacttactagggttattctgtactcagagtggggcatccaaccaactcacccaagggtttccttcccttatcttgatttcttgggtcgttctcttgtagaaggaatgatgatttttttttttctggaaactgatgatctttaaattagctttattgagctccagttcctctgccatgacattcactcattttgtgtttccagtgtaagtcttttttttttttaagatttatttattacatgcaagtacactgtagctgtcttcagacacaccagaagagggcgtcagatctcattacagatggttgtgagccaccatgtggttgctgggatttgaactctggaccttcggaagagcagttgggtgctcttacccactgagccatctcaccagccccagtgtgagtcttaataaatgtctatagtcccatattttaaagttgttattaatctatttaattacttgtatttatctttctttacatttccctacattgtagggtgtggaacctgaggctttgcacattctaggcaagaactccatgatcagccatacaccaacctatcacaatagaattctagcttctaccataccctagaagttctctggacttcactgagtgtttctagccctgacctccagaaagcagttgaactgaccatggaattgtttagtgttgttggcttgtcggctgtgttctctccaagggctggtttcagtctgatttgtggaactcctgtagcttcataactttgaaggattagtttctgattggtcctttgcccctgagcaatgctttgatatcgggagcagagctgtccttcctcatctcactttgacatcatagatgtccattttctctcattacaaatgttttgtgatgacctgtttatggtccttggagaattttttttacagaagagaaggacaaccccacgagggtcaaggtgatcgggttcagcacctgctacttctcaagatgtgcttacatgatgttcttacagctgaggcatgtacacatgtgatgcactcctaatttccatggaaccccaccccacccctgaccccgccaattatccttgcaaggatcacctttgcctttggccaaaccctctccatctaaaagtcagaagtagaaacatatgcaatacagtctaggaggctttcccattattgagagagtatggattatgggggttaaccttttaagatggtataagacaaacattaattacgaaactcagcccccaaagaactttaaaaaatgcttgctgaggaaagcagagtgcaaaagttagcatgcagtctgcaccacaggcatgcttgcagggaaaggggaaagtggaaaattaaagaaattccactgtggtcctgtgggtgtgtgaagagcatggttctccttgtctttcccttccccgcccttttctgcccttctgtattttcctgatgttggagacagttttgatgcctctgaaactttgaaaaaagcaaaaaacctaactattcctggttttccttcctgaatctcattgggtgttgtgacatcaacaaggccttccttctggctggctggttggtttgctgcttgctctcgttcagcaaagcctttaagcacttctgctttgagctcctcggggtgtagatccaggcctggcaagtgtgagcgagtctgttggagatctgccccttgccatacctgaccctgttagtcctcaaggagctattgatatttgaagagagaaatatgtaaacacaagataacctaacccccgtgtgtggaatgccggctaataaaagcacaataaaagtagaactgtcatccagactggaatcccattcattctcccatcacttctggtggcattagtgagctactgctggggctacactgtataggcaactttgacaggtgttcttcatagtcagtctccaagcaggcagccctccaacagtgattcccataactggctctttgacatcaggttatttctaagttctccatgtagccctaactttcattggttttcttcccttccctttctggaccagccacagtgtgagactgggtggggtaaggggaaatcagccagccactttcatctcttcatctgcctcaacctctcctccaccttctggcctagtgctcttgtcccgaacccgactgatgagacttcttctgatatgatgtctaggttgaggaatggccaattgtgtcatataggagacagacatacatgtatgtgtaccacatacatgcagtgttcaaagggaccagaagaaggaatccaattatgtcatataggagaatgtgcaaaatcttatcattttaatttcaaaagatctgtatgtgtttgtgtgtgtgtgtgtgtgtgtgtgtgtgtgtgtgtgcgcgcgcgcgtgtgtgtgtgtgtgttgataccaaaagaaaacaccaggtatcctggagctggagatacagatggttgtaagccgtgtaagtacaggtgctaggaaccaaactaaagtcctttggaagaaaatcaattgcccttagctgctgctaagccatctctccacatctctgtagttctcagaaagaccagtctttaacatttttttttattatttttatgtgtataagtgttttgcctgcctgtatgtatatgcatcacagacatacatgtatctgtaccacatacatgcaatgttcaaaggggccagaagagggaatccagtccctggtactggagttatgattgtgggtactggggcttaaaccctggtcctcttgaagagtggccagtgttcggaacagctgagacacccctccagccccaagatgcctttttgcaaaccccagcagtcttgaagatgaataacagcatccaaaagcgaatctgttgatctgctgatgacttgtgtgcatgaaaggagctctgcttgttggaaatgctttggatgaagcttagaaatgtagatgtggtataatctctgccggtcttttgagtgaaagtcaggaagttgttacctaattcaaaataaggacatcagggggattgtgacttgcttgaatctactcaaaatttatgaaatctactgcattgtttctgagaaatctcatttcttctttatgtggcataagtaaataaagttggcacccaacagctatcttacatgatctctgagataagctgtcctctcttcactctcaaccccaatggtccgcaatcccaggaaacctcaagaaaaggaatttttcatccatgaataattcatgtattaatctctgtaggaataaaatgcagacataccaaaatgttgcttactaccattcaatcctgcctgtccatagacaactctttatgcctccgtaacttttccatcaatggacatagtgtcctatggtttcgttttcaccgttcctgggattatactgtgcctactatgtcctagaggtctttctttaggagaactatatgacagcttagtattattatttactattattactgggtttgagacaggatcttactatagaacccaagataggccttgaattctctcctcctgctccagcctccccagtgctgggatgacttgcatggaccactcagcctgacattgtcttcactgttatagttctctaccttggtgattactccacagtgcacttgccatttccgtggtgatttgtgtgcatgtgtgatgctgagcattgaactcagggtcttgtgaatgataagcaagcactccaccaggcctggtagttagcatggatactatttctcagtgtgacaaacatagcctggaatgaacgtctcttaggtgcctctctgtgctcttaggtatccccctcaagccacacaaaaggatgagtatgttttacatttccacaggacaagtgtcccttccaacagtggccccacaattctgttagtacttttttaaagttaagacatttggcctaatggagtatctgctatcaaaatataaattactccaggtgggtagttaaatgctcagtaccttatactatgttggatagtagagagggtactgtgtagagcagctttagaaactgaataaacttgcaggctttgtaggagggcaacaagctatctgaaggcagaggaccctaaaaagtagataggtcagtcacacttcttccactgaccaaatatctgacaacaaagcaacttacggaagtttatcctagcttgtagttcaaagaaatacagttcatcagggcagggtagagacatagtgacagccacatgtgcctggggtctggaagccaaaccaaccacgaagcggagagccaagctatcaaatcccaaggtgctcttcacttcttccagtgaagtgccacctcctgaaagttccaaaactgtgccaccagctggagaccaagtttcaaggccatttgtccatgggggacatttcacattcagatgtgacattcaaatatccagagtaggggtagagtgatttaaaaagatgctcaaagatgcagattgcaaggtcatttccacggactaaaggccgtagaagctgaaaaaaacgcaacaaagaatggtccccctagatgggcatgctggtacccacctgtagccctggagctactggagaaggaccaggaagtcaaagtcagcctctacttcatagcaagtatgaggccctctctcaaaaacaaacaaaaagatttgtcactgttcattctgtgtctggagacctgactccaggggttgagggacagtgttttgttccctctatcctggtcagttgctccccaccctgcacaacccactccatttctttaagaattgggtgtgtgtccatgtgaatgtgcgtgcatgtgtgggtgagcatgtgcatgtatgcgtgcatggaaatgtgtgtgtgtgtgtgtgtgtgtgtttgtacgtgcatgtgtgtgcacatgggtgtgtgcatgtgggggcagtcagggaatggataggaggatagagatttcagcctaaaccagctaacaaagtctttcctggcagatgatgatcattgctgggagagaagagatgagttagagttaacccctcgccagccacactcctaacagtcacacaacccccatgggaagttaagaaaaagactctgagtaacacttcatcttccaacgcatgtctatcctaaaatccttcacaagcacctgctccgagatgcttttgtccccatgacaagaaaaggagaaatgagcagattacacagtcttggagcacaacttttgtaaggtaccatttcattcacctaatgtgacaccaggattttgcagacaggggcttaagactgaataacaagccaggcatagtgttaaatgatctcagcattcaggaggctgaggccaagtctgggtcacagagagagttacaggacagcctgagttatatagcaatacccggcctcaaaataagtaaatgaatataaaataaaaataaaatgaagaataaaaattcaagaacacattttggttttgtttaattgtaacactgatgtaagtttgacattttgcccaacagggtggatttcccctgctctcttgttctttttgttgcaagcctatctttgtgcaactgactgtgcaattgaaacttctaaggcagtgtcttcacaactctgctagacatcagaatcacctgagggacatttggaacactcatataaacaggtcattgcctgtattaattatcctagaatgcctgcggcttaaagccaggtgactgcagcttaatttactgatgcaaagagtaagagtgaaaaaatctttgggtttaaaagaaaaaaagtaaaacatacagtttcatcatacttaaatcctagcacagggagcaatggtgccaggttcatccaggtgtgagcccaactttctttgcgcagcaagttctagaccagccaggactgtatggtgagaccctgccaacaattccaattgctaaggcaggggaattgctatgagttcaaagtcaccctgggtggcttagtgagttctaggccagtctggtctacatagtaagattccctctcaagacactcacactaaaaaaacctgaaaatacatgcatacatacgtacataactataatttctagaaactctgggacacttttaagtagctttagtgtttgtttgtttttaatcaaatgactgcttcattagacctgttgaacaatttacagatgagacacaataagattgtcaacttggggcactggttgctcttccagagggcctgggttcaattcccagcattcataaggcagcttacaaccatctgaactccagttccaggggatctggctctctcttctgacaaaaagacataaagtaacataaaatttaaaagatttatcaagttgaaacttattcagatgagtgtttgtcaaattattgcatacagtactgggtagagcccctgacttgcatgtggggccctgggttcaatgcctagtaccaaaggaaaacaaacaagcaaaacccgatgaagtgaagtcagaacatgggccatggtgtcttcctgacgactcttgcaagcttgcaggtgacatcatgctgcacagagctgtcaccgtgagcccaaggactatgtcctcactgaaatgtagatagacacctaagggcaatgaagagcaattgcaagaatttgttgagagattcaagaactgggttttttgtgagccttggggctgatatggagtaaccaggaaccacctcatttctgtgcacagtccgacaaacaaacaaacaaacaaacattaaagctatttgtattagggttcacagaatatacggaatgtctttatgtattgagggactttattatgatgacttacagtctggagtccaactccccaacaatggtcagctatgaatgagaagtctaggaatctagtagttgctcagtcccacgaggctacttgtttcagctggtcttctgaggaagtagattcctacagatgtgctggcaagtaagtgcaagtttcgaagaaaagcaaatctttcttcttccaatatccttatgcaggcctccagcagaatgtgtggcccagatgaaaggtgtatgccaccacacctggatctaggacttgttttgtcgcaggctgaccttgaactcagagatctccttgcctcggtctcctgggattaaaggcatgtactccttgcctggtcataatcttttcatggccactgtgcctcaagatctccatgccaagatccaggtcagaaacttgtgtcttccccacttaagatctatatcatggggctcatgagatggatcagtgggtaagaacatcgactgctcttccaaaggtcccgagttcaaatcccagcaccatatgatggctcacaaccatccgtaaggagatctgacaccctcttctggagtgtctaaagacagacacagtgtacttacatagaatgaataaataaataaataaataaataaataaatctttaaaaaaatatatctagatcacaggtgagccctccaattctggattgtagttcattccaaatatagtcaagttgacaaccaggaatagccattacactatttaaaataattaagtgtctcagagtttctagaaattatgtatgtatgtatgtatgtatgtatgtatgtatgtatgtatttttgttttgttttggtgtgggtgttttgagagggaatcttactatgtagaccagactggcctagaactcactaagccacccagggtgactttgaactcatagcaattctcctgccttagcagttggaattgtaggcagggtctcaccatgcagtcctggctagcctagaacttgctgcacagaggttgggctcacacttggacgagcctggcacctttgctccatgtactaggatttacgtatgatgaaattgtgtgttttgcttgtttcttttaaacccaaactttacatagttctagcccattatatttaaaattcgagagaatccctctgtctttggcagctataaggtttttgtcccatcccatggagaagccagcctactgctgcctgcccccagattgacctccttgcatgtgagcaccttgtccccgggaataaggcacatttctcccaggagtgtagagacttaaactcctgtgacagtgtggagaggagtctgccctctgaggacttagctgttctctctttctcctagggtccttaaagaacagtgggtgacaattcccaaacacactaattggtgtgtgtgtgtctgccttttgaggtttcaatgtggacattctcctatcctgtgagctcagcccctgcctgggatgacatcacccactgagacaatggtgcatgctttgaggctgtctgcttgacagtgggtagggttacctcacagttctagggcagtcccttgggggactaaccttgggcttctatccagctgaagttgcacttgacacggcatcttggtctgtcacagggaatcttcacaaagccaaacagagaactgaagaagagatcaaaaggagccctcgtgggcctcctacctctcttgtgttctcacctaaccctgattatcatttcttttgtgggctctccttctgtcctttcttattttcccagacaatgcagtgacacaaccttacctatcaagataaggagagaaagggggaagagtttaaataagttcatcttttaaaaaaccctcgtattttcagccttacacatgaaaaaatcctatctgcaggcctgagtatgttttgaatttcaggtcgaactatctgaaactttgatggtggctcatttgtgcagtgctgttgtcattgaatggactgaaccatcacacaagttctcatctttagtaaaccttgattgagcctaagaaagaagagggaggggagaagaggaaagaagggagggagggagggagcgagggagggagggagggagggagggagggagggagggaggaaggaaggaaggaaggaaggaaggaaggaaggaaggaaggaaggaaaagaactattaaaggaaatatacattgggcttgggagatacagaacagctcagtggataaaacacttgcaatgcaggcttgcggataaagtgtcagtcaccagaacccacgtaaatgctgggcaggcatagcagctgcctggcagagcatctggcctataaccccagcactgggaagttagaagtgggatccttgaagcaagatggctaagtacactagccatatagtcaatttctacattcatctgaaagacaaagaggaaaatgaacacaatcttggaagattcccacagtcacccttgagtgtctacatgcctatacatacacgcccacacacatgtaaacatatgtgcttcatataaacatgcatgcccccgactccaaaggaaacctaagtggcagcaattttgtgtttgtatttattgtggtctaaatggatgagtatccttttaggaacatctcagaagcagttcatggccagggtcttgtgagacatttcaccttgtcacgcccctgaatattgacaagcctgacagtcaccatgattttccctctgtctacaggactgccaaccagactcccagaaatcatgctggtgggatcccagtccttctctcctggcgggcccaatggcatcatccggagccagtccttcgcaggtttcagtgggctgcaggaaaggcggtccaggcaagtgctgggtgctcctcctgggatgcagcagaaagggactgtgtgtgtcttgctgatgtgcatgtgtgtgacagctaatgtcttcatggaaaggataacacatccatattaagtgtgatctttcctatcatttacaattccttgtgtaaagatatctgagcatttaggatgatatatatatatatacacacacacacacacacacatacatacatacatacatacataaacacacacacatacatgtacacaagtatgcatacacatctggctagcttatcctagctgttatgagaggctacgccctcactattgagtatgtggtcactccaagctgtggttgaggggaaggtttttaatgtagatgtgagggagagatcagcagtacagccaaggcatctggaagagtccagagccaggagagaaaataatacactgaacatggccagcagagtgaaccaagccatgaaatggggtggggagtggggggagtaagaaagggcgctgagagaggggggggtgcaaaaagaggaccaagagagcacatgtctgaagcggcagggttatataggttatgtagaggctaggggaagggaagcccagcagtgcagaagtttaggcttaggagccctgtgaatccagccaggattctgatctgaggaggtctggaggccagcatgcttggttatgctaataggcaccacagttagttgcagactccttcctgtctcactccctttaaagcacactttcctttaccctcctgtttcagagactggattggtatgaaattatgcagtgggtgaagactgtgcctcacagactgcctctggagagctgatatcatgtgggtgggggttgggaaattaggctctagtttccctggaacctcctctcataaaaccaaggaaggtcagagagtgaatgggtgacatgcatgagaagtcgccctcacggatgaggttctccctttccaaggggagctccagactcagagagagactctgtcttaaataaataaataaataaataaataaataaataaataaataaataaataagtgtgaagagtgacaaaggacgatacccaaaagtcacctccagacgcatgagtacacacatgcactagcagaccctgacacacaaaaataactaaagtaaaataagataactaagacttcaaggacagctctaactctaagctccgtgctttactttaatgccctagaaagttagctatttgcggggctttgggcactttacccaaaaggtatcactcatatcctagcaagacatacatttgtatctgaatttatgcaatgacttttcttttcctttggttggatataactcctacctgtttcttgtttccacctggaaccatttatccctggctctctatgagctagaccacgagagcatcctcaaaaggcatacactgcaagccaggctatgcctgcagggtagagcttgtgctctgcacagctttcagcaagcaaacaaatgtcaagaaacaaaatgtggctctgttcagttctgtgctattcaaggccacgtctcattcctccaggcactgggatgaaggcaagatggtttaaagtcatctctccagtgggtcttttgatgcctgaggctcacagtttcctttctcatctctgtcgttaggtgtaactccttcattgaaaatgcctcggctctcaagaagcctcaggccaagctgaagaaaatgcataatcttggacacaaaaataacaacactcccaaggagcctcagccgaagagagtggaggaggtctaccgggccttgaagaacgggcttgagtaagaactgtgcctttaggaaaggtcttcttccctaaaatgaccttcctaaaaaccagtcataggaaatccgttttgaaaggaccatgtgagccattgctgctttattctttggttggtttttgaggcgggatcgcatggagctcaggctggccttgaactccctatgtagaccttgcagttctgatcccgtctccatctatcagacgctgggattgcagggggaagtaaagtgtgccagcacacgttcctgggtgtttccttcttgctctatcattgaggcagctttttatgtctcacagatgggagacaggttgtatttgctcatggaatcgtgaccctgaagtaggcttgatgcagtattgtgtctatagctaactccctgaactgtcggacttcacttagacaatagctaactattagatagagatggctaaagaacggttctgagccaggcgtggtgtgggtcacacttgtaattctacctagagctcaggaggccaaggcaggaggatcatcaaaagttcaaagtcaacctgggtgactcagtatacaatctgcctcaaacagacatacatgctgtttaaagtttgtaaagggttctgaaaccttcctgaatgtgttttaaggacagtttgtcctgaagaaaacttgcctagcatttggtaagacacctacagtaactactaggtttaacttgacaaaactgtgtgacccaggtcctgtctatcttccctccccgtggacttttctcttctggattttcagcctcgaaggggcactctggctacctctgtttcctttcttcaaactagacaggctcagatgcagctactagactctcaaaatgctcctgaaccacaagtcaaagttttgattctttttcaagagagaggcagggtctcactctagaacccaggttagcccaagagttactatgaagcccaggctggcctagaatgcataatagccctgcttcagtctcccaagggctgggctgagctgagcttacaggtgtgagccaccacctgacagtgatcgatattcttaacccccagtagtcagcgactgcccagattgctcctgaagtgagcgctcactaggatgtcttacctttgcagtgagtacctggagtttcaccagacggagctggacaaattgactgctcaattaaaagatatgaagagaaactctcgcctggtaggtacctctctggtcatgaggatgttaacacagagtagagggtgtggagttcctctccttacttactggaggggagaaggggcaggaacattaaagaaaacagattcaaggagcaaagctatcgcctcctggtgtgtattttagaaggaagaattgctgagcctggcggctcacatctggaaccccagaaggagggagactgaggcaggaagatagccagcctcatatagggaagccttgtctcaaaaaacaaacaaataaacacacatacacacaataataataataataataataggaaaaagatgtttttcttttaaatgtttaattcttaatacttccaaaggtcctgagttcaattcctgcacccacttggcagctcgtgatctgaagccttcttctggcttccagccatacatgcagaagaacactcatatacttagattcataattacatctttaaaagaaaactctacataatataacaaaatgatctgttgccgttttcctagcatctccttagtacattcagaaaggagaacatgcgctttatcttccatttgtaaatgtaggccagtgtcctcgtttgctttctgttgctgtggcaaacaccacagccaaatgcaatttacagaaaaaaaaaaaaaagtttatttcagctcacaggctgtgtactccatcatagaggggaagtcggggcaggaacctgaaggcaggaacattagctgaggccaaggaggagtactgcctactggcttgctccccgtggcttgctcagcctcctttcttacatccttgggaccatgtgttcaggagcggtaccacccaaaatggacaggacccacccatattaatcattagttaagaatatacccccacagacttgcctacctgccaatcaatggtattcccttaattgacggtccctctttgcagatgaggctgacttgagtcaacctgactgaaagttaaccaccacggtcagtggaggcaggcagggaagggagggaggaaggtcactaagaggccagtgtgaaagcaccattgagcccccttagaacccatgctgtatagctaatgtcttctcttctgatgagtttgtgagcactgattttgttcatttcacagtgttccttattgcaccttaacatttcaaggcagcaggaaagcccaggcgagtctgcatccgtagacctggcagctgtggttagcatgtgtttgcctttcatctcactgacctgtaaactaaaatgctttttgggttttgtttatgaacccttcaagctgccaagaggccaacaagaactgggtgcaactgtagaatcacagaggccatgtgatgctggctcctgagagcaccccaaataacccagagttttactcattaaaagtgaatgccaaaaatccagtagaatttagtggggctggtgattccttcaggcaatgtatagatgggagctgagtcatttattaaagtgggcaatatctccaaggaggatgtgtcataaccaaggaaccttcttttcatttcagggtgtgctgtatgacctagacaaggtaggctagcattctttgttggggtgctactgaaaaacgaagctctgcgcctggagctgatgtttaaacatttgtagaggccctttgggggacagtaagattcctgataaagggtgattggagggggtttccatgagcgtcagggcccgcagaaccaaagagctgagggggaaacaaggcctccaggatgtaggtttgctctggtgtctgagtctggaccttagatttggagatcctcgccgtgtagctgctgcccttttcatcaaatctgaggcatctctgattagaaaataccacagttggttatgtgccaggaaaatgaccccatatatatatatatatatatatatatatatatatatatcataatgtctcaaaaaatataaaagtagaaaggaatgattccagttatatctagttcttcctttttgtgaaaagtatatattcttattgagagaatttctccaggccttttagaagggagatttttgagtcttcctttttagttgtacacaacgtcactctccatgccattctatgtacatagctttatttatttcagtgcctaacagaatcatggcattccccacagagatattttaaaggccaagtaaatcaaatgcatgttgcaatattaataactcacaggaatggcataaccagctgtatctgtgagcccaaacggacagctgtcacaatgcacaaataacaattataaagcgtaccccagctctagagtcaactgtataattcagtgtgcagaagctcagtttagaacatgcaggatatgaagacatttagataccgtccgaatgatactgctccaccagacatcagatggactggccaccttggtgtttaccatgggatgaccataattaattagttcaagctcatctctcaggctagtcagtgttttgaaaaatatttttcaaattaacattaggacacctctaaaatagtggccaaggcagaaggaaaaggaaagcaggaagtgcttgtgggccttatgtggaaggcaggctgctgcaggttctctcaggagcctaatcaatcgcactctgaatggctgctcgttcttcaagcttctccttttaattccagcaaattaaaacgattgagagatacatgcgacgcctggagtttcacattagtaaggtaacccgtgctgctcttgtctctgcttctgtatttctgctctcagttactgcccagtgcgtgcccaccctgagtataacgtgggtactgggtggctttaactagatacctccactgaacatagaaatgaaagccttggggctggagaaatggcaccatagttaagagcattggctgctcgtgctgcggacccaggttcagttcccagccctgacaggctggctcacaaacaattgtaactccagttccgggggatctgacaccttcttctggcttccataaataccaggcatgtatgtagtacacaggtatacatgcaagcaaaacacctagttacataaaatatagataaataaaatctagaagaaagagaggaattaaggaaggaaggggaagggtgaagagagatggggagaaacaagaacgtggagtctgattaactggcacggttggacttcagtcttacaagtgtgaacaacttacctgaattttctctactcttgatccatgcattctcaaaattgttttctgtaaataacctcatttttaaaattttttaaaaatgcttaatcctggggctagagagatgactcagtggttaaaagcacatgctattcttgaagaattcacatccctcgcttcccaactacatgtaactctagcaccaggggatctgatgctgcctctagcttccaagggcacctgcactcaagtacacatcccagcacatagacagacacattagacacatgattaaaaagaaagccatctttaacagaacaagaacaggccgagtctaggcttaggaggatggttctgtggttaagagtacttgctacacaattacaaatcatgaggaccagagtttgtatcccaccacccatgccacaggctgggtattccgaaaatgcttgtaacccagctccacttggggcaaagacaaaagggtgggtgaggcttgctggccttctgcttacagaaaatctgagctaccggttcagggagcaacccctcctgcctcaaaggaatagattgagagtaatagataaagacagccagtgccatcttctggctcctgcacacacacacacacacacacacacacacacactcacattcacacaggcactcaccctacacacactcactcacacacagtcacactcatacacactcacatttacacaggcactcacacacccacacacagtctcatacactcacacatatactcacacacactcacccatactcaacacatacattcacatactcacactcacatacactcacacactcacagacacatgcacaaatgcatagataaaataccgactccaaagttgtaggtatcatctattgataatgcctcttaaagtgataatagttttgcatactacccattttctctttgatgtaaaattagaacctttccaatgcttaatccacatgtaggggactcctgtcctcgttgtctaaccccacagtccagcacagacctacacatttcccaaagtatgtccccacttctctgtccccttaacccctctctacccaaccccccccccaaccctctgaggcaggatctcaatggcctggaacccacaaccctcctctcaagtgctgggattataggcgtgtgctaggccagctgcttaagccaatttaaacaatcccggtcgtagcctcaaagacatgaatgggccttttcaacttgtataatttggaaacaggattcaagcaaaatctgctttgaaacaaacaaacaacaaacaaacagttcccggcttctccagaacagaaatccagtgtatctttaagggcatgacaacagcttattgggcttctctcaagcaggacggctatttatctgtttcctgtttgggttctggcaggtagacgagctctatgaagcctattgtatccaacggcgtctccaagatggtgccagcaaaatgaagcaagccttcgcgacgtcccctgccagcaaggctgcccgggagagtctgtctgagatcaaccgcagctacaaggaatacacggaggtaaatcctgcagtctcgttccatgcttgagaccatggctcaaaatgtaaacaacaacaacaaagtaaaagaagagctgggaaagtaggtcagtgggcaagcatttatttacctggcagacaggaggccccgcccctcatatatggaaaaaaaaaaaaaagccccaagcaagacaatggtggaactgtcgaaactaagccatgaagcccaatatttcatcattcaaatttacttctaaatactgtagtgtgccctgaaggaagagtagcctacatgataagatgactggctagcccacatacagttttgatatcggactccattctgcctacagttctgtgcctatgcatgtttgtgtgtgtgtgtgtgtgtgtgtgtgtgagagagagagagagagagagagagagagagagagaggaagagggagaggaagaggaagagggagagagagagattgatttatccaagatatagagccatgaacagaaatgttatcttcctggtttctgacagtctctggggtctaagtatcatccgacagggagggtttcaccccctaggggtcacctaacactaatgcatgcccttcatgtagagcctgaattattagagctgcccttctcacagtccctggagacttcattcagagatcagatgtcaacagtgaagtcatgactcaagcagggtctagtgggcaatccacagagccgagcatctgtcttgggatccctttatgtttgcaccacggggctgcttgaaccaaataagtctttctcttttcatgatttaacattaggcccttctttgcctactttccaaagcatatttttaaatttataaagtaagctgggcttagtgtaaccccaacactcggaggctgaagcaggaggattactgcaagtttgaggtcatcctggactgaacagtagtgactaccaggccagctaggactacatagcaagaacatgtctcaaaataaatgagagctgtggcgatagcgtaactgtagtaacgagtcacaggataggtgctgggaactgaccgtgggtcctcaggaagaacagcctgtgctcttaaccactgagtcatctcctgctttttgagcaggctcaaattacaggctccagcatagccctaataagcattacagttttgaagcactgaaacccctaagtgattttatccaccctgcaaccccaggagtgggtctctaagtattttctcatttggaacagtgttcatccccagctgcatccatgggtgacttcagccgttaatctagtgacccctgagttcttaagacagtaggagcattcccaacgtgcctaatgacacatctggtacgtctcgaaactggtcccttgcagagaggccccaggctctgaggaaacaaactacttgcagtgctgagattctcctttcaacgctttcaagctactcagagctcagacctgagcaaacgctcccctgctttgcccagctctctgaaggactgagggcttcttacaggaaagagaaacgccattcttcccatgtcccacgagagtgacggcaggtgctgagcgaacaaagaatcaaataagaagcggagcctgcggacttcctagagctccctgaacaggcttgagcctgtcggtgttcactaggtggcctcacttttgccggaatggcaacttgcccaggcctgagcctcagcaaagctggccgtgaggaagaggtttgcagaagcagagatgcccagtgctgcttactacagtagagaggcttgtaaggctcaccccagctgagctgcagggagctctcactggagagagagacactggctaggacacttgaagtccacctctaactgctctcattaggtcctctgatactggggcgctagaatgggtatgatcaggtattgtaaccttgagtgtctcgttcctttcacaccacagtgaggaggggacccttactcaacctaggggctcattctggggcttcatatcatcacattgaaagtctgccttacttgggtagactcaaactcctacactcctcgccccccctcctcctccccaaaattttgtgtgtgtatgtacacatgtctgtgtgtgatatagagaggcaggtatagaaacctgaggaagacctcaactctcatcctctcgggtgctaccatccattttgttggggtttgtttgttttgagaacagggtctctcactggtctggaattctctaagtaggctaggcttgcaggcacaagccccagagggcgacatctctgccttccttccactgagattgcaagcacataccaccaagcctgattactgttttcttaattgtttttaatttagcaagtaaaagatacatatgaatgcatagtatataacatgatattatgaaacaggcacacactagagagtagctgacccagcatgtttaacctggagcgtggatctcttcctatttagtgtgcatggctgattctctgtcacaatgcctttttgtacagtcccgagtctgttcttagaacatccacactctagagatgtctgactactttgatatcatctaacttgtccacctaagccccagctatcccatgcacccggagcggtgtgtcgtgctgcctgtcctgcagcgggtactgtgtactcgtggaagacaggaacatgcctctcgttcaatgttatcattgccgagacgtcttgtgccaccgtgcagaggaatgcagatctgacatcatttcctatgctctttgcagaacatgtgtgccattgaagcggagttggagagtctgctgggagaattctccatcaagatgaaaggtaatctgtccttgttcagagagggataaaggtgccatgtcgtccacagagcttcatgagaaggcatgtcattgcaaagacatggggttgcctgctcttgggccttccaccatgatgatttcttgatgggtctcttcttgtaccttgccttcgcatttgaaaatggtgtctattagatgagtgaaacaacaaacctcggaatccatcccacgactcagtaatcaccaaggctttgccactttttcttttccctttgatgaactagaaaactccagaggaggaaaagccaagtatgtcactccactgatcagcacctgtaaacttcagtacagttctgaaagaatagggccatcttacgtaatgtaaccgcagtgcctcagcccgttgtcccattatcgcatctaatgaaattagcaagtctttgttattaacctagttcattggcagatatccccagctgtctcacaaatgcttcctagagttgtgttgcttcaattaggacccacacaaggtccatgtgttataattagctgtcagttgggctccctttaatctaacacaaacccccatccagccttctagattacctggcagcctctttacattgtcatttagccatctgtttatttatctactttgaatatcttctttttagtttgaagacaaaatctttctgtgtaattcaagctggtttcaaactcacggcagtcaattctcctcctgtgatgggccaagcactgggattataggaccgcctcaccatacctgtctcaccttacctgtctcactatacccatctcaccatacctgtctcaccagacccatctcaccatacctgtctcaccatacctgtctcaccagacccatctcaccatacctgtctcaccagacccatctcaccatacctgtctcaccagacccgtctcaccatatctgtcttatcatacccatctcaccatacctgtctcaccagacccatctcaccatacccgtctcaccatacctgtctcaccagacccgtctcaccatacctgtcttatcatacccatctcaccatacctgtctcaccatacccatctcaccatacctgtctcaccttacctgtctcactatacccatctcaccatacctgtctcaccagacccatctcaccatacctgtctcaccatacctgtctcaccagacccgtctcaccatatctgtcttatcatacccatctcaccatacctgtctcaccagacccatctcaccatacccgtctcaccatacctgtctcaccagacccgtctcaccatacctgtcttatcatacccatctcaccatacctgtctcaccatacccatctcaccatacctgtctcaccatacccatctcaccatacctgtctcaccagacccatgtcaccacggcttgctgccacatcaatcacttcatttgtccctccactcccatgttgctgctgtgagtctgttcgaatcgagagcattgttactttaagctacagcacctgcagcccaaaaggaaaaaggaaaactctagctagatgtggtgagcctcacactgcagtgtccacagtgcccatcagggccgtgggacagtggcatcacagccagcccttttctctcccatgtttggctcatttaactgtactgagcagctgggcccctgcagtcctctctctgggttggtttgcttgtttaacagtttgatccttaggtcgctaatgggcattattaccttacccactctctgtgataagaagagtgaaaaggggaaaccccctctaaaagcagttctgggtggagctggagagatgacatagtagttaagaacaccagtggttgaagaggatgtgggttcagttcccagtgcctacacggcagcttacaaccactggtaactccagtccccggggatctgataccctctctgacctcctcaggcagccggcaagtgtgtgaagcacatacataacgccttgcctgtgatggacatctgcatctttctaactttccaggtccatttgcttccacttaaggtctctacctgagttcgtggttcaaaaccactctggaccatgctccctctcagcagttcagaatctgcacagccaggacggaggttctagaggtctctttgaactttcaggatggttctgtcagcggcctgattcattgcagtcaagcatacaaagcagagttactttgccagtgttaacacaaggattgcccacgtcccagggcatgtaggccagcacacagagactggggtcagcacgtgtgttaacacagggctgctgaggccgtttctgatgttcactggtatcagatgcttctgtttttgatgagagggataatttcttccatttcatgtgtggacaccagtagccaaaaagcattagatgacgtctccaaggccacacagtaagctgacatcagacttaaagctgaatcctggggtcctggctcctacattaagttacttttcccatctctatgacaaatacctgattcaaaagggaactttgggaagaaagggtttgttgtagtttatggcttgagtgggggacacttggtcatggcgggagggtataaaagagctcatggctgtgggggtctgcagttgagatgccttaaatttcccaggaccaggagcagaaaaaggacaatgctgatgctcacctcaccaccactcctgtttgtttgtttgttttattcagtttaatatccaagcctgcattcagggtgtgtcttaacttctaaagatcttggaaacaccctcatggacatgtccaaagggttatgcctcattaattctcagagtctcgtccttcccttcccttcccttcccttcccttcccttcccttcccttcccttcccttcccttcccttccctttcatttccttatttctggatggggtctcattgagtatttgttacatacctgaagctgaccttgaactcttgatattcttaccactcactacccactgagtgctagggttatagtcactgtttcgagcaataaggtaggcatacttagtttgtataacaaacgttgtattttcttatgctgagggtcatcacacaaggttcacactgtaaattcttaactatggttcttagcctagctctccaaatctgctcacctgtgaacataacttagctaaaggtctggtttcagtctccaacagtagtcctggctcaggagactccccagtcttgtgggatcctcactatttttacatgtctaaaaggcatttcttactctgctcactatagtcagccaccaccatacccacttctaggcattccttattcaaacaatttgaccatggaaattaaccatcaccgctgccagtacatgaccacctcaatgccacattatgaagaagtcctaataattgagcagacactatcaaccatcaaatgccagttttcactagagaagggattcccatcagcttaaaacataagcacctaaaaggtatggcatggggaagggactacccacccacccacccacataatccaaatctcagatctggagggagtaagcttctgtcatgggtggatgccctggtcaccaactgtgaactgagtgacttgggctgagacactgaatgcctgagccatatgctctgctatccctctgcccacttttctcttatgcttccttggttgccctaaactcaacttttatcacctctaccctcctaacgtaaaaaacccagaaactacagctctgattaaacacacacacacacacacacacacacacacacacacacacacacacgccccgtccttttctccctccacaaaaggagtgagaagacatcccaaattctcatgagctactgctgtccattatgtttgattagtatacacctcaacctctaccctcacccctgttcccaaagccaagcacttgcatcacattctcagatctgacaacccctgagttcctcctgccacaccctcccacacttcccttttgctcaactccacaactaactacaatctgaaaggcagttgccctcgagatggtgatgataaagacatggggacaagagctgctaagctatgcacaccagcctctgtcacttcatgaccccaggacaccacagttgtctggagatgcagggtggaggggaacctttgagtatcacatcctcacgcagtgggcatacatgagcaaacacatgaccagactgttgtagatgcttgagcccaggatggatggaggggttgctagggcagaggcaggaggatctgagtacaaagctagctgtaaactgtctcaaaagaaaacagaaaattaagtcgggtctgctggtccatgcctataatcttagcactcttgaggctgaggcaggaggattgtgaggttgtggccagcttaggcttcacagtgagacactgtcaagaaagaatgaaaaagaaagaaggaagggaaagggaaagggaaagggaaagggaaagggaaagaaaagaaaagaaaagaaaagaaaagaaaagaaaagaaaagggctggcgaggtagctcagcgggtaagagcactgactgctcttccgaaggtcctgagttcaaatcccagcagccacatggtggctcataaccacctgtagtgaaatctgatgctctcttctggcgctgtctgaagacagctacagtgtacttatatataataataaataaatctttgggccgaagcaagtagaattgattggccagagtgagcagaggtcctaagaattcaattcccaacaactacatgaaggctcacaaccatctgttcagcaactatgtactcaaatacatagaaataaataaataaataaatctttaaaaaagaaaaagagacagagagagaaggaaagaaaggcaagaaggagagaaggaaggaaagaagaggaaggaaggaagaggaacagagggacagacagaaagaagaaaagaaaaaataaaaaatgttaagtgaaggttcccactgaggaaaggatggggggggggggtgcagagagcgtcctgaataacctctggctagaacaactaaactgaaagtccctcctgaaggcggggatgctgcccaaagctgtcgggggggggggggggtgctgtgatctctgtgctctgtaaaagtgctgtggggagctgttgaggccagattccaaaaacctgtaaggacccagctggattcaggaccccaaatcagaaaagaagctaagaactgcgtgtcttacagaaaactgcttttcttcccaacgatgacctcattcaaatgagttccaggaggacacatgtccagaggtcagtgctagctggtcaccatggcctttaggatgaactgggaaacctgcccaggaagcaggaaggccagtactaagacacagtccgaggtacactcttaggaaggtcatggcaaaactgggaaacaatggagtacttctatgaccagaaccgtgtctgagcaaaggcagccagtggcacggggagccaggtgagcagctgtgtggctgtaggtagctgggaggctctatagctgtgtagctgtagatagctatgaggttgtatctgcaacctttctccactgtgataaattctctgaaagaaacaacttaagaggaaaacgatccgtggcggcttaagatttggaggagtttagtccactatgggaaggggagctatggtagtcggagaggccggcagctgaggcaggggttagagtggatcaggaagccagacacaggctggaagcaaagcagagttataaacctcaagaacacactctccagtgtctgattcctccagctaggccctaactcttaaagactccataacctcccacaacagagctacccagctggtggccaaatgttcaaccatgagcgggggcatcatttatccacagtcacactgggggcagcaccctgtcctccattcaggctgtggaagagctgttggatcattaacacaggagcaaggtaaaagatcaaaagagacccacctgagggaacccagggatgatttctgagtggccatcatgaaaacctagctgatacaacagttaccaccaagcagctgagaaaacactgggcttttcgcagctgtagaaatgccagcagggccttgggccagaatttgcagaacctagccaggccccaaagtccacgatagctggtgctccagcagaagtgctccccccgcctggggagcttcggctggaactggctcctcctacctgctgccattctgctgttatcactgtcaccagaggctggagatgccttataaggaatgtcaataaggtgtgttcattccatggacagtgagacccaaaactcatcacgaccccagccctcctcctcccgtgataagaaatttctggtgattttgagaagggagatcgtcaaagagtccccccacccttctcaacgtatccatcatggtacatagtcagcttccctgaagcggggtccctattgtcacctcaacatgtaaccagctagtggattaaccaggagctgataatttgtaggtattcaaagggtaaatagggttttcttagaattagcacattgggcttcagattcataaaagccagccagcagtgctttctttccgatgtgtttttgtggaggtgggggaaaaaagcctaaatgctccagaattattcatgaaaatcgcttcctccaatcctgcttttattacagtgggtcctcctaagtggctcattagcttctaattgttagcgagagctgctcctaaatgcatgggctcgccaactaaaaggcatgccaagttggtgagctgctgccatctagtgtcgaaagatggtaagaggtgagcccattttgaagcttccctggattcgtcttattcatcaccatgcccatgggtcaatgggaagcagatttgtccatttgagataaattgagccattcactgaaggtaaaacacacagtgtgacatcatccttgttatgtctacgtgagtaaaatcttgtttgctagaaacacaacccagggcagggaagacagcataaagcgagcaaaaggatatgggtttggatctgcagagcccacataaaaagctgggcatcgggtcatgtgattataatcccaacttggcctctgatggaaaagggacttgagatgggtagtaggtccctgtgctttctggccagccaatctaaccaaacagcaacctccaggttcagtaagagatcccatctcaaaaaggaaaaaaaaaaaaaaaaaaaaaaaaaaagggtctatgaagcatccgcaaacataggcatacatatgcctgtgtatacatgcacaagcacgtacaagcacaggagaaacttgccccaggactcaaaggttagaaatagaaaacgtctgtgctgattttttcactgcaattatgtcatagttttttttttttagtgagaaattctaaaatgtaaattaatattttcaccctcacacagtgggcttttggtaaatatcaataggaaggtggaaagggtaatggaagctgggactctggagctgtcccagggcggcggccgtgtattctgacaaggtgttgctgctgaagcggtaggctcaagttgacctgcagatgacacaggggaagaaaaggcaccttgtgctaactggatctgtcaatcaacgcaggctagagtcacctgagaggagggcgcctcatttgagaaaatgcctccataagatccagccatagaacattttcttaatttgtgatgatggggaagggcccagcccatcgtgggtggtgccatccctggactgggagtcctgggtgctataagagagcaggctgagaaagccaataagcagaaaccctccatagcctccatgaccttcgtatcagctcctgactctaggttcctgccctgtttgggctcctgtcctgacttccgttcactgatgaatcgtgacagtgacgcttcagctaaataatcgctttcctccccaagttgctttggtcatggtgtttcatcgcagcattaatcatcctaagacacacttcttcttttgaaggaacaggctattggcagtttgttgattggatttagtttgttttcttttctttatttatatttatttttatgtgcagttgagttctgtctctgtcagatcctggagctgcagacagttgtgagctgccacgtgggtgctgggaattgaacccaggcactctagaagaacagtcggtgctcacaattgcttaaccatctttctagcccctgggtttgttttcttaatcaccagtgtggggtacatgacagtctacttctagcaagttcataagcatcaacagtggcatcactgtgctatataagtagaatgagagaaacaggaatgagtgtgctgcagacaagtgacaggtgtggggacaaggactcacaggaaggtatctagtgtcacagatcttgggagacaggaaaaccaagaggccagtttatttgcatgggaatattttggtcagtgaaagaataggtctttttggtcctgctgccctgatcctgaaatctgccaaaggtacacagagttctcaccacccaacagactccccttgaaacctcctcccaccaccctaaggggcatgtcctgctagctgtatatccccacaaaggctattctctgaagatgctcctacacctgttacattattacatgagtttttaacccatgacaaattgtgtctctaaagaagggaaatgtgttctgcaactcacagaacgatctcttgttttcaggtctggctggctttgcccgcctctgtcctggagatcaatatgaagtaagtaatgtgttggtctgcatgttggcattgaaggcttgaagggctatagttatgattgttgttgttgttgctgctgctgctgctgctgttctggtactattaaccaaggaacttgtacatgctaagcaaatgctctaccattgagctacatcttcagtcaatgttttacttttttaaaatgtgtgtgtgtgtgtgtgtgtgtagaggagtgcctatatgtgtttgtgtaggtatgtgcacaggatgcaggtgcctacagagaccaaagcttgagtttggggcagttgtgcttcctgtagatgctggaaactgaacttgggttctctgcaagaatagtatgtgctcttaatgctgagccatttccccacttctactttttattattgaaaccgcagttcataaagttgtttgttcaagctaaaacttgaacttgtgatcctcctgcctcagtttggatgtcaggcatgtaccatcaggcctgagtccagttgttattatttttccttcatttgtcttttaacattttgagccagtgagaaagtctggagggtaatctgagaactgactcccacatgtggaacatggcagttccatacaccccactattaccatcctcatatacgtcgctcactaccaattatgacccttcctccctcagttcctctcccaacactgaaaggacaatctttcacataagacccagacaattcttttattattattattattattattattattattattattagatattttctttatttacaattcaaatgctatcctgaaagtcccctatactccccccactcccctacccacccactcccagtacagggccctgccattcccctgtactggggcatataaagtttgtaagacctaggggcctctcttcccaatgatggccaactaggccatcttctgctatatatgcagctagagacacgagctctggggtactggttagttcatattgttgttccacctatagggttgcagatcccttcagctccttcggtgctttctctagcttctccattggggccctgtattccatcttatagatggatgtgagcatccacttctgtatttgccaggcactggcatagcctcacaagagacagctatatcagggtcctttcagcaaaatcttgctggcatatgcaatagtgtctgggtttggtggctggtttatgggatggatctctgggtggggtaggctctggatggtccatcctttcgtcttagctccaaattttgtctctgtaacttcttccatgggtgttttgttccctattctaaggaggaatgaagtatccacactttggtctaccttcttcttgattttcttgtgttttgcaaatgcatcttaggtattctaagtttctgggctaatatccacttatcagtgagtgcatatcaagtgactacttttgtgattgggttacctcactaaggatgatatcctccagatacatccatttgcccaagaatttcataaattcattgtttttaatagctgagtaagtactccattgtataaatataccacactttctgtatccattcctctgttgaggggcatctgggttctttccagcttctggctagtgtaaatagggctactgtgaacatagtggagcatgtgtccttattaccagctgatatatacctagaagatattattatatcttctaggtatatgcccaggagaggtattacaggatcttccggtagtactatgtccaattttctgaggaactgccagactgatttccagagtgattgtacaagcttgcaatcccaccagcagtgttcctctttctccacatcctcaccagcatctgctgtcacctgaatttttgatcttagccattttgactggagtgaggtggaatctcagggttgttttgatttgcatttccctgatgattaagaatgttgaacattgggctggtgagatggctcagtgggtaagagcacccgactgctcttccgaaggtccagagttcaaatcccagcaaccacatggtggctcacaaccatccgcaacaagatctgactccctcttctggagtgtctgaagacagctacagtgtacttacatatattaataataaaataaatctttaaaaaaaaaaaaaaagaatgttgaacattttttcaggtgcttctcagccattcggtattccccacttgagaattctttgtttagctctgtacctcctttttttttttttttttttggtttctctgtatagccctggctgtcctagaactcactttgtagaccaggctggcctcaaactcagaaatccgcctgcctcttgtaccccattttttaatggggttatttgaatttctggagtccagcttcttgagctctttgtatatattggatattagtcccctatcagatttagtattggtaaaaatcctttcccaatctgttggtggcctttttgtcctattgacagtgtcttttgccttacagaagctttgcaatttcatgaggtcccatttgtcaattcttgatcttacagcacaagccattgctgttctgtttaggaatttttttccccagtgcccatatctttgaggcttttccccactttctcctctataaatttcagtgtctctggttttatgtggagttctttgatccacttagacttgagcattgcacaaggagataagaatggatcaattcgcatttttctacatgataaccgccagttgtgccagcaccatttgttgaacatgctgtcttttttccactggatggagacccagacaattcttaacacctataacctttatcattgcctcttagttattctctctctctcgctcgctctctctcgaggacataaatacaggtcaggttagacctagttaaaagcagataaatgcagataaatgtaggtttattaggcactgctcattggtgtgtttatctgtcccaaagaataggactaaggaagtcacaactggactaagtcacaacttgactgcatgcagccaagaatataagtgtggcctgacacaaaattaaaagcttcacacattaggagatattttttgtgtatgtgaaaattttgggtcactcaattgcacagttcttgagtgtgaactttctgtatgacagtgtcatctgctcatacccaaaggttggacatgactaacacctgattatagagttttctttgtcaaaaaaaatgtacttataaacttcattgtagctcatatctgaagggattattatttaagacatcctgaccctgtctcagaaacaaaactttctcaaaatcaaaaggccatttgtctcttccttcttcaaaagagcatgcatgtaataatttcctctcttggcagaggctctgaggccattcacaccaactgccctcctctgcccagagtctggaaggtcccgacccttaccagcatcaccagagacagatctttattcgtctctacaggagctggggtcagcagagctccagttcccatggctgatggactgatgtagggttaaaaaaaaaaaagacaggttttatgtgagtgggcagattgacacagagctatgaccgccattgaaagtgcctatgtagatttattttgtatctgagtgcttgccttcatgtatgtctttacaccgtgtgtgtgtgtgtgtgtgtgtgtgtgtgtgtgtgtgagagagagagagagagagagagagagagagatgcctgaagaagacggaagagggtgttggatctccctggaactggaattaaagtcgctataagccatagtgtgggtcctgggaagcaaccctcagtcctccgcaagagccgcaagtgctcttggcctctgagccaacgatccagccgctgctctaaccttttactaaagaaacatccacaccctgagctagagaaccagagtgcactcctaaactggtccagatttgttacaacacggcctgaatattagcactcaggaggcagaggcaggtagagtgctgtgagttggagaccagccaggtctacttagtgagttccagggtaaccagtgctacatagtgagacactgtttcaagtcaataaactaaacctcctctacactcctcacgcgctccactgagaacccagactgggtgggcaggggaatgaagggtgtgggccagattcctggctcttggatctgggcaattgggagggaaggtggagtctggtgaaacaggaggctccctaatgtcttcaccccagattttcatgaagtatggtcggcagaggtggaaactgaagggcaaaatagaagtgaatggtaaacagagctgggatggagcagaaaccgtcttcctgcccctcatagttgggttcatttcaatcaaggtacagtgagtccctgtcttttgttgtctttccttccttcctggtgtcctggcccaatgatcccttggtggggaccctccatcccataggtctctctgtgtgcaaagcctcttttagttgagatgctctcagagcccagagacaatgtaactgtaacaaagtaacattaaaaaaaaaaaaaaagataagacattcctcattttctcccctcactttctctaccaggtcacagaactcaaaggactggcgactcacatcctggtaggcagtgtgacctgcgagaccaaagagctgtttgcagcccgaccccaggtggtggctgttgacatcaatgaccttggtaccatcaaactgaacctggaaatcacctggtagtaagttccttgtttttcaagttcatcatggacaggcaagggcccatggctagtgttcttccaggctagcgctggaaccaccgtgtcagcgtggagcagtggtcacacctgaactgctcactcagaatcatttaagctcaccaggtagcatgtccaggtatctctccttttccactgcctacttttaaacgttttattgtaacctggtgtgggggcacatgtctgtaaccccagcatgtgggaggtggaagcaggtgggccagtaagtttaaggctaacctcagtttcatagcaaatgttggaccagcctgtctcatagaagacctgtctcaaaaagtaaaataaaataaggcctggggagatagctttgtgataccgcttgccccgcaagtgtgaggagctgagttaagatctctacaacccatgtaaagccagactcagtcgcatacgtctataatcccagaactcctgcagtatgacaggagaatcacaggaagccagctagcctgctagacacagcagtgaacaagaaacaccatctcagacaagattcaagaggaagactgagaccagtggttgtcctctgacctctgacctttacaggcacactgtaccccactacacacacacacacacacacacacacacacacacacacttcttatgttctttttaaaagtccctaatgaaaaatacacagcccttggcttgtgagtgaatacaccatgttgctatttgtgttgaaaggctcccttacaaatcaaagtcagctgtggcgacagccaagacgccgttgttctgtcacagaaacatcaccccatgtctggctttttctgggctcacagtctgtggttgttcatgaacatgccaaaggtctctgttcccgatgggtgatgggatgtcagtgaccagcaaccagaccatctgaaaccccagcgactgtgttttccttagtgctgaatgacagtctgctagtcacttacctgcctagagtccatccagacgaagttccgaggactgtttacaggttctcccagcatccagcagctaatccactcatgtctcttaacactcgtggggaaacagacacacccgaagcttctttgtggccccacagcaggtccagagtcagtcttctgctgcacattgtttgtttatttattttctgataacccaggttggtccaaagtagccccattcccactggactaagtcgatactgtcataatgagagaccatattcccccattctgggatgacaagtgattttaatagatatgctgacctaagtacctgttgttctacagtccctttgacgtggaggacacaaccccatcgtcgggccctgggaacaagacagctgctctccagcgaaggatgtccatgtacagccagggcaccccagaaacacctaccttcaaagaccagtccttctttgtaagttcagtgtgatttctggcataaaaatgataacactggggtgttccagtagaatttgaagttgtgtatcacccacatcagagactttcaagaacaggggcgatggctctgcagttaaagtgcttgcttgctatgcaagcttgagggctagaatttggatcaacaaaacactcgtaagcgctgggtgggtgtgctggccaacctgtgactcgagcctggtacagctcagatgggaatctctagagcaggctaccttataagacatagagctctgggtttgattgagagaacctgcctctgtgacactagccatatcatagagctctgggtttgattgagggaacctgcctcagtgaataggacgggagaataattgaaagagtcctgatggactcctcgcctatgcatatgcatgtgcacctatatatctgcacctatatgcataccacactcataaacacatgggaagaattgaagcctagcgatcaccctaatagtgtggtgtctaaggatgccacgttctgagacacttgggccctctgagaacagcactgacttcctctgcctgactctatccccactcgacttcacttttggaaaggtgggaaacggcacgtaggttttccgagcattctacgacatgaatcttttcgagtgtatttgaatgacgcctgcttgaccctgtggagccctgctaactaccaaggggaacccattaacctgcttctttccactaacttgcccttctcgccctgacttctgaagagatggttgcggctgtctgtcttgagtgccttgcgagacactttctttgccacgttgcaccacaaccactctgtcggtgacctgccttccctcagcctgaaccccaaggccctgctagaattctatgtgagtgtgggccgcctggcgtgaggtgcttggcaccagggagcctgtgcatgcagcccagcatgtctcttgtgtcttgcctgcctgtcttgcttgctgggttatgagaactgtcctgtccttggggtgggaagcatggtcttgcatgcaacttttttcaccctcctttgccaacaattcctgggtttatgctgtgattttttttttctctgtggtaacaagattttcactcttaaaaacaaacaattgtttttaaacaattgtattggggccgggaatatagctcagtttggtagagtgcttgaggcctggattctaaactcagcgccacctgaaccagatgtgctggtacacctataaccttgcactccggaagtcaggcaaggggacgggaaggtcaaggtcatcctccactctacatcagctcaggggctgagctcctatgggaacaaagaaaagggaaggaaagaagggtgctttcagtttaccactgacctcagatttgcaaaagccagcactcagggactcagaaggatttgagccaacggcgttgccatagctgctgctttttgtccattccgccctgctctagagaaacaagccctggaactcatagaaatgtcctaggcaacctatttttatgaattacatattatatggaggagaatacacagccaagtacacatacatatgagggatcctctgctcttcgtctgaaaaataaatgtcacctttaattatcttgaaaggagagtaaagaattctggctaatacagtaacaacaacaatgattgtatgtcattcatgaaggtaaaaaggacaacgtaaatactcatggactttctgaggaaaataggaagaatgtatggaacaatgtgttaaaataaaaatcataccaaaacccaatagcctgatacacttgtacactgatacatttgtggatttgatggctgtccacgctcacgtggtataccttggaggcctacagggatgctgatgttacttgccacttgtgacgaaatacctgtcacgagtcaacttaagacagagtttatttgggccctcaatttaaggaggccacatgggggaaggcatggtggcgagcatctgacacagctgatcagcgagtgttagcagtccggaaacaggtgaacccaggcgctcaactccctccctcctcttattcagtctgagccctgccctgtggaatgctgccacccacgttcagggtgggtcttctcgcctcagttaaacctctctgccaatgtcctcataggcaaatgtttccacagtgattctagtttactcaagttgacattgaagatcagccatcatgggagaatcgctagaagttgaaagcataatttaaacaagattaaaaaacactggaccactacctgtagtatttgggaaaacataaaggtcctccgggtagccattcccatttgctcaaagcccattgcaccaggcccacttctccctttccactccaccctttctgtatgttccacggctctgcaaataccccacattcttttcagaactccttcctcccgtcctctgcctcaccagtctccatggcagggttctagaaccgtcttttcacttgctaggaccttggtctcatggcgtacttccaaatacatcctttgtgaaccaaggtaaaaatcaacctagtcaaggggtaagaaggacttctatgcctctgtccctgatgattatgatacctgaaggccaatgtgcaaggtgttgtgagactgtgactgtagtttaagcttcaaagagaggttacatctctgtgattggtgccataaaagccgaactgttttgagagacaggaggtaagcgatcttggggagccagtagaatggttttgctgttacacagggtagtgaatttttttctaaacagtgtggaaagtttgcaaggtcatcacatagccaggtagatttgcacacacagctctgttggaacatttggctgtatgcaagtctcccttcacaggtgtgcattcttcatagactgtgagcagggcatctgaacgtagtacaacttagcatttgtcacttaagtaagtaagagttgaccctggccacccagccctctgtacagtcagcagctccgcccctgatgcagccaagaggtgtgtacaggcgaggctacacaggcccttctgaagaacttgtgccttctgtaaagggcctaagggttttttggagatgtcccaacaattagtactctgatcctttgaccatcagctccccaaactttcccttttatctttactcagggtgtaagggtataaccgaatgtgaaagttgagggaggaactcagaccggagaggaggaagtgtccaggagcccatagcctgggagagctcagcagaaagcagcctctgtccttcggcttccttcttttcacttgctgggattgttcatgggggccatctctaccatggttgtgaaaactcttgatttttatatataatcaaaataggcagtagcttaataccatgtatccttgagtgtctactgggaattgataatgggacccaatcagatacccaaatccccagaggatcaagccccttatatcaaatggcacaatgattgaatggaccctatgtacaccccacatcccctgtacttaatcatctccgtatgagctaacatgtgaattctaacccagggtaactgatgaggaaataggtattctgccatagtgggtaatggcaaggaaaaagtctgtatgtgttccaagtatttcccatctgaggttggttgactctgcaatgtttagaatcaaaggacgcagaggaatggctgttcttcaaaagtccaatatggaggaccaaggaggtggctcagtgggtaaaagtgcttccaacacaagcctagccaccttagatcagtcactggtgtcccttaacctccacacgaataccttagcatacacacaagcacagatagacagacagacagacagacagacagacagatagacagagacacacacagcacttgtcatgcaagcatgagggactaagcttggttatccagaactcacagaaagctggatatggtggtgcacatgtctgtaatcccgatggtgtttctgtagtgagatggggagcggaggcaggagaattatgaaaagctcacattgtcagctatcctgccatgctcagtggtgaactagagaccatagctcaaacaaagtagaagatagtgaccagtacccagggttgtcctctgacctccacacccacgtttatcctcatccatacagacacaaacaaaacacaaaaaataaagcttacaatttcaacctggaatatacaaagaaaaaaacccaatttctaagaggctaatttcaaagacctagaaagccttgtctataggcaacatacttatgaacacaacacaacacaaaactgtaaacttagttaagacatcatcagatttttatttttattttttttgcaattttaaagactcagctggggagttcatgatatgaattttgtaaagtttgtagatgacaatgtcatacaatggtgtcaaaagtttggacacaccagcctgaagaaagacagtgcaagggctgcttgctttgaaattgctctgctcatgagagcaaactggttgtcttaattatctggaaatctcttcctgtgtgagcattaaacccaggggctcacacatgctgggcagactgtctacccactgagctatcgccccagctcagttgcctgcttgtctctcttcagagcttcctgaagcacaaagtcaaccagaggcaggccttacttgacagagagctgtatttccagagacttagacttaagagacttagacaccaccacaccctccacctccacctcctcctcccctcccccccagggtttgccttctatggaacagatatcccacccatcagtgtctttcttttatttctacagaagctaaacgaatttcaaaagtccaaattttgtcagtagatatttttcgaaagataattgttgtgaaccaaagccaaacaaatatccttggagcaaaagaacatgggattgcaaaatcttttatgatacacacacacacacacacacacacacacacacacacacagtacacacacaaaaataataataaagaaaaagatgggtagtgttattcttaatgatggctgccaagtactgtgagatcctggaattcataaaaacaagcagcgtccccactcatccttaaagtgcatggaaaaaaatgtcaaacctaagaatagcactgtgacctttcacctaggtccaacaatggcaaccatttttcatggcttgttttccctttgcctgcaaacacatacatatcaaataaattggtaacattaaagcattttcatcttaactgcctcccctcttgactggaggtgaaccatgccaaatgtatcatctcctatctttctccacagtcaaatctgccagatgacatctttgagagtggaaaggctgcagaggagaaaaggccactgtccctcagcttcagtgacctgcaggatggagactgtgtcttcacctccagctcagccacctccccctccagttcacactcagcccatccagagattaccatcacccccgcagagcttacccacagcagcctgtcctcacaaaatgagggcaccgaggacagcagctcagcgtcttccaggaattccttgggtgaggaccatgagcccaagtcccacccaaagagtgatacggtagagcccgggaagccgggtgtggctacaaggtctggtaccgagagcctgtttctggagagtagtgtggccgaggctctcctgcaggaatcggatgaggcctctgagctcaagcccgtggaactggacacttttgaaggaaacatcacaaagcaactggtgaagaggctcacctcggctgaggggcccgtcactactgacaagcttttctttgaaggctctgttggtagcgagtctgaggctggccggtcctttctggatggcagcctggaagatgccttcaatggactcttccttgcattagacccacacaagaagcagtacaaagagttccaggatctgaaccaagaagtcactcacttggatgatgttctcaaagtaagtacctttctgggaaaaaaaaaaatctgatttagtttggaaaaatgcatcctaaaccaacatggcatttaagataacaaatcttgtcctgtcacaggaccagtgtatacctgctacgtaagtggaggtaatattttaattccagttatatctataaatttttatttttctgacaataaatcagcttagctaaatggattaggagttggtttataaactctaaaaagaagatctaggaatagggtgatggctcggtggcctagtgatctggactgttagtcatgcttcagtgacaggttcccgagaggaaggaccgggggatgataagataaagaaggtaggaaaagttgagggcaagaggtctcgcacaagctgtgtcttatgacaagttcatttttaaagaagcacagcgtctcatatacaattttcagagggaaaaaaaatgggacagagttagaggaaaactctaatacaatgaggcaaagtcagcaggaagctaaccaagcaatgttgcatgaagggaacaaggatatgtcaagtgagtcacaggctgagcacacagcaagcggcctcaggactgatacccataatcctttagtagggacgtgttggagtctcaggatctgaagctccagctcccgcaaggcccaggccattactggccctgccaagcgcttcctgcttttaaacaaggaaactacattccttcttcatacatcagggcctcaaggaaagccttgggtcagtatggccctgcaccccaaccaggaagagtttaccaaaaacccaggaggacctgagttcagcctccagaaccctcatagaaaaagccaggcatggcttgaaatgccagaaatcccagaagccggtggactcctgtagtttgctagccagccagtctggtcaactcagtgagttccatgccaggcaaagaccctgactcaaaacaagttggaacttcaaaaagcaacactagaggttgacctctgccttgtgtgtcacacacacacacacacacacacacacacacactcacacacacacacatacacaccacatgcatgcatttcttcatgtagtacatacatatcccccgccagaccccagaatctccagacgcatatgaagtctaaatgtgaaatactggtgtttgttcatcgtggtctcaaagatgctagtggttaggatctttctgtgggttccatggaaactggggaagttagccccaaggtgaggagccatcctctcttctcacagtgccaccagctaagggtagctccttgtgaatttaacctaagtcagcaaacttttgagacctcaaaacaatcagcaacaactcacctttgctcatgtactagaagtcggggaaccaaaaagaaaaaaaatccaacaaagacagtttcctctatccctggtggccagataaggtgtaggtgtaaagtcaggagggagagttgatgcccacttaaggaggatatcataatgatggtgtcaccatggcagacagaatgcagctgtctatacctgacatacaggtagaaactcttcttaaatgcagcatggggagacaagatgacagggacattgacctttgtgtccctgctctaagtatttggtcacttaccttcagcaactgagagccagtccgtaagaggccccttgtacctttgtaagatggttgtctgtggcctttgcagtgacaactatggagagtatggagctatactctcaagactttctgaccatctcctttctctccgtttgctcatactgacctagctccagacaaggtttgtgtctgaggaaatgatgaattacgtctccgacactctatgccctctggcttcacaaggtttgtgtctgaggaaatgatgaattaggcctctgacactctatgccctctggcttccccagagttccgttctaaagagaacctctgagaagcaggagagggggctgcgaatctgctctctgtagtacacagcccaaacatgtgcacctagagcccaaacatggagaacactggatggcatctgttgtgcatctcatctgcatgactgaccccctgtcaatcaagaggtgttcatctcaaaaagctgaagcacacacttgacccttctacagaaggtgcccctgagaaaaggcagtgattgggtttaatcttcattaagaggggtaagggttcaacccagtctaaggtactgattaggagctcagctcatcaggatactttgagctcattatccatccatcttggaaaaccttggtgatcccagaatgttttctggctcagcttgcccttgtccagtactatcccaaccccatcctagtgaaatcctcaaccacttgtctttttgctgtgaccagtgtttgaagtcatcactgagctgtgtacaagatcttgttacacagagggctgacttaagaaaagagtcttaagggatggagaggtggctcagtggttaagaacaataactactcttccagaggttctgagttcaattcccagcaaccacatggtggctcaaaaccatctgttaaaaagtagatagatagatgatagatagatagatagatagatagatagatagatagatagatagatagatagatagattgatttttaaaaaggtagccgggcggtggtggcatatgcctttaatcccagcagttgggaggcagaggcaggcagatttctgagttcgaggccagcctggtctacagagtgagttctaggacagccagggctacacagagaaaccctgtctcgaaaaaaacaataaaacaacaacaacaacaaaatctgtaatgggatgggatgccctcttctgttgtgtctgaagacagctacagtattgttatataattacaataagtaaataatatttttaaaaaagaaaagaaaggcctaataaacaccagtttcccttttctccctgacgatgattaccagcatcaattggcagctaggtctggggcaagtggctttcgccagacaaagctctctctttttcttcctccttcacattcctaggatgctaaacatcttgaggatcagagactcaatgatgctgcttcccggatggagatcacagagggtgaatgagacaaccgtgatttaaaagactgaaggacattttcccatgtgcttctgtgtcatcccaagtgtctgggacagatccccgcaaggcccttcctaccttgtgctaagagtctgcaaggggatcctcctagccagacagaggacacgcagtgtgtctcctttgcaagatttgtcctgttcaacctacctcacgtcctcttgaatatgtggatatgcttttctttctccaggctaaagccactggcatagcagccacatagcaggcttctgtgttggctcatgtcctgcaacctgctgtagaaggaacttgtccccataattccagggcttgccccgaggggtgatgggacttgtgcctttcaccttcaggggagtcgggatcattgtcccatcatgcccaagtcacccatttgcctctccgtgctcagaaaaaaaaaagcatccttgaatggaacatggtgatgcagggctccgtgccaaagcagcctagggcaggtgtatttgagcagtttccttttctggaattcatttttgtcaattctttacagcctactctagacagagagctccaggcatggcactttgtcacttggtagcagagactggttctggttaagagtcagcagtgactccgtggcttttaaaatttgtctgctgggttggtttgaagaagaatttttttctaagagtctcatattcactaggctggtcttgaatgcatgagatcaaatggagctctcagctcaaccttctgcgtgcctgggactgctaagtgctgtggtacccagcttgctcattctgtttgatttggtggtgagcactacaccaaaggaacatgtcacttctgtttcccaagactttcaggttgtcatttttttaagttgttttatagtcatttcagggtgtcaattttttatagtaatgcaacttcaaacagaggtagatctgtcaatctgccaaaacccccagtgatacccagtgactctcagtgacccccccccccagtgaccgacttaacctccagtcctgtatcttctatccttccttctcaattctgttagaacaatttacaaatgttgtgccattgtttctgtggttgtaattcttttgtctcaagatgaaaactaaacgccaatgaaaaataaaaccttggaaaactgtaagaaagtgtcacgtttcccacgggtgccatgagtcctgccagtgcccctggtgtgttgattggtctccttggtaccttctgcctttgcagtgcaagccggctggcagccgcagcaggtcttccagcctaagtctgacggttgagagtgctttagaaagctttgatttcctcaacacctctgactttgacgaagaggaagaggatggcgatgacgtctgccacgttggaggaggcgcagactccgtgttttcagatactgagactgagaagagtgggtaagtgtgaaggcagcgtgtgcttgtgttcctgcccaccccccatcacagttggtatggtcaccctttgctactggcagggccagcccagtgcacatctgcaagagggtgcaatccttgtcatgtccaaccgcatatggcccaagacagccatgagtgctgcccaacaccaaatcataaacttacttaagacactgcagcatgctttgtggggtttgttggtgtcaagatttcgtggttcttgggcatggactttgtagggtacaatatcgagccaaaactgtcaaaaggttgagcgcacctgcggatgacttgatatgcagttccttctagtggttaagtacagcttctaattatcggtgacctactggaggttacgtagggaacaccaatatctcttgtttccgagaagcatctgtgtgattcgtgtacacaggcatgtgtggtgtgggtgaagggtctacacagcaggtggcccggactttaataccctgcccctgctgtgtacttcctgtacttccaaagcccttagtttgctgagctctgttttcccagcatccttccctctttcattacaactcatctctgcatgaggctgaaatcattggtgcacatcccaaagccaagcttacgtttccctataatgtaagatggaggcttggcactccttttgacctatgtctctccaggtagaaaaatgtgtcaccttctccataaggtgtctcttgcagccaagccaacgttcttttttgtttttgctttttgctttttttttttgtatttttgtttgtttgtttgtttttccctctgagacagggtttctctgtgtagccctggctgtcctagaactcactctgtagaccaggctggcctcaaactcagaaatccgcctgcctctgcctcccaagtgctgggattaaaggcgtgcgccaccactgcccagccaagccaacgtttttagagccagatcctgagccctctttgtgatttcaaatgaaacaaaagcagcttggtggccagtgcccaccttctaagaatcctctgcctttacctttgctacaacagaagcgacgtacgcaggttttcagattacagcaaacttgcctggccagccttagagaaccagcagtgaagagctattgtttttggtttggctgctattattgttgctggagggagttccttttccaaaataagaccaagtttaaagtgtgtgcgtgtgcgcgcgtgcaagcgcgtgtgcatgcatgtaaacaaaagcatgaggacaaaaatatattccttgagcaaacagagtaaaaagaaatgaagtgtagaaaatgtaatatttaatgtatagttctgcatgctatattgagattcttttggcttggctgaatttgcaaaatatttcttctcttaaacttttccatacacatgttggctttagctacaaaatatcacctcttttatacattctatgtatggcagcctaaattgaatccctggcacccaaatgtggaaggggagatccaactggacagagatgtcctctgacctccaggtgcacaccacagcacatgcgcccctctctcacaaacacaaaattataataagtagttttttttatttcagcagaattaacatatagaagaggcatgccaaataattctaaagtataaaaataagttacagccatgcagtggaggcacttgccttaattcctacactcaaggggcagaggcagcagatctcagtgagttcaaggccaacctagtgtacagagtgtgttccaggacagtccggggaacacagagagaatctgtctcaaaaaacaaacaaccaaaaaagttccttttcccccaaattctgtttttactatatttcttgagtggagaatattcaactcttttgactattagaacatattataaattataatgactacaacatcatgatgtaaacattgaacacattgaaaagacagatacagtgtggtggtttcctcccttcagtcatgacagattagttcattgacattcaagaatgtcactttcagagctagaaaagccattggctttgtgtcctccttcaaagctgtgtccatcacctgtacccagtccttccttatatctatatatatattattagctaggttctgcatatgaagatcatgtgagtttcttttctttctgagactgtgtgaactttctgagtattatatattcattgtctaagtccatccatttttgcaaatattgtgatatatctttcttcagagttgaaatatgcatatatgtatataatatatgctatttttatgacccattcatctactgatggacaactagcttggtgccagtcctttgctataacagataaagcagtaggtgtttgtagttctacctctcttatggatttttcagtttgggtgatggataggtgcatataaatgcattcaatagtaaacaatagttgcattgtgtgtaaagcccacagcaccaggattcctatcctacttcattgagatatatagactttaggtctggttaattttggtgtataatggtttaatttacaaggctcttataatgaagtttatatttaaaaagaaaggaattcactgggtagtggtggcacacgctgccgtcactcagaaggcagaggcaggctgatttctatgtggtagaggccagcccgaactacagtgcaagttctaggacagccagagctacacaaggaaaccatgtcataaaaataaaaaaataaatgaataaataaataagaaagaaagaaagaaagaaagaaaagaaattcatttttaaaattctatgtacccagatcatacaataatcaaataacccaaataaataaaagacttatttgtaaacttgaaaccataaaatataacaaaatatatgccaattggaaaaagaataaactggccgtagtgaaatccagctgtaatcccagcacttagaggcacttagtggggacgaggcaactcagggccatgtctcagaaagagaagggaagaaagaaaattagataacatgtgaaactttaaaatgagagtgtccgtgatggtatgacttcacagtgtgacagtggataatttcagacagtgtgacagtaggtttaaagagagcaggagaaacaggacagagcagagagctgcacagccacactccccttctggtgtctgcctgtcacagcactgtcacccagcagcagccctctgcagcttttttttccttgtcttagagtagcagttggtatgaggccatggcaaggcctgcgagattacttttttttatttatttacttttattattatacataagtacactgtagctgacttcagacacaccagaagagggcttcagatctcattaagggtggttgtgagccaccatgtggttgctgggatttgaactcggaaccttcagtagagcagtcagtgctcttacctgctgagccagcctttgagattactctttaatgggatcactcatagaagcccacaagcaggactgttgattcccagggaagctggcagaacccctgcctacagggtgggcaagcgcagcaggtgcagcatgagggcacagttcaaagccttctcagggaagctacttcacaaagagctcattgtgctcagaagacaaacagcagcctttgtttgcctggtcttttgatacttaggcaaattggcaaccgagctgaaataagttattttagaaaggtacccctgcttttgagagcaaaccagggaaggacagatttcagtggggaccacgttaaacttggcctgtggtttgtgcacagaaaaaaaagagctcgtgtttcacctgccttcctctttcagttacaggtcagttcacccggaagccaggggtcaccttagcgaggctctgactgaagacacaggtgtaggcaccagtgtggcaggaagcccgctcccactcaccacaggaaatgagagcctggacatcaccatagtcaaacatctacaatactgcacccagctcatccaggtaggatgtgtaacgtgggggaggaggggcgctgacgtgacagaaaggtgtgcatagcgtgtgtcttagctttgccaaggaaatgagagttcagaagtaagagcatgcggctgttttgatttgaaccaagtcaaaaccttgatggacacatctaaccctttcttaagcctgggttttcaacttcacgttaaacctagatctgcagtctatagtggttaccgggcagagtatggccagtgctcacatccaaagcaccaggcagtaaaggagagggattcaacagaagaagacgaaggtgccgtccataggcagagctggagaacagtgttaactagatagatattatggaatgtctagttcacagcccaccacatgttgggctaacagcaatgtactacagaagcagattatggctccccaaatggtaaatgagaaagtttcttctgtttaaaacagggtcttatgcaagccaagctgtctctcgaacccactgtatagctgaggctagtcttgaactcttgaccctcctgctgctacctcccaagagccagggttgcaggccggcttggagtagtaattttaaagagcaacgggaaggatcattcctccaggttatctatcccctcaccactcagtgctctcactggaacaccatgggtaaatctgtttaccacctgaggtgttacagccccagaagcaaaagcatggaaggcctttcacgggctctcagctgtcccgaatggggcactttcccagaggcctggacttaagggcttcctccttgcctggctgcttgtattctccctgctgtgatctgttcccagatggcttgggtgtacgtgaagcaggaaggaacacacaagcaattgttgtaaccgcagctttacagaaatcggcccctgagacaggctgcggtgagaagaggaagggtgaccctgtgccagccaaaacccaggaggcagggagagaacagagggagggcccggggctgggcttcccaggggctggacagcactaggcacacagttatagaaaacatagaagaagatgactttctctagcaaacaaatagctttctgagcatagtggaacacacatataatcccaggactgggcagatagacataggaggatccagagttcaagacaaaacctgggctacatagcaagacattgcctcaaaggaaggaagcacctgatgggaaaacggaggcatggaggtgctgtgggaaatgggctggctgtcaaaatccttgcctctggccagacctgagccctgtctatgtgcagagctgttgagtatttctgctatagccagagcatcctcgagcagcctctcgcaggcagttttccctgctgagcgaatggacccagatgtggtgctcatgcctacagtcccagtactggcaaggctgagataagaggatcgctactacacgtctgagaggccagcctgggctacagaagtagatgctgtatcaagccaagaaagaaaggatttttgtttccttccagctattcactgcttaccgtcacctgagtaagacccttttaggtctctaattatcttctctgactctgataatgtgctaggcaaaccgccagcctctgagaggcaaatagctttcttgtaagacctatgagaggtgtcttccatggagcggggaagtcagtcagtcaggatgctgctcctctagcagggccatgagggacagtccaactctcttgtggagcagatctgtcctaggaaaaaacaattttataggtaatcttcccttttttttttttttttttggttttttgagacagggtttctctgtgtagccctggctgtcctggaactcactctgtagaccaagcaggcctcaaactcagaaatccacctgcctctgcctcccgagtgctgggattaaaggtgtgcgccaccaagcctggcactatgggtaatcttatggagaaaaagatataagctgaaggagtgagaattacaatccccacttcccacttgttatcaccctacaatcctagtgtttcctaccacttggtatatataattgcaggaagttaaaaaaataaataaataaccggcattctgtgagctcactgtacttctactttagaaacaaggtttgtgtccactgtgcctgctggcaggaaagacatcggtgtgtaactgatactttcattttgttttgacttttattttgtagcccaagctggtttagaacttagctgtgtagctgaggctgaccttgacctgaccttcctgcctctacttgccgagttttgggactacgggcatacaccaccacacttgggtacttgttagactctggagtttgagaattccatttatctttagggttcgagtgatctagacagtgtggcatggcagtgtcattatcacccaggggtcatgcctgccatccctgcctaccaggtaacctgggcaggtttccaagggtcacagaaggagcagagccttggagcaacgagttgcttaggtcctttcctgtctcagagctccttttcctgcccccccacccccccccaacacaagtgaagccaatctctgtttctgtggcactgggccagttacttaccctgggtgtgcctcagtcacaaagtgttttctgtcaacaaaataggactcacttcatcaggtcaccatgagacatgtgtgaactagcactcgtatagggctcagaacggcaccaggaataccggcagcactcttggattacactgggatagctctaaccacaagaatgaccatatgatgatatcctcttaactttcagcttggaaacagggaaattaaaccacgcagtgaaaaacccaagcactcataaaaacaaatcctatactgctcgtcccccaggtcacagcctaaatgccctctgctatcttcaaggagacggaactttacatagaacgaagggcagggctgagggtggagtttatagcacgtatttgggaagctaaggcagggggattatgagtttgagggcagagtgagctacatagtttcaggccagtctgaagcacatggtagaccctgtctgaaagaaaaagagaggcgggggagaagagagagaagaaaatggaaaattcacaataaattgaagctctgccagtgagaaatctccagaatatgtaaaaagcttgaaagtaacaaaaccaggtgtgatttttctgacctgaggaacactgacaaactgggactaaaagtgcagcagagctctgcctctgcaacctcttcgggaaggatccggaggggaaggtcactgcccttgtcatcattaaaagggcttttatttgtcttgtcagcaaatcgtcttctctagcaaaaccccctttgtggcaagaagtctcttggagaagctgtcgaggcaggtccttgtgatgcagaagctggcagccgtgagtgacgagaacctcgggaacatcacctctgtggtggaaggtaagcccgccacctgcaggccatccctggaaccgaagcacgcccgaccacgcatgctcactggaactcagtggcgaggcagctgagtatactccagcctcagtctggctccgagcttgtgtctggtgcagaactttgggggacggttcaatgtgtgcgaagatcagacctcattccttagtagccatctaccttggtttttgaaacaggatctctcactagcctgaagctcactaggctagctagccagcaagcccaggatcctcttgtttctctctcacccctccctagcactgaggttacaagcactatgtaaccagctttttaactgtgggtcccggtgttcaaacccgggtccttgtgctttcaaggcaagcattttaccaattgagccattcttcagcttcacagcagaacatgccatggagtagatacccttgactttttgtgatctggccactggactctttcataaaggcaagggtttgtcctttttcacatcagatatgaatggaaacagagacttctgggaaatctgtaactgagcctgaacccaccctgaagttctcccgatgcatttctgcctctcttttctattcctgctaagagcagtgactttggcaggtaactaaatggtgggagaaatggcagacattcgggctgcaaatgagttgtgtctcgtgctctactacagcctcgtcctgatcacaggcacccacaagtgtgattgtgagcatgtgccacctgcccgtgctgtctgcttggactgacctgggagcctggggcagaggaaaggctcttccagcaaaccctgccgtgttccggcccctccgagggcttattctgtatggcgtttttgctataaagtcacaggagtttagtgtggcctccccaaggctgagcagctgtgccttgtctttgagaacaaacagctgagtagtcactgaggtctctttgctccagggaggaggggtttttctctggaccgcctaccaatccacaaagactgtagtagttccagtagaaaagcacagtcctagtgcctgtgggggcatatctaatctcatctactcaggacactgagaccacttcaaggtcagcctgtgctatagagtgagatcaaggttaccctgggcaagacatatttcaaaatcattagtaaaaaggttagagatgtaactcagtggtagtgcattcctgagatcctaggatcaatccccagtaacacacacacacacacacacacacacacgatgaaagaaaaaggaaagaagggaaatttgcctggggggggcggaggggatagacaagaagattgggaattcaaggttatccctttgtttgaggataaactgggttacatgagacctagtcttagataatgaatgaatgaatgaaaatattgttaaaaataaaacaaaataaaggtttttaaaaacacaaaagacaggctctaatgtccctgggacagcttaccaccagacccaggttgccatcatcctctcttcattaacatccctcttctcttccagccataccagaatttcacaaaaagctctccttgctggccttctggaccaaatgctgcagccccagcggggtctaccacagctccgctgcccgcctcatcaagcagctggaggccagcttcgccagaagcatcaacaaagactatccaggactggcagagccaggtacagaccgttgtgagaggctgtcctcccgcagcccaggggggatgaggccagcctcaaaagagaattacacgctctccaggggaaagatgggatagccagcttgactacaaaaaagatgctgagcatggagaatagcagcggtggtgtcttttaaagtactgtatccatcatcccccacctcccactcggctgtggcaaactgcctgacagaaacggcttctaaaggaggggtagactttggctcacatctcaggaggtactgcccatcctgtcagggaaggcatggcagctgaagcaggttggtgcaagatgctgggagcatgtggctggtcacatcagagatagcacccagaaaacagaagtgagccaagtgttaaccccaactgctcaccccatggcctgtgtcagccagttaacccccgagttccgatgtgtccacagcctcccaaacaggaccactggctgaggactagataacatctgagcccatgagagaagtttcccagtcagtccacaagtacttcgtgtctgtattgtttgtacagttgtccctcggtgtctgtgggtgaacagtgccggagcctgccatgcatggctgagtctgtgtttgctctcttacatcctttgcttacaccaagcatgggtttgtatacaagctccacacttcctcctccataccccagaccacttacaaggcttggctaggcaaacaccaaataaatggttgctgcattacattgcctggggagtggcagcatttacatgttcagtatagatgtgctttcccttgggttcttggcctgcagttgcttagattcatagatgtgcgaactcaggggtacagagggctttttcctgaacgtacctccaatgagaggatgtcagacggtacagtgactttcgaagaatggaatcctagtctatgcctacaacgtgagccagcaattctactcgtaaatacacaaagagaatgtacgcctgtctgtgtaagacacgcataagaagattcacagcccgagacacaacagacagaatctggtgacaactaaaatgccatgggcaaagggcgactccacagagactgtgttgagtaaaataaaccagacataggaagcgcatgctgtacattctgttgacacaaaagttcaagagcaggaaaagctagcttatgacggagataaagcttgggttatgaaagagggcgtggtaaagacctatcaatcaggagtctaaggccagccttgggtgtatggcacactggacatccacgtgggctgcatgatgctgtgcctcaaaaagaacacgaaaatggacttgaggttatttgttccctgttgggaggctaagtggctaccaacaggaaagaccccgagaactcctggaaggatgttgctcatctttcactccctgacttagacgctatcatgtgagtgtgggaaacagtgacaccgtctagctgtacactgcgcaggttagctcactttcagtgctgtaccttagacttcagtgataaacatgaattaatgagtgcaagtaccacaaggaaaaggtgataaaagatgaatgaatgaatgaatgaacacaagtaccaaaataaaaggtgaatgccctctggcgtgatggctcagcagttaaaaatcactggctgctcttccagagttccgttcccagtactcacaagacagctcacaattgtctgtaactccagtcctcggggatccaattccctcctgtagccttcttgggcatcaggcacacacagtttacattgatatacatatatgcaggtgagacacccatacacatgaaaatgaataaataataaaaagtttaagtgaatgcatgaacacaagtactatgttaaagatgaatgtacataagtgccatagtaaaaggctaatgaatattattagtacggtgataaacaaatgaatatataagttctatgatattcacatctgcttccacagtgtagtggttagcacattcatcatgaatagcatgcaaaaagatgaatgagtggatgagtgaatgaatgaaggagtgaatgaatggtcttgtttcttcagccaccttgtctcttcctttccagtgtttagaaccctggtgtcccaaatcctggaccgagctgaacctctcctttcctccagcctctcgtcggaagtcatcactgtcttccagtactacagcttcttcaccagccacggtgtgagtgacctggagacttacctgggccagctaaccaggcaaggtaggctgtggtctcccgtcctgttgcactagtgtctcagcctgggtcagcttgggtcttcctggtccatccggtctttagtgaaggtcgtcctccactgctgagctgaggcttgcctttttaatgacttctgtggacttttaacttcagtcaacttcctggtgttggagcgggagcttgctaagcacgctggtccccagcaggagttcactgtgaacaggaaactggcaagggaatggaagtctcagggctttccttcctttctcaacttgtttgctgtgctgtttgatgctgtgttttgtggtggtagaattcccattcgggatagacagaaatggacttcaaatgaaggctcacatgagacggcaggaagggaaatgagaaaagaaagtctgaggttatccgttcaagaaagatagaggtggtaggggtatggtaagctcagtccaccctgaaacatggccctttgaaggctgtacacattctatctgactattctttaggaatgcagcaggcactggccagggcctgaaggagcagcgggaatgggaagtgctctctgaaaccaggtagtatctggtatagcaccgcacagcagcaacttgtccagcttagatccaggttcgctctgctcttttccgagcattaaatcctgctgcagcgtggatcttgtttggcatcataaagaggtgacagttctgtctggcgtgggacacaggagctctggagaaagccttgcagctggcctgcctggcacagaagagtgggacagggagactgacttacagatgcagaacctcacggtataggcgtgacactaggcttgtcccgtgtggatccgttttccaggcagacgtctgaatgattcagagtctggtgtggcaggtcacgttcctcagtctcttagtgaggagccttgacaaagttcactcattcagcagtaggaatgtggagtgacggaggggaaaattctgtttaacctttgaaggattttgtgtttgttttcctgatcttgtctttggtttgttttatttaaatcttgattttcatcttaaattgtgtgtgtgtgtgtgtgtgtgtgtgtgtatgcctgtgagtgcagtaccttcagagaccagaagctggtgtttgttataaagggctgggagccattccacctgggtcctgggaaccagactctggcccagtgcaagagtagttcttaagtcatctcttaagtcattgtgttcttaagtcatctctcggctcctcacttttgtttttgttttgagacagaatctctagcccagactggactcaaacttactatgtagccaagaatgatcttcacagaaggtagtggggcacctaagctgaaggaagatttagagatgtggagctaggagtaaagggaaggacacgttagctgtgggaggcttggagagtcctggagagatggctcagtggttaagaacacctaccgctctaccaaaggtcctgagttcgattcccagcaaccacatgatggctcatagccatgttttggggcgggggataggggggaatgggatgggggtttctgaaagggaaacctggaaaggggaatacatttgaaatgtaaataaagaaaaatatccagggctgcagagatggctcagtggttaagagcactgactgcccagaggtcctgagttcaattcccagcacccatatggtggctcacaaccatctgtaacaggatctgataatctgatgccttcttctaatgtgtctaaagacagctacagtgtacttttatacattaaataaataaataaatctttaaaaaaataaaattaaaaagaaaaaaagaaaaatatccaaaaaaaaaaaaaaaaaaaaagaagaagaagaagccgggcatggtggcgcatgcctttaatcccagcactcgggaggcagaggcaggtggatttctgattcgaggccagcctggtctacaaagtgagctccaggacagccagggctatacagagaaaccctgtctcgaaaaaaccaaaataaataaataaataaataaataaataaataaaaattcaaaaaaaaaaaaaaaagaagagtccagccactgagccaataaggcaggttaaaattttgtgtgtgtggatgtgtgtgtgtgtgtgtgtgtgtgtgtgtgtatgtatgtatgtgtgtgtgtgtatctttcatccgtggatcagagctagctcctgggtgggtgaatgcctgcaacttgcttcgagctcaaagcagtgcagcaaaaactactgcttacacatgtgtatgacaccaagcccagtttatgtgagaaattgaacacatttccttttgtgcgccagtctctaccaacagagctgcatccccagccctccccttatctttaagtgcctttttttttgtttctttctttccttataaaatggatagttttacattacaaaaaggttgggaaacagatcaaatctctttcccccatttgtaaatttaattttccattgaacatgcactgttttagattttaaaattatatcttgtttgggctggggtaagtttgcttatttgtctgtctgtcatgtgtacttgtctgtttttgcagtaatagggtcttaaactcaggatcccctggtggacaagcattgtactcacagctgatgtccccagtgtgattatgccttataaattactatatcttatttttaacttaatatgctttgtgctgttaaatattaaccatttaaagcattttattaggtcttttttattgcccttatatttggatcctgtgtttttatagtgtcaaatgttttctgtgatttgtttgttcaactgttttttaatcctcccttggggatttttattggtgtccttacttacaaagcagtggaactatcagacatccacagcaaagaaagcaggaaattaaagcaaaaatagctagaggattctcacctgtattcactatgggaaaggcatgactgatacaagaggtgaacttggcttttcctttcccatctatctccggtgtccctggatagacacaatctcatcgttacgttttagagaccaagagatatctagttagatagctgcatatctagttagggtttattcatggaatatggccagtttatcccagtggaactcagattcctgtagttcatcacattgtctctaaattccaatagagtcagtgacattccccacctaggcctgacccctcacctaggattaggatcttggcatagagacagttgtgttttctatgaataataatgaggtggcagataatgtttctttatatttcttcattgtatatccacatttgactatttaactcatttgtatgctactagaggatgaatgcctataagtgcagctcttgggagtgagaggcagcagggtcaatagtttcaggttgtctttgctcttggctagcataaactattgtaaaaccctatgttaaatttaaaaagagaaaagaaaagaaaaggccgggtgtggtggcgcacgcctttaatcccagcactcgggaggcagaggcaggtggatttctgagttcgaggccagcctggtctacaaagtgagttccaggacagccagggctacacagagaagccctgtctcgaaaaaataataataatactaataataataacaaaaaagaaaagaaaaaaacagaaaactatatatttctgccaccatttcaaagtagaaatttaactttacatttttcttacaatttgccctcgttataattatttaaactattgaccttttcacagtaatttgaaataccgcctttatcgtagactaagtttttacacacacttgggtctgctttcactgaagacatgcatgacacacttgtgttctcaacaatcgcgccactgtgctatcacaacatgagctatggctcctccccttccagttgccatggttcagactctgcagtcactgagagatgagaaactgctgcagactatgagcgaccttgcacccagcaacctccccgctcaacaggaagtcctcaggacgctggccctgctgctcaccagggatgacaatgaggtcagcgaagctgtgacactctacttggcagcagcctccaaaaatgagcacttcagagaaaaggtaggatactaaacggtgggtatcaaggcttaactgcctgtcatttaccgttagcatgacgctgggctctaatcctagctaaagcaggaggattgctgagaattcaaggtgggcttagaatggagctacttaccgtataggattatactagggttatcacataattttttaaagatttatctatttattttatgtatatgagtacactgtagctctcttcagacaaaccagaagagggcgtcagatccccttacagatagatggttgtgagccaccatgtggttgctgggatttgaactcaggacctccagaagatcaatcagtgctcttaactgctgagccatctctccagccaccaatttttaaaaggatatttcaaggtgactagaagggaagaatccaaagcttcccaacccgtagatatgatgagtgtgaggagtgggaacgccggtgggagccgtgagcaggtgagcagagtgttgcatcttatcttcagttactgccctctaatctacataaagctacatagctctgtttttaaaggcaaaagtggtatggtttttagaataaaattcaccaaaggagaaaactgattattaaaataaaatctataatcataactttgcatcttccgtgtctacatctacagtctggtaaaaaaaaaaaaaaaaaaaaaaaaacaccaatcgactctttaaataaacttgtgaacttttgtggttttttttcttaccctggaaattgtgtgaaaggccatgctacggctcacctcaaagagatatatttctgtgtttttttattattttagaatacagaaatgggtaacttttttttttactttatttttttgctaagtttgttctttggtaatttagtgtgcatgtacagtgcatgctgagtatactcacccccaccttctcttgtctcctcccaccttggtcatatctgcctccacccactggtcacttcctctatggcttttttccttgaccctttgaattttaaccagggttgtatgtgtacccacggccttggaactgcaaactactgaacagatacaccattcagaacacagctgaaaataataatcctccccagaatccatcgataaccaacatcgggagctagaacctcccacgagcccctccctgatctaaacctggcaggcccagtcttgtgcaggcctagcacccagctgctgagagatcatgtttgcaatagttaggtgatgccctgacaatagcgttttaaagccgcctccctgactcccaatgcttacgttcttttctgccccgctgtccgtggcatttccgcactttggtgcgggtcattagattccttgagactgaagttacagctgattgtgaactgctatgtagatggtgagaaccaaacctgggtcccctggaagagcaaccaatgttcttctgggacgcctctcactggatacccctgcctagcttggaatttctgatagagaccatgctggcttggaactcaccaatcagatcaggttgtccttcattctctgcatgcacatcacatggtgcacagacatatacataggcagaacaccatacccataaagtaaaactaaagtgggtttttagaaattaaaaatctacatagcacatatgggagaagatattccgtatccccctacaccaattacctcctttgttcttacatactatattatgtaatatatattatatactgtattatatatatgtatgtatataatgtatagtatataatatatatgtatattatatatatgtatgtatatatatgtatgtattacatatatattatatactatattatactgacaaacaattcaaaatgtctcacacatctcttcttccccttcaggccttgctctattattgcgaagcactaacgaaggccaatctccagctacagaaggcagcatgtctggccctaaagagcctggaggtaaagctctacagccccacccctgtccagactcagagcccccatccctggtcaaccttagagcaacatatgtctgtgaagcttagaggccacaccatgtggacctatccagtgcttgccatattcaaagccatattcacattctctagtagtgtagcagtgtctctcgtctccctggagccacctagtcaaggtcctttttccccttgaacatggactacatatgacttttgttaaattcaccaagtaggaaataattactgtttagccttgccacactcagactgcatggtgattgtacctgactgttctgcagtggtcactgcactagaggagggaagccttggtgagcagggagagaggtaactgcaaactcgagggggcaaaggctacagatctccaacagaagtgtggctctccacgagatctcatgtgtgaccgtctttgccacagaaacactaggagaggtgccaggaaaaacaacgagagggtcaccccctagtgcttactaaaaccttagatgggcacaagggactgatgtcataaaaggaaaagctaatgacctgtgaagaaaaacaaccgtgggaaattttgccttccttgttacttggtcaaaaaaaattacctaccagtgagcttcccccctcctccccccaccccccaaaaaaatccccattggttaagaatttatttgggcactctcctggtgtgctgtgactcatcgctgctgagcgtctccctgtctctgctacagactttacacaggtagacacgtagggtgcagcagcctatctgggttccactggacttgtgtgctgtgaaggatgaagcaggagccctggttttaaccctggtgtagctccagctgagagcacctcgtccctactctatcctttttctcctcccatcctccccaaccccccaaatgcagtcccttgtggaaacagaagacttctttgtgaaccaattcttcacccgtcccgcccccagctcgaaaagaattctccaccacatgttgtttcaatccaagcacaagagttctaaaatgagggttattttagaatcgatgggatcgagcataaagaattagctgtttagtcacctggaagactgaaggtctaagtgtcaggcaccgatctgttttccctggcaggccaccgaaagcattaaaatgctagtgacgttgtgtcagtctgacactgaagaaatcagaaccgtggcctcggaaaccctcctctctcttggtgagttcgtttttgtgtgctcatttacttctgatattctccctggaacctaagggaaggttcgtgtcatctgctttaatggcttcctccttgcctgtgtactccctgctcctagaatagaagaaatcgattgtgtccagatcttgcaccttgttctctctgcacaggaatcagggggctttcaccctccaaggcttcataggtcctgtttagaatcaaaacgatgatctgacagtggtcactcatacctggtaatccagtactgaagacgaggaggcaggagaatcacctcaagttcaacgacagtttagactacacagtgagaccctttcatgaaagccaaagtgttaggacctggagcacagaagacaaagaggagctgtagagatcccagcatggctgccagtgtggagatggcatgcccaagtcaatggcctgagctctgcagtgcatgctgggcagctgaatgcctcgcctgagctctgcagtgcatgctgggtaccagagtgcctcggcctcactgtgacctcttcctgcctgctggcatctcattctggaatatccagatagccctccccttcactctgtaaaggtccatgccttttgttgttattgtcgttgttgttattccatttgggtagacactcgagataagaatatcaaagacttgctttcccctttcctgtttttaaaggcaggcgtgccctaaaaaataggcctgaacttctgatcctcctgcctccacttcccaagagccagccatacaagtgagtgacatggcctctgatttatttggtgctagtgatcaaatccaggattttgtgcatgttaggccaatactccatcaacccatccccatccccagccatcaggaaaatctctcaatcaaaatctctctctctctctctctctctctctctctctctctccctctctctctctctctatgtctctctcggtttttttcgagacagggtttctctgtatagccctggctgccctagaactcactctgtagaccaggctagcctcgaactcagaaatctgcctgcctctgcctctgcctctgcctctgcctcctctgcctcctctgcctcctctgcctcctctgcctcctctgcctcctctgccgcctctgccgcctctgccgcctctgccgcctctgccgcctctgccgcctctgccgcctctgccgctgcctctgcctctgcctctgcctctgcctctgcctctgcctctgcctctgcctctgcctctgcctctgcctctgcctctgcctctgcctctgcctctgcctctgcctctgcctctcaagtgctgggattaaaggcatgctaggattaacaccaccactgcccgccatggaaaatctctcttaactctgcatcaaatagacaattgttgtcagtagctcacacctgtaatccaagctctttggaggtagagacaggaggcttgccacaagtgtggggctagcctgggctaccagtgtgggctacaaagtctctgtcctcacatatacacacagagagaggaatgggaagggaggggggaagaggaaggagagaagaaaaggaagggaggagaaagctatagaaaatgttactatggtcatatgctctaaattctaaaagtctttaaacctaaccctgccaatgtcacaaagaaaaaagccactctggtttgacaatacatcttaaccatgtgaagaagatttatggttattataaccaccatgaaaatcccattattttgagcccttctttcttacagggatgggattaataagacttggcgctgctgttgaatacaccattctttgtagaggaagcttagccagcccatgtttgtttaaaggataaaatagttattctctatggctgttttagataaagaagttatttaattctctaaaatgtacccagggtattagtggcgtaatgtcttttatcccccagggttctgaaataacagtgaagatttaaaaacaataaacaatagctagatgtttataaagccagcatctctcttcccatggtaaactgaggagggggtaccctgtggcctgtactgcaaactcatttagctgcactccaagatgcaccccaggaatgaccaacacatctgcttccaccaccctttccacgacgctcataccacccaggcctccctgccctcttcaggcttctccacttgctgcatccccaagtctccagggaagcctaatgtcaccgtgcctctgctccacctcataaggctgctccctgaggtctccagggcgcctctgcatggggactttaaaaccttctaatatggagtagagttggaagaccccaccccaccccaaatagtgttatgactcttccttgacccctgatgcatggctactgctgcacttttcccacagaagcctgaattcatacagggctcgagtattcccaatggcaacagagaggacaccctatgacaaagggctggagtcatgacaagcactgagagggacaaacagcagctcctcaccaactagtgcatacttgcttcaaccttataaccttcttgatatctgagagaccctctgtgcaatgggagtggttttttgtttgtttttttgttttgtgtgggtttttttgtttgtttgcttttgggggtgttggttttttgtttgtttggttggttggttggttggttggttttagttttttggtttttcaagacagggtttctctgtgtagctttggctgtcctggaactcactttgtagaccaggctggcctcaaactcagaaatctgcctgcctctgcctctgcctcccaagttcttaacatctaccatccaaaatagcatctagtaacagcatccagtgcttgctcagttcaactaaaaactcaagttccaacttttgagcggcagatgtaactcagtggtgagcacctgtcaccatgggcaaggtcctagctttgatcccagcaccctgctccctccaaagtctttatttaattctatttccattttttgaaacaatgatttgtggtattttgcaagggagagtatgtacatgttgggggcatgcctgccagggcacctatgtgaaggtccttccagtatgtaaatccaaggagttgaactcaggtccccaagtttggtggcaaacatcttcacccatagccttggctatgccagaacagctagcaagatgccctgggggacagctctggttgtgccactgtatcagtaaaggctgactatccctcgtcccagatgggttccatccaaagagcttgaggttgtattgccttttttttttaagtttagaatattagtatatacatgagataccttagaaataaaacttaagtttaaagatgagaattatgtgttatgtaagtgtttatgcctacgctgaaggcatttttatgtaacattttacatttataaacatttaactacaaacctatcctgtccaaggtgttggggtccaggagtcaccacacaaacactgatctcagttagacagggatggtttattgaacacacatctaaagactgatcagggcaacagctaaggctctagagctcaaagctgtgtgctggacatttatcagggccagcttatgcaaaaaccacaatgaggtcatacgcaggggatggaagtgttgcctggtggtcagccctggctcaagccattttagacataaaagttcatactggcctttaatttgatgggtcctatgtgaagtttatagttgtgcaatttcgtaatattaacaaacctcataatatatagaacataacaggacatgtggtcagcatgaccctgttctgagtcaagttatttttctgtgccagtgactggcaggcatgttacagtaacaatatgaagtagctggtgggcatagaacaaaatgtctgtggctatgctagggggacgggcttcaggacaaggggagcaaaggctctcacctgtggggtcttcccagggctcacggatttgaatgctgaagcatttggacttggggttttggggttccaggtgcttggtggcacatgtagaggactccgggatctattttgagggtctgtccttgtccgaagccactcatgtcggtatattcccagcattgtgttaaccagtgtttcccttcacatgacatacgagttctacacagctgagccttctctctggcccgatagcaatgtctgatatagctaacatactttgcaaatatgttttgttactattttaaaaaaaaaactgattaaaatgtaggcatatgagggctgggtgtgaaccagggacaacgttcatattacagagtgagccagagactgccttggcaacactgaaagtgggttaaatcccactttgtctctctaagaaagctgcattctatctatctctatgcttcactttccccgttgacctaaaagaacactggggacttattgtctaaaatactgtgctagggctgggcttggtagtgcctgcctgtgatcccagtacttgggaggcagaggcaggtggatctctaagttcaatatagcttgatctacagaacaaggtccaggacagccaggtctacattcttttttttttttttttttttttaaagagaactatggattgaacccaaggtctcctgcttgctaggcgagtgcactacaactgagcctgataaatcaccccccttttaaacatttcattctgagacagggtttcactaaatggtccaggttttgattgaactggtagtaattctcctgcctcaggctcttgtgtaggtaggattacaggtctgtgccaccacacctggcttttatttgttttcttatgacagccttccagtgtcaccaaggcaatctctggctcactctgtaatatgaacgttgtccctagtttatccccagccctcatatgcttactgtttgtttgtttgtttgtttgtttttcgagacagggtttctctgtatagacctggctgtcttgaaactcactctgtagaccaggctggcctcgaactcagaaatccacctgcctctgtctcccgagtactgggattaaaggtgtgtgccaccacactcggctcctcatatgcttacattttaatcagttttttttaaatagtagcaaaatatatttgcaaaataggttagctatatcagatgttgctacgagggtcaggagacggctcagagggtaagatgatagctgcacacctctgacagcatgagttcagtccttagaacccattcaagaaagacgaagcacacacatctgcaataacagcatcccaagagtaagatgggagatggaggcaagagactcactcagaagcccatggaccagctgctgtgaagtatgcagagtagcagcagaaacatgagggaccttgcctcagtgtggaaggagagacctgacaccaacatgttgtctctgacctccacacgcatgcagtagtgtacatgcacacatgcacaatacgtaaataaaccaaggaggtggctataaacaagactggatgatctactgtgtgttagagggtgtattagtcagtggtctctagagtcatagaacttacggttagtaaggaaatttgttgatgctttacagtctgtagtctaactcccaacaatggtcagcagcagctgtgagtggaagtccaaggatctagcagttgctcagtcccacaaggcaagcaggtgaagaagagagaatcttccttctcccaatgtccttatgtaggtcttcagcagaaggtgtggcccagattaaaggtgtgtgctttgtcccagatgaccttgaatttagagatctccttgccttagtcttctgggattcatagtcactatgcctcaagatctccatgccaagatccaggtcagaaacatatatctcctagcctcaagatcaggatcacagatgagccttccaattctggattgtagttcattccacatatagtccatttgacaaccaggaatagccactacagggggtaaagactatagcggaaacttgaaagcctaacttttaccattagtcacatggatgtacataatgataggatgtaaaatgttgtgtgtatatgatataatgtaactaaaccaatatagactgtattcaagttacataaagattcaatacaatgaggtcaaggattaagccttactaaagtccctaaaacactaaataaaaattaacctggcatgtacacttggaagcagttggcacaggcttgtactttgttttgtgccttgcctttcatctggtctctaatgttaactcaaaggttcttggtggttctaagcgttgcctagaaacccataatctagtgaagaataatggaaaatcacttttccttaacatagtaactagctaagacagcaatgcaacgctgaaggtgcagctcagtgggaaagtgtttggtctaacatacatgagggtctgggttcaatccccaggaactgtgcagaaagtttccatagcacagttccatttcattctgtgtgatgcatatgtaatgtagtcgtgtttaatgttccctatccaggagaagacgggcgactggcgtacgagcaattagacaaattccctcgagattgtgttaaagtgggaggtcgtcatggaaccgaagttgccacagccttttaaatttcacgttaaccctgcctgactgctattccgatgatacctggcccctgttctcaagagggtgctgtgatgtggccagacagcagagagctgctgccgctgccaagacggagatgtccaagtccaattgcactgtactgtctacttttccttagcccacagaacagggctgtgtataactccctggactgcatcgtagttttgactgacagcacttcaaagtagagtttgaaagtagtcatctttatgcctttgtggaagttcatctgtaagcttgaattcttcatgtgctatttggatacatacatatcgtatgccttgccgtctttctgctgtgttctcagggttgagtggccccttagttaccgaattttattaaacagacaaagcacaaaaggaatgtactgcaaataaaagttgttgttttttttttttatttttacagagcctggcaaaagtgatcagctataagacagtaagttttggagctgagggtgtggctcccttggtagagtgctagcctagggagcaggaagcttgggtctatccccagcactgcacaagctggctatgctgcgcatataaaatcagtgctcagaagagaagaaggatcagaagaagttcaaggtcatcttcagctacctagggagttcccagggcaacctgggatacatgaagctatgggggttgaggagacctaagttttctgtttttgtttttgtttttgcttttttggttttttgagacagggtttctctgtgtagccctggctgtcctggaactcactctgtagaccaggctggcctcgaactcagaaatctgcctgcctctgcctcccaagtgctgggatcaaaggcatgcgccaccacgcccggctgggacctaagttttatagcttagttttttatagttcctactatttgtttctatttccatcctgagaatcccatatcatctatccatgtggtttaagagaggaacggaagaattctgcttcgttgaggttgtgcctatactattaaaagtaagcaaaaccttaagctttcgttctttaaccagagccatctttatcacactcttggttttttgttgtttggcttttgttttgtcttgaaacagagtcttcctattgtagtcctgaccaacctggaactcaatatacagtccagcctgacctcgaacttgcaagggttctccagcctctgcctccagagctggggttataggcacaagccactaggcctggttctacatgtgtaatttttttttctaagacaaatacacacgcctaagttgtagattcagaaagatgtatttctcttttaagtgaaaacctggactttggatgaatcctaagtcactggactacattgtagttgtgactgacagcacttcaaagtccatcttaccttaccgtagaatttgacactggacagaatattgaggtactgaaagtggttcctgcttctatagaatagccatgaaccttggaagcaggatgccctgagagatggaaactgccccatagtttccacagcagctcagtaccagggtagagattcagtctcttacaacgtgtgcaaggagtggggatgccaagacatcacaataatatgtgtgggtgcaatgtgaactgtattctggatgtgtttgtataaaataccaattagatattagttccaatatttacatttcagcaagacttttaaaagttcctttcattttaaagtgaaaattgttcgctgggcttcttgcaacacatcctttcaactgtgaagtcccactgtacatatctgtatttttgtaaatgttatatatatgcatatatccctcattttaaaagtatgttgtacagttatagtatgtataggctacagtctttgttaaatggttgaaatgtctcttttgtagaaagtgaaatcacagctattacagggcttttgtttggtttatttgtggatttgaaacagttttgaatattgcatggataattaatttcacatcttttgtatccacctctgtgtctggcttttggttgggaagtgcttttaggtttgtgatatttgtattcatccctctttcaatcatgtaagtcaaaataaaaattatttttaattactagtctagtgtagaatctgatatatatttatttatcatttttatctgttactatgtgtgtgtataatgtggtgggggaggggtatacatggtgcacctgtggaggtcagaggacaaccctgtggtgtccattctttccttccaccgttacgtgggaccccagaatcaagctcagattgttttcaggtttatacagcaagggcctcactcaccgagccacctcatggtccttctctgttttccagtcccttccagagttagtatttatacaacacactactcctcattgtctactagagcttctatcctgaagtgaaaagcataagggaattttgtatcccgacaaagtagcagactggagtccacaggaggaaagcaaccacttaaaacaccttcagactgagccagcagccttcctgccttgcctgagtgatgctatcccaccaaaaccagccttccagtaagtatcaaggtctttacttagtgaacgttctagctaggcctctgcccactttgtattggtctttgcctctcatctatacccaatataggttcactgaatacactcggagtttcttctcccaatttttaaaaaaatgtcttgatttagttgcatatgtgtgtgaatatgtacatgtgtatgttgggctttgcacttgtacacacatgaaagccaggagaagtcagatgtcctctgtccctcactgcctattcttttgaggctctctctgaatccagggttttgatcatttgtctaacctaggatctaacgagacccagcaatccctgtctcctcacccctcctcagacctgaggttataggcaaatatacagtgcccacctgggatccaaagcaagcgctcttaacagctgagccacctctccagcctgttccctgcccaccctaccctggtttgagacaaggtctttatagctgaggctgcccttgaactcattatgcagcagagaatgacctcagcgggagcttccattgagatttcagaagaaaaaaactgaagcatgcatgtgtggcagtgtaggagtcctgcgaggggtacccacccaccccactccaccccactccaccccacccgaggatgacacctcatgaaactgcaccgaatgaatccaaagtctgcagaggaagaagttatgacctgactgtgtcgtgtctgcccaagaagccgcaagcagtaggcagagccaggctgagggagcagccacctggttggcaaggctttttttggagcccacatcgctgtgtcctgtatgttggccacgaagctggaagacctcatgttttctctgcgggggttttaccttcacctttgatccttccttttggtaccatagtcctcccttctggaatgggaatgtaccactgtagtttggatttggagctgaccaccaagcagcccttcctgcagctatgtatgagctcactgtttttttgtggctgacactgaagaatgcgactaataagccaaaaagttatgattataatactcatgctttgttatctcaatgtctattttatgaggagagtgagaatggaggttcccagaaaagaagctgcactgcacgttaaacatccgacaaaggctgaccagctaattaggactttaatgatcgagggtgctgggattcaggggattgcctcccccccccccgcatcccccccccccacacacacaccacatccatcaatctcagtcaagcaaaaacaatttactgaacgctcaccataataaatggactgcacgttcaagatcacaaaaagaattaggagcctaattgctgtatactagtctgctctcaaggtaggctttttataggaacaaccaggttcaaaagtttaaagggcgaggagggaaacagttggcttacgaggcaaagtattatcagctaacctttcagctgattggtcctgagtaaggtaagggggttggacacaggagtttcagaacattgagataacaaagcatgagtattataatcataactttttggcttattagtcgcattcttcagtgtcagccacaaaaaaaacagtgagctcatacatagttgcaggaagggctgcttggtggtcagctctgactcaagatagtttagacataatagttcatactgacctttgatttgatgggccgtacataaagctttgtggaatttcttaagattagcaaacctcatacagaacatacagaacaaaacggggtgtgtggtcagcgtgtccttgagccaagtcacttctctgtcccaatgactggcaggcatgttacagcaacaacaagaaatagctggcaggcactgaaaagaatggctaaagatattctaggggtgcatgtcagatcataacagtggggacattggaatgttgtaggtctagaacctaattacaaagtatctagtgctagctttagcccccttgatagccatttattgttagctctgtgtatgacctaacatgtttgtgactagtggataagtctttttagaatgtacgaacaaatccctagcttccaccaaccccaaaactaaggatgtcatcagaaatacctgaggctacacagagggactataatccaccctcccagatgttccaaccaagttatttggaaagcatgctgatatatgacttaatctgttctgttaccataaaaagtttgtaggactgttatgttggaacctggtatttgagataacctaaatctgtgtgtccagcacatggtcatttgtatttatcccccaaataaactctttgtcccctttgagatgagagcttgtggtttttgttctgtttgttgttgttgttgccattttcattaatatgatgtatgagcatttgggaatacaagttacatttgcttgtttgtttggttagttggttttggtacagggtctcgctatatggccatgtctgccctcaaacgcaaaagattcgcacgactctgccttccaagttctggaattaagtgtgtaccaccatgtcctgttagtttgtaccttaaatacaccccgaaggctcatgtgctaaaggcttggtctttaacctctggtgctactgggaagtaatagatttagaactgtattctagcagggatatgttaggtcactgagtgtggcatgctgggacctggccccatcctgtgtctctttgcctcctggccaccataaaataaacagcttcactctaccacatgctccctgccagccccatggtctacctttctataggatcaaaagcaaggggctgggcctgatagcccacacctttaatccaagtattcaagagggagagccaggtggatctctatgagtttgaggccagtctgatctacatagtgacagacatggtgattttcaggccagccaggactgtatagaaagaccctgtatctaacaaacaaacaaacaaacaaaggcaaggaagctagctgactcagctgactgtagacctagcctctcaaactgtgaattagcatttctgccttgttgattgttcctctcagatattttatcacacgaggagcttaaaaaccagatcctctaacttctctcttgttcaacagcacttgctacatcgtcgctgctatgactggcaccagggactgggcaccagatgtgcagctgtgagggcaaaagacatacaatagctgcccttgcaagacacattgtctggccaagaaaagataatgaaaccaagaaagaaaaaccaatggctgtaaaacattaggttgaaaatggggactgtcttagggtttcattgttgtgaaaaaacaccatgaccaaggcaactcttataaagaacaacatttaattggggctggcttacagtttcagaggtttagtccattattgtcatgacaggaagcatggccccatccagacagatatggtgctctagaaggagatgagatttctacattttgacctgaaggcagcaggaggagactcttttgcaggcagccaagaggagggtctctctactctgggtagagtctgagcactaggagacctcaaagccttcctaaacagggatacacttcctctaacggctacccctcctggtagtgccacttcccatgggccaagcatattcaaaccaccacaaggatataaccaagcattaaaacaaatgtttcacaagcttgaagctctgagtttgaactctggttccaaagtgggattggaggaagggaggttgcgtaggaagaggcaaagtcaaaggtcataaatttaaagaccagaaaaggcatacaaaaaggtatggttgaaaactgaacagagaaagcatgtagattatctctggaaagaatattccaggatgctagagagatggctcaagagttaagagcactgctgctcttccagaggacctgaaatcaatttccagcacacaaggcagctcacaagtatctcacaccctcttctgccctttgggggtaccaggaatacatacggtatacaaacacactcaggaaaaacacacatacacataaaataaaaataaatgttaaaaaataatattccagaggcaagaaatacaaaggctttgaaaaagtaccatggttgatgttttaaatttttctatactctttatatccttatacttttatgtaacagaggtacatagtcaaggacattttctgatttatgggatatgttttgaaaaatagagccaaaagaatttggtagggagttggaaatggaatagaaaacgggcttaggatgagttcatatttagcctgaacaagaaactgaaaagatagaatatctacagaaacccctacagcaagaaggaaaaaacccaggagctattttagacatgataaagcttatatccaaagataaagtttttgaatgaatatgagtctgaaattcaggtgagaagtcctactaaaacattataaaattgtggcagagtgcggtgtcttttatctttagtcccaccacttgggagacagaggcaggtggatctttgtgaatttgagcctggtctacagagtgatttcaaggatgaaacagatgatagatagatagatagatagatagatagatagatagatagatagatagatagatagatagattgatagattgatagatttatagattgattgatagatgatagaactgcgagaggctgaggcaagtggataagcagatctctatgcattcaaggcctgcctgtctgcatagcaactcccaggccacccaaggctacagagtgagactctgtctcaacaaataaacaaaaccacacatacatacacacacacacacacacacacacacacacacaccccacacacaactgagcatcagagcataatcacagtgcctgatttactaagacagtgaaatcaaggtctcaggggttaagctgtagaaatagctcagtaattaagagaacttgctaccttccagagggccccagttcacccaagtcagacaactcacaaccatctgtaaagtttagcttcaggggaatccagtgtcctcttttggcctttgaaagcacttgtactcatgtatggacacatacacacacacacacacacacacacacacacacatatccactacatcaagttcaattacactaggacatacaccttgcctctaagtatttgtatatattggagttggggatttggagtgtgtgttttgagacaaggtttcagttagttaagtctgcttcagactcactacttttgcagtatgtggtataggtatggggtgaggtttatgtgagcgtacctgtgggtgccggcagagtgtaaccaaaaagaaaaaaaaaatctttaggggccggagagattgctcagtgcttaagaaaactccatgttcttgcgaaggaccctggttcactctatagacgtccatggcagcccataatcaatctataactgcagggaatccaatgccctcttccaacttccaagtcagaaggcatacatgtggtatttagacatacatactggcaaagcttatacacataaaaacggaaaacgagacaaatcttttagtttaaaaaaaaaaaaagatggaacttgcctagggttccaaatctacttctggccagtgcctgcacattcctgtgtataaccccaactcacagccacacttgtagagaccttgtctccaaatgtgcgtttgtgtgtgtgcgtgtgcgcctgtgtgtgtgcgtgtgcgcctgtgtgtgcgcctgtgtgtgtgtgtgtgtgtgtgtgtgtgtgtgtgtgcgtgtgtgtgtttgataggggctgagagagtatgtccttgtgtgaccctgatgcagtgctgtacacttatggtcccagctgacttaactgggaggctgataccggagaatcacttgagcttgggaatttaagatcattatagtcaaatggcaatgtccggtctgaagacaatctaaacacatgaaattgagtgttcaggatgtagccgttatttaaagctgccgtgtgagctcagctgatctatccagaggaaagatggaatacacagaatcaagagtggtttgggggctggagagacggctcagcggttaacagcactgactgctcttccagaggtcctgagttcaactcccagcaaccacatggtggctcatcaccatctgtaatgagatctggtgccctcttctggtgtgtctgaagacagctacagtgtactcgtgtacataaaatgaataaataattctttgaaagaaagaaagagagaaagagaggaagaaagagaaagagagagagagaggagaaaagaaaggagttgttttggctttttgggacaggatcttgctatatatggcccaagttagcatcatcgtactcaaaggcctgttgcagaagcttcccaaatgcttgaatgataggtggataccaccacacccagctgaaagacttgacttaaagcccagatccttgtatatacaccttaggggatctagttggcgatgtactaagggaagaatagaggagtagtgtcttttaggggattgggagaagttagctaccaccacaggcacagaaggaaagaagacatgggcagacaggtgggtagatacaacggaagggacagatgattctcttgatggcttcagctctgtcatcaaaacgggaaatctacgatgtaaacaaaaacaagccttgcaggtttcagaaaaagccactcagaagctagtgggcagatcaaggagaagaaagtccccagtgagccagcataagacagttgtgagctatgtgttggggtcccagagacgctcaggtggcttttgttctagtcctacggggcctggaatgccaggctaggaacctcgtgtttattgcttctggcccctctgttctttttgttctaccaggttgccaggcagtgccctaaattccgttctatctccttgcggggcagtgctccagtgctactgactgaactccagcctcgcctacacacaggagcaccaatgtcctatgagaattggggtatttgtggacggatttgcagtatttgcagtcagacatgtcaactcttcagaaccctgtcggagagcctcagaagtttctgggataataaggtgaagagacggttttttgcttcaccgcaaaaggaagaggtgccaacctccacggccgactacatttttcacagagaaaagattctggagcttggcagcatcctgaagaataaaagactatcccttgataagagagctcaggctgcccagaaaatcggactactgtctttcacaggtactgcttcaccactgtgctaacactataggtgcttcagtctgcttctgctagttagagcccagcagtttagtggggattattagtgttgtttatcatcatcaccaccaccaccaccaccatcatcatcaccatcatcatcaagatgtaattgttttgttttgttttgttttgtttctttttcgagacagggtttctctgtgtggccctggctgtcctgtagctcctgctgtaggctaggatggccttgaactcagagatctggctgcttctgcttcccccatgctgagactaaaggcatgcactaccatgcctagctttgtgatagaattttgatgacatatataagtaccaaatattttcttgttatagtttgtaaagtaaacagacagacaggcatggcactgtgcatctataatcacagggccaggagtggcgttacacaactgttatcacacagccaggcatggtggtacacatatatattcacaaagccagatgtggtagtacacatctgtatttcc

SEQ ID NO: 366 - DNA, 3543 bp, Mus musculus
agagctaaagtggctcccgtgtgtcctaggttgtgagtgccttcagctcctggtcttcccacaatgcaattccttgaccctgaggatcttctggatgaagaggatgacatttttggcgaaggactgccaaccagactcccagaaatcatgctggtgggatcccagtccttctctcctggcgggcccaatggcatcatccggagccagtccttcgcaggtttcagtgggctgcaggaaaggcggtccaggcaagtgctgggtgctcctcctgggatgcagcagaaagggactgtgtgtaactccttcattgaaaatgcctcggctctcaagaagcctcaggccaagctgaagaaaatgcataatcttggacacaaaaataacaacactcccaaggagcctcagccgaagagagtggaggaggtctaccgggccttgaagaacgggcttgatgagtacctggagtttcaccagacggagctggacaaattgactgctcaattaaaagatatgaagagaaactctcgcctggtagacgagctctatgaagcctattgtatccaacggcgtctccaagatggtgccagcaaaatgaagcaagccttcgcgacgtcccctgccagcaaggctgcccgggagagtctgtctgagatcaaccgcagctacaaggaatacacggagaacatgtgtgccattgaagcggagttggagagtctgctgggagaattctccatcaagatgaaaggtctggctggctttgcccgcctctgtcctggagatcaatatgaaattttcatgaagtatggtcggcagaggtggaaactgaagggcaaaatagaagtgaatggtaaacagagctgggatggagcagaaaccgtcttcctgcccctcatagttgggttcatttcaatcaaggtcacagaactcaaaggactggcgactcacatcctggtaggcagtgtgacctgcgagaccaaagagctgtttgcagcccgaccccaggtggtggctgttgacatcaatgaccttggtaccatcaaactgaacctggaaatcacctggtatccctttgacgtggaggacacaaccccatcgtcgggccctgggaacaagacagctgctctccagcgaaggatgtccatgtacagccagggcaccccagaaacacctaccttcaaagaccagtccttcttttcaaatctgccagatgacatctttgagagtggaaaggctgcagaggagaaaaggccactgtccctcagcttcagtgacctgcaggatggagactgtgtcttcacctccagctcagccacctccccctccagttcacactcagcccatccagagattaccatcacccccgcagagcttacccacagcagcctgtcctcacaaaatgagggcaccgaggacagcagctcagcgtcttccaggaattccttgggtgaggaccatgagcccaagtcccacccaaagagtgatacggtagagcccgggaagccgggtgtggctacaaggtctggtaccgagagcctgtttctggagagtagtgtggccgaggctctcctgcaggaatcggatgaggcctctgagctcaagcccgtggaactggacacttttgaaggaaacatcacaaagcaactggtgaagaggctcacctcggctgaggggcccgtcactactgacaagcttttctttgaaggctctgttggtagcgagtctgaggctggccggtcctttctggatggcagcctggaagatgccttcaatggactcttccttgcattagacccacacaagaagcagtacaaagagttccaggatctgaaccaagaagtcactcacttggatgatgttctcaaatgcaagccggctggcagccgcagcaggtcttccagcctaagtctgacggttgagagtgctttagaaagctttgatttcctcaacacctctgactttgacgaagaggaagaggatggcgatgacgtctgccacgttggaggaggcgcagactccgtgttttcagatactgagactgagaagagtgggtcagttcacccggaagccaggggtcaccttagcgaggctctgactgaagacacaggtgtaggcaccagtgtggcaggaagcccgctcccactcaccacaggaaatgagagcctggacatcaccatagtcaaacatctacaatactgcacccagctcatccagcaaatcgtcttctctagcaaaaccccctttgtggcaagaagtctcttggagaagctgtcgaggcaggtccttgtgatgcagaagctggcagccgtgagtgacgagaacctcgggaacatcacctctgtggtggaagccataccagaatttcacaaaaagctctccttgctggccttctggaccaaatgctgcagccccagcggggtctaccacagctccgctgcccgcctcatcaagcagctggaggccagcttcgccagaagcatcaacaaagactatccaggactggcagagccagtgtttagaaccctggtgtcccaaatcctggaccgagctgaacctctcctttcctccagcctctcgtcggaagtcatcactgtcttccagtactacagcttcttcaccagccacggtgtgagtgacctggagacttacctgggccagctaaccaggcaagttgccatggttcagactctgcagtcactgagagatgagaaactgctgcagactatgagcgaccttgcacccagcaacctccccgctcaacaggaagtcctcaggacgctggccctgctgctcaccagggatgacaatgaggtcagcgaagctgtgacactctacttggcagcagcctccaaaaatgagcacttcagagaaaaggccttgctctattattgcgaagcactaacgaaggccaatctccagctacagaaggcagcatgtctggccctaaagagcctggaggccaccgaaagcattaaaatgctagtgacgttgtgtcagtctgacactgaagaaatcagaaccgtggcctcggaaaccctcctctctcttggagaagacgggcgactggcgtacgagcaattagacaaattccctcgagattgtgttaaagtgggaggtcgtcatggaaccgaagttgccacagccttttaaatttcacgttaaccctgcctgactgctattccgatgatacctggcccctgttctcaagagggtgctgtgatgtggccagacagcagagagctgctgccgctgccaagacggagatgtccaagtccaattgcactgtactgtctacttttccttagcccacagaacagggctgtgtataactccctggactgcatcgtagttttgactgacagcacttcaaagtagagtttgaaagtagtcatctttatgcctttgtggaagttcatctgtaagcttgaattcttcatgtgctatttggatacatacatatcgtatgccttgccgtctttctgctgtgttctcagggttgagtggccccttagttaccgaattttattaaacagacaaagcacaaaagga

SEQ ID NO: 367 - protein, 1033 aa, Mus musculus
VPSAPGLPTMQFLDPEDLLDEEDDIFGEGLPTRLPEIMLVGSQSFSPGGPNGIIRSQSFAGFSGLQERRSRQVLGAPPGMQQKGTVCNSFIENASALKKPQAKLKKMHNLGHKNNNTPKEPQPKRVEEVYRALKNGLDEYLEFHQTELDKLTAQLKDMKRNSRLVDELYEAYCIQRRLQDGASKMKQAFATSPASKAARESLSEINRSYKEYTENMCAIEAELESLLGEFSIKMKGLAGFARLCPGDQYEIFMKYGRQRWKLKGKIEVNGKQSWDGAETVFLPLIVGFISIKVTELKGLATHILVGSVTCETKELFAARPQVVAVDINDLGTIKLNLEITWYPFDVEDTTPSSGPGNKTAALQRRMSMYSQGTPETPTFKDQSFFSNLPDDIFESGKAAEEKRPLSLSFSDLQDGDCVFTSSSATSPSSSHSAHPEITITPAELTHSSLSSQNEGTEDSSSASSRNSLGEDHEPKSHPKSDTVEPGKPGVATRSGTESLFLESSVAEALLQESDEASELKPVELDTFEGNITKQLVKRLTSAEGPVTTDKLFFEGSVGSESEAGRSFLDGSLEDAFNGLFLALDPHKKQYKEFQDLNQEVTHLDDVLKCKPAGSRSRSSSLSLTVESALESFDFLNTSDFDEEEEDGDDVCHVGGGADSVFSDTETEKSGSVHPERHLSEALTEDTGVGTSVAGSPLPLTTGNESLDITIVKHLQYCTQLIQQIVFSSKTPFVARSLLEKLSRQVLVMQKLAAVSDENLGNITSVVEAIPEFHKKLSLLAFWTKCCSPSGVYHSSAARLIKQLEASFARSINKDYPGLAEPVFRTLVSQILDRAEPLLSSSLSSEVITVFQYYSFFTSHGVSDLETYLGQLTRQVAMVQTLQSLRDEKLLQTMSDLAPSNLPAQQEVLRTLALLLTRDDNEVSEAVTLYLAAASKNEHFREKALLYYCEALTKANLQLQKAACLALKSLEATESIKMLVTLCQSDTEEIRTVASETLLSLGEDGRLAYEQLDKFPRDCVKVGGRHGTEVATAF

SEQ ID NO: 368 - DNA, 120447 bp, Homo sapiens
  misc_feature (1)...(120447): n = A,T,C or G
ccattggccagtgttgagcaaagtaatgcaatctgatttaccttacaaaaggatcattctgactgttgtcttggaaagaaagatgggggaataggggaaaaggtaggttaggagactactgacatattccagaagagctcatgggatccttacctggcctgatactggctgaatactgggggtatgggaaaaagtggtcaaggatgattccagggctttggcctaagcatctggaaggataacattgctctttactgaaatgaagactgctgctggaggagtagacttaaggtgaggaagggtattgctgtgatgcggaatcaggagtccagttttggacagttaagtttatagtatacatataaattgtggatgacttcatgaagtcccattctaagtactcagaatagcgaacattcaggaaatagttgttgaaatgttgcctataaagcagcatatacataatagaaaattattcatagatttatctctagcttatagggattgggctatataacctatatggtgtgttccataagaccatgagttcagtaatacaatgcaaactgttcagaacactaaagggcaatttaaggaaagatcagagggaaagggctggcttcttggaggtgaatatttgaagttgagagcttaatgtcctgggaagcagtgttctgtaaacatgataattgtgggaatgcatcagggaatgctttatcttcacatgctctcctgcatttggtgctatgcataccaagttcacatgcttgcatttcttgcccttttgctccaaggccatacattcatagaatttcagctggaagagacctaaagaggtgtttggtctatgttcctaacagaaggctggcaagcaatcagccccagtgctcagctccctccctttttccctccaaaggagatttatctgtctccatcagtcacacatccatttaacagtcaatagctagtaggcaccacatttgcttttattttaactcaaatcccacaggttatatcttcaatcacttctctttattctaattctggggaataattgttcttccttctgtaagacagtcctcaaaaaccattaaaataacatagtaacaacaccaataactctccaaacaccgaaatcaccagtccaatatttgtattccaccaggcacttgagtcgaatagtatctactgccgacaagagggcgagtgtattctcagtggtgaagaggctcaaacgtgtgtgaattaggatatgaaatgcaggggcacacggcctacagctgttgaacttgaattcctctgtgaatgcaaaccccacagctgagaggcacttctcagagaggcctgtgtacgtttgctcttctagatgtacagggcttatcctcattgtgacttagccatcgtcttgtgtgcagagaacaaacgagagcaggtgttcacatttatcttcctcaagcagccccttgaggctttttgggggagggtcaggaaaggaagaggctgaaatacagccttccatcccccaactctcactcctgccagcagacagctgtttcagtctcttcttgctgctgctaatgaaaacatagccgggattccataaaagatatttaatatgggattgcttggagaagccactttctttggagatttgcttaaaccaaagctcttggatttgttaccattgctgtgaaattttcatctccagcagccttagcatgaatgacctattttgaatgtgacagcgattacacttcggtggcgtgaataatttattaggtgcaagagcactgtcaacgtagtgatattacagcagtcttgctagcctggctaattatggaggatgacagcactctatcctgttgtcacagctcctctccaaagctgccagggatgtggattctatgtgagcagagaaggaaagaggggcagtggggccaggttcctgctaccaaagaaggctttgtgggttgagcaagctgtgctgcaggagttggatttccactttcacctctgcaaagtgaaactgtgctgggcccatggggatgaatcttgtatccagtatcctgattttgcataaaatgtgtgttagttgggggaggtgcaggctgtgaaagagtgacttaggaaggaaagaggcattagaccctggagctagctagggtatctaatggtttccaggcttacagaggaggcacaggcctttttagcatgcagctggattcagagcctaggagcaggagtatgagagaaaggaatagagcacagccaggaggagcctcagttatggcttcggtgtgtgttcccttgtgttttaagctaccttgagactctagagctttctctagctttgcctgagtagtagtgacagctcatttaaccttactgagacctcagttccagatataaatcaggctccaaaataatgtccatgaagattttgaagtttaacagtcagtgacaaagttttaagcaatagggcttctgggcctgtaattcctcctaaaagtagctcctgaagttaatggtcccaactttatgaattagggaggaactaaactttgggaagatctttgcataggtgggggcagggagttggaaaagaattaaacaggattacatgcaataacatcactggcctacaatggaaagagaaatgaaaattaaattaaattaaaggagctacctgaagaagaaatatttttaaaatatgaatgactggataaaagcagatactttaaatttttcaataataggtaatgattaatgattatcaatcaagccaatgtcaggaagctgacggctccctcatgttagaataattcaaggaagcttatttacaatgagacgagttacaagggggatggggatgcaggggatactggggcccaaggtgacctcatagggaggagccagggaatgcatattcccacctcactttcatctcctgttggggatccccattggctagacccacctggacatcacagggcggccactgacgtggtccctacaggtgagccctccaggagacagaagatggagatggacagaaaggggcaacatgggataacctgcaaaccagggactgcatcagacccagggacacagaataaataaatcaccttggaagacctttacagatacgtctctttttttaatgtttcccctgatcatgagagaaaaaggaaagatattgtgaagtgaaagtcaacttagaacctttaaaaaagcctactacagctgggcgtggtggctcacgcctataatcccagcactttgggaggctgatgcgggcagaacacaaggtcaggggttcgagaccagcctggccaacatgttgaaacctcgtctctactaaaaatacaaaacattagccaggcctggtggtacgcgcctgtaatcccagctacacgggaggctgaggcaggagaatcacttgaacccgggaggcggaggttgcagtgaggcaagatcgcgccattgcactccagcctgggtgacagagcaagactccgtctcaagaaaaaaagaaagaaaaaaaagcctactacatatcaagtacttagcattgtgcttacacgtagatattgatactttccaatcacttctacaactgctttgaatcatgttatacttattttaatacctttgtgcaataatacatattgattaaatgtatgccatttactttcagcctatggcgtttagaactatacgaatttgtaaagttaacattttgccaacatttttgtccatctagatcactgattctcaaaatgtgaactaaagactcatgaggtttcccaggaccctttcaaggggtccccaaagtcctcaatattttttaaaagcataaaatggtcttgggaccaaaaattcaaaaaggctattctagattatggtattgtatcaatggatcttgaaaccaagaaaagggccgggggaactgttggcctagattatatcattgcagaaaatgatctctatatgtaaatatgtaatataataataatatatgagaaatccaatctcaagtttctggagagaaggagactgctatatttagagaatattttatttcccatcaactttgaacatttcactgattgttgtctacctatgcagccttacaggtcacttggtgtggaagctagaagtgggggtggagaggaggtttaggcttaagataatttgcccaagtacaggggactgacttctgaacctccgggacattcattcttgggacatactaaaatgtcaagagtgttggccaaacaagtttctcattgtgcaagcagatatgtgtgacaatggcaaggaaatagcctaagatgtccactcccttgagaaccttatcatgggtgccagacacgggcaaaggataacagggtctttctcttagcagttcagaaagcggtgagcaagacccagctgtcacttgtcgggttgaaatatgcttctataggtacagttcagacaccaataaatgcaggcttgttatgttctttttccagggaaaaaggtggcagaaaccagcagggatagtgtatgctctcatttctcgtttagtcaatatttattggctatcctctacactcattaatatagaggttactatcctatatgcagcacaaaacatagttcctgacatcgcagagcttataaaccaatgaggagaagtgtattaaatagctacaacaaatggaagatgtgtgattgagtctgcactcaggggacagatgacttacaagaggactcaggtacagcacagatgaccaaggaaagtgtcatgaaggaggtaatgtttgaacagggcttcatgggccaggcaggatttttagagccaaatattaaaggtaggaggaaaagtgaggcaagggctcagcagagaattttcaggcagtaggaatggcctgaggaaaaaggtggaagcaggaattgtcaaatgttagagccaaaagaagctttggtgatcaggttgtccaaacccttcgtttgatagatgaggacataggtccacaaaggccactgagttctctactggcaacactaaaatagaacccaggcatcgactctgagtccagcactttttccaagactcttccctggatgcagggtgagaagagccagagctgagagcctgcatggcagagtggcggggatgcagctgggaaggcttctggaaccaactgcagtgccaagggagctggatgcctatttggacttggttcagaccagtgtttcctgaagtgcattctgagatgactgtgccagaaccatcagtgtgcttgttaaaacgacactgtgtaaggagggggacctaaaaatctgcatgttaaattccttcccagggtgattcttatgcacttcataagctggaaaatcaaaaatacagagagacgggggccaggcacggtggttcacacctgtaatcctagcacttcgggaggccgaggcaggtggatcacgaggtcaggagtttgagaccagcctggccaacctggtgaaaccccatctctactaaaaatacaaaaattagttgggagtggtggcgggtgcctgtaatcccacgtaatcccagctacttgggaaggtgaggcaggagaatcacttgaacccaggaggtggaggttgcagtgagctgagatcgtgccactgcactccagcctgggtgacagagcgagactccatctcaaaaaaaaaaaaaaaaaagtacagacagagggagaaagattggtcagagcagcaaatgaagaattcaatagacgtgagcaatgtggaggccaaaagattatactattagaaaggagtgcaaaactcttagaactggcagcattccaagccatattttggccctggatctgggtggccaagtgcctatacagaaaggtcataagagtaaagaccttcaaggctgttagatctgctgttcctatggataagaagcatcacagttataaagagaaattagacctctgttgtatctgcttacttgtctctaggactagtcacctgtaagaatagaagccaaattcaccagaacaatagacacaggtagttacagaactatggttttttatttctgcagggaatgcagaaaaaattatgtgatagacagatagatagataagggtcggtaggtacaaccaaatctttaagtgaccttctgattagacctagagcaccgacttcacttcataacggcagtggttcttcaggcatggtctaagttctttattacataagtgaagctgtaagtcagggaattaaattggttgcattttggctgctgttctgctttcttctgatgaattgtgtatttactaggattgatcgatggcagtaagaaccataagacttgtttggctgagtccgttcttcaaccacacactggcttaaaaagttctcatgagaggagaatgggatacagttcagttattaaaagaggccattttcagtgctgctgaagttcaaacaccttgttttatggtataaaaaataatcacagttcctatagcacccatagtgctgcctccttcgtaattcaccatcccacttatttacaactgtcctcatcgccaggctctacaaggcaggtttcacaactactgggcttacctccggcccttagcagagtgcctggcacctgggttgcactcaattacttcttgaaataatagctattattactacttggggtcttttttgttttgttttgttttggttgttgttgttgttgttgttgtttgacacccaggctggaggcgcagtgacgtaatctcggctcactgcaacctccgcctcttgggttgaagtgatcctcccaccttaccctcctgagtagctgggattacaggcacctgccaccacgcccggctaattttttgcatttttaatagagacagcgtttcgccattttggccaggctggtctcaaactcctggcctcaagtgatccacccacctcggcctcccaaagtgctgggattataggcatgagccaccatgcccggccattaggggtgtattcaatttaaaatttatatgtgaggggggaaaataccctgacttgtattaaacgatttcttctttggaaagaaccattccttttcattggcctgaaagagcaattcaagtgtctcatgggtgggggtgaggatacccacccccaatgcctgtcaagctctaggcttcactgtttccctggatgaggttaaaaggacccagccgagatatctgagtgctctgctcagtgaagttttggggataaagaatcctgcctaagggatagtaagaacctaaaaggaagtgaacagcattataagagagagaatgggcgcaagcagaaattaactacccaagaatgaagactttggtgaccacacaggagcagtgattggagaggcggtgtgaagacctttagactaagctctaggagacctggtgtgggctttttatttggttatatgaccttaatctctgggatttggaccaggcaatccaataaacagtgtgtcgtggttgtttagatctgtgctgcctggtccctcagtcacacatgtacctgttctctggaggtactctgtgggaggaactgtggggtctacaaagtcacccaggacagatcccaattgccagagcttccagtctaatgcagtcagttcaggcctgtgttggcccttcaccttccatactccacacgttctgctcccttcctaaggaagctccctcaaggggagatgcagcccactgtgccctcttcattcctgtttagagcttcagtcctaaatccacagcggtgagtggggcaacctcatggaatctctaaaggcagcagcttggggagccactccatgcttctttctggtctctgctctgtatgtgcacatacacacacacacacacacacactcaagtcatgcccacagtcatgcccaaacctcagcaagatacccctcagcccaatagggtaagttgggggtgggagtggaatgtgctgtagtaaaaagagcacttgatttggaatcacatctgactttcaacactagcttcatctttgtgatcatcaggaagttacttgttcatcttctcagagtatcagtagtcttatcttttaagtggaggcagctatgggaaagagatgacaggcttcagtgggataatgtctataaagtacctaacatcatctgcctcatctctcttttcatcctcttcctcctccctctcataaaaggttatatgtcacttacaacagtgccattcctgagtcaggaaggtgatgggagtgggaaggtggggaaatacagttggcttctctccagggtggatgtcaggcccttctccctccagattcgtcctatgagaccattagtactgtgctaatccgtagtagcgctttactcagttctccccaaacttctactgcatatttgtacttctttccaggtctctttctccagactccagtaaatagagaaatgtttggaaccatccatctctacacaaatagtcatgatacaaggtggaaggtgtaggcatctggagagtaaactaaggtgctataaaagctctgaaatgaaagggcaaaaaaaaagggggggggcaagggatcttggaaaaatggatgcagattaaggtatttaaactggatcctaatgaatagatgtggccatttggaaatgagcaaaagctatgtggttgcagataagttgcagggtggggttggcaagggaaataaaaggatcaatgtaagagtgaaggggtgcttcagaatgactgggtgatccatctttcattcaatatgtagctatggagtgcctgctctgtgctggggacagcttatatcagacagagatggtccctgccctatgaactcacagtctagtaaaggcatgctcttgggcgttctttctggggatcaagccgattttgccctttctgttgtattcctaggtgagttatgacacagtttatcaggcgatggttctggctgcttgtattccagcccgaggatgcagtgcccagaccacgactggatgtgggtgtttcccatgttgacatgtctcctaggatgttccctttcggctaatgtctcagctcactgattattactgatcctttcacaaggtgactgaatctcaagtggtgtgggagggagtggatgtgtcttgtggtactattctagttaacatattctaaatacacaatttattcattatgatcacttaacagatgaggagactgaggcatagcagggaatccctatgtaaggatggagactgagtcaggaccttttccctgggtccttgtcgactcccagttccatacagtttccactccaaaaggcccttttttgggaatgtctgtctatcaggcagacccatgctttccccacaggaaacctttatcattcaaatccaccagaacaaaataaaaaacaattctctttctgccatctttatgagagctgtgtccaaagcagccccggtagagagagtgccctacaaagcagccctcttcagcggggctttccagcacaacccttgccgtgggcagccaacctcaccctcacaccgcccccaccccatacaccaccgcctcatttttttcaatgcacagcccagcttgtatgaaagatcccaaaaggttagctgaaagggcctttccttgcctcggctcctttcctctgccctctccctccagcgcgctggatccaccgggctcgctccccggcgcgattccacgggtcactccaaagctgccgcgccagctcttgcaaaggagcctggcgtgccggcgatcagctggaagcaggcaccgaagcgcagcctcctggagttgggctgaagtagctgtcaagcagctgtctccacccgccctcccctcccagcacaagtgacgccgccggcccccgcgccgcgcctccccctcctcacggctcccgcccctccgcccgctccgccgctctagctccgcgctccgccaccctcgcgcccgccagccccgcaacttcaccccgcgcgccgcagctgctgcgagcggacgcggcagggcagccggcgctggggacagctcgcgtccacccgacttcctcccggggtccccttcacccaagtgagccagctcaggctgtctgcaaagccggaggtgcgggcagctccgggcattgcattggtgcggaggcttttatatgccagagaaccctgagtgtgcccctgacatgacaaggagccgtcgtcgttaggtaggttcaccttttcatttctccttttttgcttctgattttgcgtacaacgcggtgaggtctgtgtggggaggggtgtcctcgacttgaatgagcgttgaatgctaagcagccgttgaaactggagcgtcctcagcttccaccaccctggtgggttcgggcatctgaagcccacagggtacggtcgggaagttgctgagcgaaaggggcacgcgcactttttgcaagcagaactgaaggatgccctggggagtggaggaacgggccaaggttagaggggcccacagcattgcccggggttgggacatttctggggcgaggaagcgccgggccccgggagtcagggaggggtgtgtgtgcgagcgcccccagatgggagtcctgggtggccccctggcacggaacgacttcggcactcgcagagcctatggggaatccagctcagggctgggatggcagtctcaagggtcttcatttgcccccgggctgcccgtttgagctggactatgaaccagctcgttcctcaccgtgtctgaattccaaattggccaggtggaatgggaggatgagaattgggaagaggggcaagaaaggaaaaaatgtgttgctttgatgccgatctgtgtctggaaagatggggggaggggatgcacctgaggacaggagcaccctagcaggagtccgtggcatgggagggggctggtcaagcggagcatgtgcagctctcttgcccgagacgataaccttctagctccctcttacagggcagtgggcagcagatagagacccctcacgttcgaagggagtaggtgcattttgaaattagataagcagaagtcatcaggtgctaaggtggcagaggcgctgtgagaagtgacagctccctggagagcgagagagcaagtggaaaagcaggagaaccgggctgattctgctgggatgggggtggcgcagagtgagattggtaggctcgtaggtccctgtcttggagatacctacatgttgcttgagtgactgaggaaaaatgttcaagcttttaatctgggaaaacagttatgataaaatatatgttggggctgtttcctccctgctccccacttcctaccctcttacgtccacacgcttggtagaaggtctaggattgtgactaatcactgcccccattctgaagaaattgtacttggccatctctatgggactgggcatcctgtgtgagcgtctgctcgattgttagctgacacacaatcatttcttcccttttgttttctatcgggtctgtcttgctctgagagtgtacccacctccttccctcccctgcccgggtattcccactcactcaattcccctcttccccttgctcctccagccattttggaccagcctctgagcttgcccactcacaccatctactttcctcaaattgtattttagctgctgtcacaagcaggggatgtcagccacgaactctccgagaaccagcaccatcatggctattctccagtggttaattaggaagcatcagtagttatccttctgtaggaacaaactgcagggatgtaccaacttagggtaacagcagcttgaggaactcccctatctgaagcccccatctcccagcactcaggattagctttctgtgctagcttccccttcagttgcaatagtgtcaaattgtgtcctttcccccaggaagataatgcatctgcctgtccaaaaatttactgcatccaaacatctgaaaacttgaacattggagaatctgtttagcaaaaacatactgcatatgttgcttttccaaaggaccccccaattgctgttgcttctctcttcctctgacactctaatgtgagatttcgctttgaatattttatcctcagtataaataaaaagaaataccaagctacagagaaagaaaaccgaaagcatgcgctagggagttgcatagaattctgattacacaaacacaattccagaaatggctctccttccttttgttaactgcaaagtgaagttatttccagcagagaagggacccacccaaggttgacctggagaagccaaggaggctgggggcgggtggagggagatatttatatctgtggatcttgttagctaaactctcataaaaattcttctctttagtattcatacccattgacctggggccctgctaatcactgccaaatgtccttccctaaatctgaggtcactaaagtggaaacatccctactacgataaaaccccacagcccaactgtgataccaactacatgcccacttctaagtataaccaagacacttctctgttacactttgtgttaattcacagattattggttcacccctctgtcaagagactaaaatatagacaaaggcaactgtgcagggtgaatagcacagacttcaggttttatattaaatggctgaattgtacatacaatagtcccttgggttgaagggtttgcaaaccagagttttatttaatcatttattgcattcaatggattatctgttttcattctgaaaagaagtcagaagtctaaaaacagttccttgcttttcttgggaggaagtggtgatagaagtgaaagtccgttttatttacacaatgggtgcccctcagggcaatggcagatttgactttctacttgggcttcctgcaccggtggtcctgtgagtagggcctcgtgcttgtgaacagctcctttaccaggcttattttcatctgccaagctgagctccatgagctgggggagatagacagcttgtgtttgtggccattcaaccagaaaagaataacagctgaaaacagacaatggagcaagggaattggggtggggtgggggtggggagaggaggtacagatagcccagtcactcataattggctccccaaaggcaaacctaggtgtagaatggtctcataaagcagttgtcatgtaaacaccctgcaatgtgattattataaagatctgttcagaaaaggagaatgatcatgagcatatgccttttcatctggaaggagcccttcttttggcttcatttcttcatttcatttacttataggcagtttcttgaaacaacattttccccctgaaaacaagaacctcactgttatgcatatggaaaccttcaagttgattcaactgaacaaaatcactcaatgcatcatgtatctccagtgaattaagcatgaaaccctcacatgtcctcttccctcttctgtgtctcctctctgcagccaccaacttcttctctgggttcatggtccaggtttttgtcttgttttgttttgttttttggtcacagtaaactcatctcacttaggttggaaacattccctaaaaataatacatgttttcctgagtgcggcaggctatctacaaaaaagatcatttacacatggccctgtgctggatttaattccctctaaggaaaccgggaacactatgaagaaaagaagctgctccaatttattttattgtgcattgtttacatgacaccgatgagtactgtgtggaggagatgaatgttttcacaagttcattacattaattaaataggaaattagatttttttcaacagtgaaagcaaatgaggtgcaatatttctatgttgtgttccattagatcaaaatgagttctctaccagaccaaggagagaggagtctcagaggaagttattttgtacaccatttagcattctaaaactgattcacaatcatttttaattctgaggtggattttaagttcaactctgtaatgttatataatttgggagaatcccacttttgtttcaacttaagcatgtgtttactgggcaattattctaaggtctggtcaaagttagacatcgcattcaatataaaaatataacatattggctgggcacggtggctcatgcctgtaatcctagcactttagaaggctaaggtgggaagatcgcttgaacccaggagtttgagaccagcctgggcaacatggtgaaaccccatctctatgaaaaaaaaagaaaaattagccagacatggtggtgcatgcttgtagtctcagctactctggaagctgaggtgggaggatcgcttgagcctggaaggtcaaggctgcagtgagcagagataatgccactgtactccagcctaggtgacagagtgagacccttaagaaaaagaaaaagtgtaagatattgattataccttctagggagcacagtctggtggagaagtaggaggagcacaattgagttggataggtgactggatgtcctggtttgccccatagacacctgttgttgcagcataattattaatagcaccacctttcactcagaggtgttgcaatcacacagtcaccctaaagaaaaggactatgagaggtcaaaggaagaaggctgtgattggagtagtcaatgaagatttcattcatgtgcctattctaagattacaggtaaatggaaaggaaaagggactatttaccagacaaaaagactaggaagactgtgagctccctgaaggcacagagggtctgttttgcttgttcctatatccttgggacttgcatgctgcctacccaatggtaggtatcaactattaactaactgcctgtgaacctagatttaagatctagactgaaggtaggaaagttagggacagtcaaaaggcatgtcttgcaaggaaggtcagataagaacaattgtgaaacaaggctactattaatgatgatgatactagaacaaggttggccaatgaccataccgaaaaccaaccttatgtactgaaaaacaacagtgtcttttaattctttcttgtatttgcctcttcacttttgggtttaatgctattggcctttacctctacccctggaagtgatctcttccttctcaaacaaattgttttggatgttaaatgaagaaacaatgactccattctcttcaagcttgtctccttctgaccttggcttccaggagagctcttggaaggaaggcaagggcaggaaagtggggagagtacctgagaaatacaaaagcaaggcagagaaacgctaaaagcacacgtgattttcctcctcctactaggagaaataaattcaaagtgacagtttcctggagctcctggagctagtgcaactcccaagaggtcaattccagtatgacgcttgatttatctactttttgctacatatgaagtcctggaatgacttggctttggccttagctgtgacagtctaccttccaattaatgtatactcacactaggtgccctgctgatatgtagaggttcaaggttaacctatcctacatgaagattccaagataactaccagctgtaacccttgaattgcagtgccgtatttttagtttataaagttattggcagcattttagccaatttgatctgtatcctcccaagttctcatctaatttagagttgtctcggtgatgcgtcatcctcagaaataagtggagcttagaaaaaaagagagatgaagctgaggtgatggacacccacaggtgatccaacatttcatcagggctcagttgcagagaatagaatctactcagcagaaaagatataaaataaaaagggttacaggattgttgggtcaggaaggccaaccaaatgctctctaagttgaaggataaggaaacacactctaggttgagctttttggaacacctaagaaaagtacattgtaaaacagggctactggagccactgcctaacctatactcaagaagctatacactggccgggcgcggtggcttacacctgtaatcccaacacttggggaggctgaggcgggtggatcattggaggtcaggggtttgagaccagcctggccaacatggtgaagattcatctctactaaaaatacaaaaattagctgggcacggtggtatacgcctgtaatcccagctactcaggaggctgaagtaggagaatcatttgaacctgggaggcggaggttgcagtaagcagggatcacaccactgcactccagcctgggcaacaaagcgagactccgtctccaaaaataaaagaagctgtgcactgatttgagaagctactggctccagaatgagactaccactagcatggtcaggaaaaagccagccaggaagccactacagaaaaagcagatattccatgaaggtggctgccagcagtgacaataaaagaagcagaagtctgctatggtaggcaaaataatgcacatccaccaccccaaagatgtccatgtcctaatgccaggaacctgtgactatgtcgccctacatggcaaaagggactttgcagatgtgattaagtcaaggacttgacagtatcctggattacccagttgggcccaatctaattctatttgtccttaaaaacagagaaccttcccctgctatgtcagagggaatgtgactatggaagaaagatagaaagatcagggagatggaacatagctgactttgaagatggaggaaggacccacaagggaaggaatgcaggtgacctctagaagctagaaagggcaaggaaacagattttctcctcgagccgccggaaggtaacacagccctgccaacaccttgattttagtccagtgagacccattttagacttctgtcctccagaactgtaaatatatgtcattttcactttaagccagtaaaattgtggcaatttgttacaacagccatctgaaactcatacacacagccttgcccccgcttctaccttcaatcttgtgcaagtgcatttgacggagaccccaactcacacatggaatcctagctgcaggggattctgggcagtgcagttttcagcttcccagctccagtaaggaaggcagcaagaaggggttgggacgatgctgagtgccgatcactctatctgacgcagctgccactgaaagtcatgaggaaatcggggagctgctggtctatgtgcatggcacgatccttctctgagggacagtagcatgtggcagaacacaagtggatgcctgagatttttaggaagtttaacgagtgttaagtcattaagatacaaaggggaggtaggggagaggcatcagaatagttgcctgttttaccacattagaagttactctctggaggatacccccatttatcttgatgtaattattatttattgtgtgcctgtatcaaaatgtctcatgtaacccctaaatatacacacctactgtgtacccataaaaactaaaaaataaataagttaaaaaaaaacaaaaaagaagttgctatctggagattaaggagagattttatgtaagtatccatttcagggataaatattgaatttctaaaatttaacctttaactacttacagtccatccatatggcagattggcagattatattttccaaagatgccctcagtaataactcccaccccgcatgatctttcaataaagtgactctgatactctgatacatggagagatgggggtttatgttctctcccctcaaaactgtggctttctcaatcaatagagaatgtgatttctaaggctagatcataaaagatcattcaacttctaccttattggctggaatactaactcttgaagctatcagccaccatgcaagcagtctgactatcctgagactaccatgctaggaggaagcccaagctacctgatcacatagagagacctgagatgataagaaagagaaagatgcctggccagcccccagctcctccaaaccctgctgttccatgtccagccaccatctgactgaggagagaccctgagccagaactgtctggcagaggccttcccaattcctgactcactgctgttgtttcaggccactacattttggaatgatttgtcacacagcaataaataactagattggtttatacggtcagacacagaaaaaggtcaaatatgaccacagtgttgtgttattcctatcaaatttcttccctgtgaggtaaataacatgatagtagcagtcacagaacagccaaatctaaagctcaccttctcctcctgcagaacattggtctaagaaacccattcttaaattgtatattagaagcaaactgttgcacattttggtttgtttgccgggggaggatttgggaaagtggagttggtaccattgagaaggagtttagtttcaaactggctaatctagcatgtgaacaaacaggaatccaaataacttgttttcaaagcagagctgtctcaatgtagcaagtataggtagtgcaaaccttacttcaggaagtgtcctcaaattggggtcccacttaggagatggagaaaaagagaaggaaaagtgccagtcgcggtggcttgcgcgtgtaatccctacactttgggaggctgaggcgagtggatcgcctgaggtcaggagttcgagaccagcctggacaacatggtaaaactccagctttactaaaaatacaaacaaattagccgggcatggtggcgggtgcctgtaatcccagctactcaggaggctaaggcaggagaatcacttgaacccaggaggcggaggttgcagtgagccaagatcgcgccactgtactccagcctgggcaacaaggttgaaactctgtctcaaaaaaaaaaaaagaaaaagaaagaaagaaaaagaaaaagtaattggattgactactatgctctgacacctgcagtacattctgccacaactggcgatcccttacttcctccagccagttgactgctggtctttccttttctaccgcttctcttctgcacaggcctccttctttgatacctaaagtctgctgttcctcaagtttaagttcaaggtccagttgagaatagtcatcacgatactttagtcccagtgatagtgccttatatctctgtggatttttgcagttttgaacaacttttacaaccatggtctcatttaaaccacagaacaaccctgtgatgtaacatcaatgtctctaatttcacaaattaggaaaccaaacgaatggattagctggttagcactgagatgttctgactcctcactgggcgctctccaccccgggaggtccacttagccagcctggaggcagcaaaaactgtgtttctctggagggaggagaggtgatttgttcttcctgccctcccccttcaatcaccaaactatggcctatttgaggtatgaccgttttctcttacaacacgactaatgtcctcagttggacacttggttttgcaaatggaaacctgcccctgtaatgacataaaggtcaggaattgctcccttttcaggctcccatgacattccaaaaaaagtttgccctttgaattttgtcataatggtctttggcctaaaataggatagaaatggcacgtggtgtttcttttttaagggtcattttttctttccagatcctcaatgtgtatttcttcacattaggatgttttccagatgtagtttttgttttggtttggttttgttctttggttgtcacaaaatggctctttccctcactgatggaagaaaataaccaaagcaggaagggactaaggggctgcattaactcaagatgttttcataaatgtgaatatacagtaatcaggctaaaggtactgaaaaaagccctattgaaaggatgcatagtttttcgtgtaggggactagtttcactcctttataatccagctgggggagtataagcctggccaagcctggcacataagattctacatatggtaaaaatgaccttccctctatcatctccctttaggtgaatcatagatcttgagtgtaggtacacaggcaaggccttcctgggcacaagaggagtttgaagccatcgaaattttcaaaaaataaatacgaagtctaaggcaggtgtggtggtctgtgcctgtagtcccagctactccagaggctgaggtgggaagatcatttgagcccaggagttcaagtccagctttgacaaccccgtctcttaaaacaacaactaccacaacaaaaagcaagacaaaacaacaacaacaacacataaatgcaaattctgaatcacagatatgtgtacacatatttcatattgcatattgacagaaaactacagagtctcactctgtcacccagactggagtgcggcggccagatcacagctcagtgcagcctcgatctcctgggctcagacgatcctcccatttcagcctcctgagtagctgggaccacaggctcatgccaccacacccagctaatttttgtattttttgtagagatggggtttcaccatgttggccaggctggtctcgaactcctgggctcaagcatctccctgcatcggtctcccaaagtgctgggattacaggtgggagccaccacgcctggccaagcttctcatacaatgaaacatccaatctaaataaacatgttttatattattataaaagtaatagctatcactaaatagcatttctaatgtgccaggcacatgtactaattcattgagtgctcacaacaccctgaggtaattactccattttatagatgagagaatggaggctctgaaaaattactaagaggcagagcttggttttaaacctaggccgtctggcatcagagtctgggctgtgctgcggctgtggatgtaaatacacagactccaaattcagagccacagttcccacagcaactgccagtttgtagcatgttcaaaaagcccgagttctcccacataacttagctgagttgtggctgccagatcttttggcttagcaactcgaaacagagactgtccacgtaggctgaggttctcagttgataccaaggcgttgatgagactcttcaggcttctattataatcaagaagaagatttttcacatcctccatctgaaaggttcattattccagctgggtaagctgtgtgtctgcaaagatgccctatcatcaggaaatgaaatgggcactttttctccaagtaagcaatgcatgctgataaataacgccatatcagtggcgtgccttctccttcctcttgcaaacgattgacgcctcagagatctgaacaaccccacaaaaggggaggaaaatggagaaaaaacaaacttgagagaaaaaaggaatcattccttttcttttgtgaggacttttgtctgatccgtgcccacatgtaaagtatcccttgatcaattttgtcttaattactgaatgtaggaaaacaagctcattgttaattcatgcagttttaatttatgcataggagaattatgcaggataattacctgcagttgaaggaaaatgaatagcgtcagatgtggttaattcacgcatggtttacccttctatctctctatcagaaaagatttaaagtggtaaccaatctgaatgatatgcaaaattgcattggtttgctaagtagaagtattttttttatttgcatcacaaatagagttctcagatttggactgactagatttgaatataatttccagaacaatagctgtgattcactgacttaactcatattttatctcttccagaagtgcccatttttcaaatcagtgcaaaagaagctatcttcatgggccccatgttagcctgagtatagtttcctttatgaggataattcaatgagaatgataattatttcctatatcaagatttgtgggagatttacggtaatgatcacactacttgttcccacattgtccctgaaccttcatgatccagtggcttccaaaaactgaaacaaacagctggaacaaattatggggcaatgaatggacatcagtggaaatttccttgtgacttttgtcaagcaatagatagctgctaaggcctctttgaactcacacctagtaattgagagaaggctaagaggtggttcaagtttactgaaaaaaaaaaaaaaaaaaactactccctgatgttgagttgagacaggttacaataatgaacaattttgaaaggagaataccagtatcaaaaggaggagccagagaaagtaaatatgttcttgttatgacggagcagtaaattttactctgagcttccttgtaaccaggcagaaaggggaacaaaggaagttatcacctaagttcctgctagcagaaagatgggcatacaaaatacagcagttccttaaaggacacattcccttagtgatgaattgtaaaagtaatgtcttatatgggaacgtatacacgggaggttaaattgagctagttcattgcagtgaagttcaagaggcaacaccttgcatattgatcttcattcttattttcttatccctccatcaagctctctaaagatccaaaaaaggacaaccaaaggaaatttcacaaagagaaaaaggaagatctctatttggctctcaattgcccttttttgagaaaaagtgatacaacttatctaaggcaactttacttgccataatcagattttgtctgcagaaaatattagcagggtgagttgaagatgacttacctccttgccccacaccccctcacagaggaccccagcttagacaatggagttacaacttcataataatcatattactgtgccagaacttatcgcttcagattataggttctagtaagaccaacttaagtaggaaaacacagcaaagtataaaaacacaaagctttgtttaggtaaggccatttgtctttttacctttgaccttagtgatgatgatgataataataggataataggtgtcatttaactgagtgcatattttgtgcctagcattacactttggcttgatgtttccttccttccttgcttccttccttccttccttctttccttccttccttccttccttctttctttctttcttcagggtctggctctgtcacccaggctggagtgcaatggctcaatctctgctctctgcaacctccgcctcccgggttcaagcaattctcctgcctcagccaggcatggtggtgcgtgcctgtagtcccagctacttgggaggctgtgaatcccttgagccttggaggtggaggttgcagtgagccgagatcccgctgctgcactccagcctgggcaatagaaccagacatcatctcaaaaaataaataaacaagtaaataaaaataaaaacactaactgtgaccatctttaagattctctgtaacttaaggccctctggtaatgagaggtatgatggcatgaaattgcctcggagccaactctcaggaaatatgtaatacatacacatgtaaagtttagacgaactttcatttactaagacaaatgcccttattaaacaattttccttgactctggaagtgctaacagaaacataactggtaaatttgatacttgccatttcctgctgcgaatattaattgtggcacacagtgtaatccggaatccaaatctggaggatggcggagggggaggggtgctatgactggctgtgtgcagccacctgtccacgctgtggcccccttctctcttcaccctgaataccccagtctgaacagttggagggcatctgctcctggggctggaacacccgcactgctgactcaaacaataaactcatcctgccaaatgatgtatttttggtacagaaaaaaattctggccctcctaggaatcgaaatacactcttaagtgaatgcctgtcatttgtgaaagacattgcctagttcacattctgaactctgctcatcccatttgattagactcaacacccacattcattgctccctgtgttttcacttccaatgtattgggatgaggtttgagaaatatacagtgtgaatggcgttcttcaaaaagaaaatgttcagagcggctgattgtctggagggtttcactgaaaagctcacaatcatatcatagaaaattgctcttaaaaatcattccttctggtggtaaaataccctgggatcctgtgccacatttaataccaactttatttatttatttatctatttattttgagatggagtcttgctctgtcaccaggctagagtgcagtggtacaatctcagctcactgcaacctctgcctcccgggttcaagtgattcttgtgcctcagcctcccgagtagctgggattacaggcacgtgccaccacacccagctaatttttgtgtttttagtagagatggggtttcaccatgtttgccaggatggtcttgatctcctgacctcgtgattcacctaccttggcctcccaaagtgctgggattacaggcgtgagccaccgtgcccagcctattttttaataggaagagccaactatttttgacctcctgatattatgtagtctctataactgaatctcatcttattaattcaactttcaagagagttgagaatgcacagtagttaaaaatgacagcccaggtacatgataaaattcatgaaatcaacctcctttgaagttttttttcctctaggagatgtacaggaattctcaatctagactttagtaaactggaattgacttgataatatatcctcatcgctgtaacaagaacagcaatgaaccctttcgctgtttaagcactttccattaattgacctatataattttcatagcgacctatgagtttggttcttttattatccctattatacaattagttctggaaaacttaagcaacccgtgaaagccacacagtataaagtggtgctgccatgccgcaaacccaggcaggctggattctttggtctcagcactgctgaagtagaaggcatttgttttgttagtgaaactattggaaaacacaggaacagatgacaacaagttccaatcctgacacggggctccttttaagtcttcacaacagtgcaatgaagaagttcttttttatttttttattatttatttatttatttatttttgagacggagtctcgctctgttccccaggctggggtgcagtggtgcgatctcggctcactacaagctccgcctcccgggttcacgccattcttccgcctcagcctccctagtagctgggactacaggtgcccgccaccacgcccagctaatgttttgtattttttagtagagacagggtttcaccgtgttggccaggatggtcttgatctcctgacctcgtgatccacctgccttggcctcccaaagtgctgggattacaagcgtgagccacagcgcccggccgaagaagttcttttaaatcctaagattcccagaaccattccttgtatgcgactgaacgagtgacacaattttatcctgtttttctggtaaatatttgtaatgcctttttcaaatattttgtgcagtgaagttgaagccaagcgactaaagaacatgaatgactccttttttttctttacatgttaaaaggatgggaggcaaatgtgacatgatcactgcatgctgtgtgtatggagaaaaattaaaccctaggaagattttttttttttttaaagtacgtatgcccaggccccaccccagactaagtcagaatctctgggaatgaggcttgggcaatgacatttttaaaaagctccccaggtgccgggtgcggtggctcacgccaataatcccagcactttgggaggccaaggcgggcggatcatgaggtcaggagttcgagaccagcctgaccaacatagtgaaaccccatctctactaaataaaaaaattagccgggcatggtggggtgtgcctgtaatcccagctgcttgggaggctgaggcaggagaatagcttgaacctggaaggcggaggttgcagtgacccgagatggtgccactgcacaccagcctaggcgacagagtgagactctgtctcaaaaaacaaaacaaaacaaaaaaactgcccaggtaattctaagatacggcctggtttgagaacctctaaattagtgcattatattaggctctttctagaagttattgatagttatatcaataggaggatgcagaggttgggacaagggtaaatattttaatgtagcagatgtcttcaaataaacccattaaatccatctctaacagtcgacatgactgtggatttaaccctaagagtataggtgtgggatgttactctctgaatagcaaagatgacccatttatccatttattcttgttgaaactgaaatgctgttattattgttatactgtgttgttgaccctcaatgagcgcctagtggttgggaatggttatgggatatgaaagtaaaacgcctggggacggggaacaggaggtcgtagtgagacaccagttactgttcttaaaccatgtgagcactgaattggatttgtactgattgatgatgtttgtggggccacaaggcattctgagaactgatgatcctcccctcccggttgacagaaaattaagaaacggaaaaggaaattgttaatagtaagggaattctgcactcttagctaaaggagaatggagataagtagtaacaagaccccatctgggtggtagaaaccctcattccagttccagttctgctaacaatcttgttggaacagttgcctacaggtcagtttcagaatacagatgaatttcccttctatacaacctcttcttattcctgtaaaacaggaataataatcactgtcctacctaactcacaggttgctgttagcatgtagagtaggtgccaaagcatttggaaaagtgcagtctgcaaacatgaaatattgtcctgaatcatcttcgtcaatcaaggtgtttctttgaagttccaagtaatatttgagatacaaacagctgtgtagccaccaggagatgaacctttctttctgttgactttgacctctaatgggtcacctgctcctcatagcacctggactactaaattctttggtagctcgctatggtggagaagtcctctggcagttggttcgaacacctaacttccctacatggagatcatttaatcttttcatttttgcatggctgatgtgatccagttcaatgcttccagttggctcaaattgcgcatttgtttctttggatcctgacagcctaggacctctctgttctcttgtttatggtgaaagtcccagaatattcccacaagcttctccctataaaccagatgatagaggcaaaatctaaggttccctgacaacacgattctcttcccctgttgatctgggtcatatccaagaaggatgctccccagtttggttggggcttctgtatttacacagatgttggcctgagtggagtggaaaattaggtagatctggaatttattgaagccagttaatttgagcaccagtgtggtcagattataaccttcttgtttgctttgaagtgggatagggtaaatgcaccaggctaaaaggccaaaccaaatcatcttctagagaaaatagacacattccccttctcatggcctcatctttatctgcacagagacctgaggaggacaagggttttcatatattgcctacagtctatgtcccccattcttacattcactgtgtcctaaagtgctccataaagggggtaaaggttaagaattactgtctctgagactgccctcacctactttatgctagacgagtgtcctgatacccttaagctatttgggattgtctttttgtatcagcagtgggctggtagacacccagtaaataaacttttcaaacatacacaggaatagagtaaatgaggtaacaaattcctgaatatccatcacccagttacaaaaattggcaagattattccatgcttgatcgatccctttggtgattgttgctgttgaagtatcttaaagcaaattcagacctctggatttcacttgtacctgcttccactgcatctcaagagtatgcacacttttgttttgttttggtttttttagagacagggtctcactctgttgcccacgctggagtcagtggcaagatcataactcactgtagcctcaaactaagtatggacatttccttgcataactctagggccattttacacctgacaaaattagcaaattatcatctaatatctagtacatattaaaacatcccaagtatcttaaaatgacttttcagttggtttgccattatagtccaaacagaatccacacattgcctctcttgctatgtctcctgcgtctcttcttgtccttctcccaccattttttcccacgaataaattcattaatcagtaagaagtctgaggccctgtgaaaatctttccagagaagatctgttgcctgctttatttctcccaggctgtccaaagattcagcacctcttactccactgtttataacttcacccaggctgatgagatgaggacacaagaaaatgaatgaaaactactttctccccagtgaactagaaaaaaaatggaaaaggcaagggccaaaagaagccaggcaatagagtgagatttgagtcccagaaaataaaaagtggccttcaaacagttcttgtgtgacccagaggatagagtacgtcctgggtgtgagcatacggaatgatgcaggagaaacaaggctaaggggagagaatcacttgagcccaggagttccaggctttagtgagctatgattgcgccattatactatccagcctgggcaacacagtaagaccttgtctcttaaaaaaaagaaaaaaatctatcgggtacaaacaagatttaaaactggtgagtgtgaggtgatggagggtgcattaggggagacgggagtcttgggaaaagtctccaaccctcattttcttgctctgtaagaatggatgtggcttacgcctgtaatcccagcactttgtgaggctgaggcaggtggatcacttgaggtcaggagttcaagaccagcctggccaacatagtgaaaccctgtctctactaaaaatacaaaaattagctgggggtggcggcacgcacctatagtcccagctatttgagaggctgaggcacgagaatcacttgaacctgggaggtggatgttgcagtgagctgagatcacatcactgcacttcagcctggacaacaaagcaaaaccctgtctcaaaaaaataaaataaaataaataagaatggatgtaactccactctaggtaaattggctaaggaccataaattggcaagaggattgtggaagctaacttactaacctaagtgagagcttgatgtgattacaggagttacgtgggcctctgagaggggaaacaatgggatagtgccttttgggctcagaatacaagtaatacagcatttcacacatgtacaaatatgcctctaatgtattcttttgtctttggtgttgggaatttgccatacgttgatggatccagtctcggatacataagcatttgttctttctttatgctatattgtacttaaagataagaattaggtggccttttttttttatctcgttactgtcattacagcttcaaatcctttagacaaagaacagtaagaaattattaaacactcttgatatacaataaagaggaacataattctgttttgttaataatctagatatttgcacgtagctatacctaactgctttgcattctaatgacaaattatttgtctttagcaaccaaaaataactcagcagatgttatacatgtggctaccttttggtatgcagcagttagaaccagcaatgaaaccactattccttttatggcagtttaatttgctaaaattaccatgcagaggacatgtgtacaggcctctgggaagccactcaactttgcaactgctggcatatgacggcacacacgtacacagcactgccttactttgttaagatcctggaataactctttgacactgggttgttctgcagggagtcagtttgttatagttttcttcctctactttttttcatcagctatactttgttcagtaataattcacatgactttatacaaaacagcacagatttagaaagaccaaggtaatttttttttgtataaatttatgggagccaggtgcagtggcccaccccagtaatcctaggctggggcagtagggtctcttgagcccaggagtttgagaccagcctgggcaaaatagcaagaccctatttctacaaacaattttaaaaattcgctgggagtggtggcatgtgcctgtagtcctagctactcaggaggctaaggggagagaatcacttgtgcccaggagttccaggctttagtgagccatgattgcaccactatactccagcctgggcaacacagtaagaccttgtctcttaaaaaaaaaaaaaagaaaaaaatctattgggtacaaaggtccaagtgtaattttgttacatgcatagtttgcatagtggtgaagtccaggcttttagaatatacatcacccaaataacatacatggtatccatgaagtaatttgttatccactcccctcccctctccccactgtcccaagtctccatggtctatcattccatactctatgtccatttgtacacattatttagtttccactcctgagtgagaacatgcagtatttgtctttctgtgtctgagttgtttcacttaagataatggcctccagttccacccatgttgctgcaaaagacatgattttattttttatggttgaatagtattgtattgtgtatatataccacattttctttatcaaatcaacccctgatggaaacttaggttgatctcatagttttgctattgtgaatagtgctacattaaacatacaggtgcaggccgggcacagtggctcacgcccataatcccagtactttgggaggctgaggcgggtggatctcctgagatcaggagttcgagaccagcctgtctaacatggtgaaaccctgtctctactaaaaatacaaaaaattagccaggcgtggtggcgcatacctgtaatcccccagctactcgggaggttgaggcaggagaatcgcttgaacccgggaggcagaggttgcagtgagccaagatcacaccattgcactccagcttgggcaacagagtgaaactctgtctcaaaaaaataaaataaaataaaataaaaaaatgaacatacaggtgcaggtatctttttgatgcaattatttcttttctaccaaggtaaaattatcagagaaatttatttcaaggcagagagaattaaacatgacagataattttcaatctactaatacataataactggaaaatgccaacattcagctagcttgtttccttaataaaaacatctccctatgtatagggacatacgttgttttaaagcaacatagttgctttaaaatatatatattttaaatttaacaagcatttctgtgcttttatcagatgatagtacaaacacaataggtcacagatccatgtaagaggttcactccaacacattatctctttatcaataattaattttcataatagttatgtgttatgaatttcctttataaagttatattcacataaacaggtcattccaatagctaacaataagcaactaaaatcaatcagaacacatcgtcacttatagccttttaaaaactgcatgacacaggctataatcaagaaaataaaatacttcaggtcgcgggtgaatttcttattcaaaaatgcaaccacagaatagaggctgtgaataataatttgtatcttcccacataaattctttaaccttccctcccttggatgagctctcactgccttgagggtagaaaaaagcaaagttactgagctctagaggccacagcagagaaagcagtccaggtgttccaactgcatctcttgatgatccccaggctcccttttaagcccctaggagcagcactttatacctcatgtattattttccagtctataataagatgcctaaatgttaagcatttaaagtgctgctttttaaagtgttgtcataacaacaggaataaaatgacgaatgtaactggagtttgaaagggctgaattagttttaagtccgttgctttaccttcatgttgcaagggtttaactctaacctagctcaaacaaaggccgtgatcatagaacattaccatatttgagtaatgttgtcagctatttttaccatcacataattgccagtcaattctccatcaattcaatttacttgttaggatggacagaaagaaattaattggccatatgaaaaatctattagtgtgattatgtaggccatatctgaaaagctttcatttaagattatttcttatcctttctctgagatgaaatacagcatgtagctttatttataaggctcaattcaatttcctactggaccctcatgcccattaataaacaccagcattaattgcacatgttgggcaaaggaaacaagcacatggtgtgtaattatacttcccagcacactgttgggtacattctcctagaacctagtggctttttctgtttaggatttccaaagatgtagcttggttgtaatgagaacaataaaaaatattagcttataaaaatggtaatttcagtaaagtcaaataccagtagaagtgaggatgtcagtatcattttgatgctgttctgaagtaaagaagcaataatcactaatagctagaaatgagttgccaagctctagggaaaacaggctgcatgcaaatatgcctgaaggagctgataataccaggaatggggccattttcttctatatggcaatgtttttttaacctggtgatcaaaaattgaggatccctggtcggtgtatttttctctcagctggatcagccaagctgtctctgaagatcatagtcccaagagatgttccttttttgatatacatgggttttgctgggtttttttaaaataggtaaatgtacttattattacaaacaggctcaggcttcatttaagtgcaaaatgctttttccttctaataaggaaacagttggtcctggtttgccatgtagtgtacaccaaatgagggtctacaagtgttctagactgtgcattttaaaatgagttatgacaacattagtcaaaatcaacccaatccctcattagacttaggcgagttttatgccctgaatcatttctcttctaattatcgtgaggccagctgctactccctgcatttatttaatccaccagaaaaggagaagaaatagttttcatttttccccagggctaaaatggtgtcaattatctagaagttcctacaattgactgtcccaatgaatagaaatgctattaacatttcttctttactcttcaaatgactcagccagacccttaaaatagcttcaacgtactctgctgtcattgctttgaagaggaataaaagagagggaaaagggagagcagtaatgtcaaattacttcatctctatgtgtttcttcacctgtaaaatgtgtataggtttattattagcacattccatttgataaaagtcagatatctctcaaattgcaagtcctaattagtaggaaagaccatttttccacatgaagtcttttacatatgttatctcattttctcttcaaaacacccttggtgacttaggtatgatcatcattttattcataaaaaaaattagggcttagagagagcaggtgacttgggtgaagcctggatcaccctggctgcagagccaatgattttggtatcttaccctgtaccgagcatcagagaagtttcaaaagacagctggtaccccctctcacggtgggtgtagcttggttaaagagataagacatttgggaaaataactaaaatacaagcaaggccctgaagatgttagtaccccatcagtaattcaaagttttgaggttcgcaatgtgagagccctctggctgtgctgctcagaaaatgcttgtagacaacagttggcttttgcatcaaattatagtagtggattataacccattgagtaaaacaagaatccgtgagtccatacagtgacaataaagaaagaaatgaatgaatgaaaggattagaaaagctctttctttacagtagaaggaatgatagagtttaaagagtaccattttgccatcattataggaataattgatttgggcaggagacatcaatggatgctaaaactcctgggttaaagaagcaagatatttgcatagcctcaaggtacctccttaccaactatgtatcaactagaaaggcaaagatagtaactttccgtaggagaaactggccaacaacactttaaccaactgatcaaagttaacatcaccggtaatggcaccaagcaactccttgagcctctgatgcaatgccttgagaaggacaatatcacttacgtggtatcactgctaaaaatgcatagtctgactctttatcacaagaaaacagcaaacaaacccaaagtaagggccagtgtacaaaacaagtggcctgaattccattaaaatgtcaatgtcaaagccaaagaattgccaagaaactgtcccagattaaaggacagactcatgacaaaacagggagcatctgatcctggtttggctcctggaatgtggggaggagggacaatacatggaacattattgggacaattggtgaaattggaataaggtctgtaccttagataatagtattgtattgatgttacatttcctgatactgataattagactacgatagtcagtgaatgtcagcaaatgtctgcaaatgtctgtgattttaggaaatacacattgaagtatttaagagtaaatttgcatcacatctgcaaattactcagtgtgggggaggaaatgtatataaatacatatgtgcaaattagtctcataggatttgggaaaaaataatgtgtgtgtgtgtgtgtatttggaggaggaatgacaaagtaaaatgtggcagatgtcgacgaatgaatctgggtgaagggtagatgagaactttctgtacttttcctgcaacttttctgtaagcttcaaattatttcaaaatcaaaatcttttttgtaaaattgacttttgaactgcacatcccaggtactcatatttatagtccttatgaatccatgcttttcaattacctaaaaattgctatcttcaaaaagatgctagtttctagcttccttagcattacctaaacttgcctggctattcctgtcttatgtatctccctctcttttgagaaaattccttattatttaaattattattaacagctaggcttattaaacacctactacataccaggtcttatgtatattatctcatttgcaccttacaaaaatcctctgaaatgttaatccttttatataaatgagaaaactgggattcagggaagttaaataatgtgcaaaagttcaaacagctgtagctgtagaacccaaactgagtgcagatttgtctgactctggattccacgttcttattgtctctgctgtgttgctttccttggaagattaagaaataggtaccactttggccggacatggtggctcacacctgtaattccagcactttgggaggccgaggcaggaggattgcttgagcccaggagtttaagaccagcctggccagcatagcaacatctcgtctttactaaaaatcagaaggattagctgggtgtggaggcacatgccagtagtcccagctactcgggaggctgaggcaggaggatcgcttgagcccaggagattgaggctgcagtgagctatgactgagtcattgcaatccatccctccagcctaggcaacagagcaagactctgtctcaaaaaaacaaaaaaacccagaaataggtaccacttcaaattttacgctgttatttcttacatgaaaaattgtctccaatccgctttatgtatactcatgttatcttcaattaaattgttaaaatttttaaaagcagagctcagtcttaggttgtctttggatcttggacaacacatagcatcctgccagcgctgagcatataatatatacttaataattatattgattgatggagtcttagaaaacacggaaagaaaattatcatatcactttccagagattctgaaaattaagtttctttttttcaagtgagttaaaactaagtattcattataataatctgtggtttctcaagcactttgccttttgtaaagcacttcgtcgttttctctgtgttttaaagcagaaatccagccatctacagagatggtggaaagtcagtctacatgtccaagtagtctcctgattgttagattggatgaagctttgatttcaattgaaccttacaatgcttgcctgttaaaatggggaggaattacttcctttactctacagatacagtgtgaggttcactgagtttaggacttgcccaaaaggccagttagaacatctggccctggttcttccatccccttgctgaggagtgaggctctgttgagttgttctacacttttttttcatccgttcacgtcagttgtcttagtcaagcagtgtatcacacatgcattcatcactgggttagcaaacaatgttgacaactgagaagcaaatattagcattactttgatttcttaatttatttatttttattttattttatttttgagatggagtctcgctctgtcgcccaggctggagtgcagtggcacgatctcggctcactgcaacccccacctcccggattcacgccattctcctgcctcagcctcccgagtagctgggactacaggcacccaccaccacgcctggctaattttttgtatttttagtagaggcgggggtttcaccatgttagccaggatggtctcgatctcctgacctcatgatccgcccgcctcagcctcccaaagtgctgggattacaggcgtgagccaccgtgccgggcctgctttgatttactttaaagcagccatattttttaaaggccaatgacataaatatatttactttttaaaaaagattagtcaactgctctgtaataggtaccttgtaaccatataataagcagacgtgtatctttagttttcatcttaaataattattttgcatagcaggctatttacatctggcccacatgcctctttcagacaactcaattatacatctgcttttgaccacgatgtgggggagcataaacaggatggcattgttaggggaaaaagaaaggaagaacccaaatcgggcatgaagaaatgactcagaaagtgcagtgagggcaggtgttacatcttatgaagcctcgctgggagacaggatcaaatcacgaaagcaactctcagctggttgcttactgattcagcttttccaagtcctgatttcttggcacttcctcttgcagaaggaatgatgactttttctagaaattggtagtgattttttttaaacagctttattgatgtacaattcacataccataaaatttactcatcttaagtggacagtttgagttttagtaaatttatacatttgtgctaccatcatccatgatttgcttttagaacacttccaccacccccaaaacctctctctgcttccttgcctgctcccgtccctggcctcaggcaaacacttgaattgattgtggaatttttttacttttgccagcatgtcaccccagctacagccaactgatctatgggtcaattgtcttgtctcagaggggttggtctcagtctagcttatggagatggcatagctttgtaagtgtgacaactattggtttccaagttgacgtttggcccccatgagaaatgccttggcgagaactgagatatccttactcatgtcattcagaaatcacagatgtgtctcatattttctatcagtaaggctctctcagaattgcctgtttgtattcttaattcgatagaaggtttggttaaatttttaaaaaaggaaaacaccataagggttaagacagtagcatctagctattgtattttcgttttaatttcatgatgtttgatgtcctgcaactcaagcatgcacaaatgatcacgtggtctcttgtttcccatagaaaagccctggtctcatccttgcaggggtttcctttagcctctggccaaactgccatatctgaaaaatcagaaataaaaggcacatgtaatgcggactcattagttttcctcttattattcaaaggagcacatggaatatggggtagacttgagtatccttttaaagatagctttgttaaaaagctaattgatagccccctcggcatagctttaaaaaaagaatccgatagaaaaagcaggatacaaaattttgcatgcaatatgctcaaattattatgctttatatgagaagggaagagctagagaaaatttaacagaacaaaattcccccggtggttgtctttggatgatacaaacggtatggttcttctctccttctccctacactgcctcctttctactttctgtgttttcctaatacaggagagggcttttgtgcttgtaaaaactaaaaataatgtactgaatcatatttcctttaatgagtctcagtattcttaactctaacaataaatattagcattccttctagctgagtagtcaatttgcccagttgccttacaggttaatcaatgcctccagcacttctactctgaacaagtgagtttgaagattcacacctggcagatgttgaaaggaggtcggccactggcctgacaaccaggattcttactttaatatatatatctagccttacctgtctcgtagtgaaattgctgaaatttgaagagaggcttgctaactcaagctaatcaaacacacatgaaaacatgagccagaatgccagttcataaaaatatagggagaagtagaaccatcacctagactggacattccaaacatttccccgtcacttttactacttctactggtggcactaccatgagctgcactttagggcctgctgcatgggcctgccacatgacagatgtccttcatcacccatcttccaaacagccctccaagattgattcctgtcctttattcttaagagacaggttatctccaagttctccaaggaggtgcaaattcttcccccaaactgcaatcatattccaccctttatttctggtccaatcagagcctgagacctgatgggtgaggggaaatcccttgttctctttttatctgcttcagcccccttctatcttcagattcagtgttcttgtccaaaaaccgcctgctgatttgatgagctaccttctaatttaaacagacaccaggtgtttgggtcaggtggtcgctcatagcatccaccaaagtccagtgtacctgtatcacagcattcatacaagaacatgtaaaatcttatacttattataatttcaaaagaccctgatatatgtttaattggaacttaacactgcatagtcagagaaaaggcagtgattttcattgtatgaagaaactgggacgagaaacagctgtggctttcagggttctgtgcctagaggctcagctcagaatggcaggatttgttcaactcttagtcaaggtgcttgggattccttccagaaagaccctgttgtgttgttcccattggttataggagtggcagggcacgggtggcaacctggtatgacagccagggcctcctgcaacaaagtcaagtgaagagcaaaccatagcagccacactgtttgcctaggatttgagtcctttctgggatttaacacacaaaaatgaatattagttatgctggaattttccaaaagaccaggtgagacgtcaataacttagagactggaaacatttttcaaagccccagccacccaggctggagtacaatggcgtgatctcggctcactgcaacctctgcctcccgggttcaagcaatgctcctgcctcagcctcccgagtagctgggattacaggcacccgccaccacgcccagctaattttttttgtatttttagtagagacagggtttcactatgtggccaagctggtctcaaactcctgacctcgtgatccacccgcctcggcctcccaaagtgctgggattacaggcgtgagccactgcacctggcctgagtttgttgttttatgtgggatttcttgcttaatagatatggcatctggtgaactggtgaacctagagtatatatcgggtatatatgagtatatatcaggtatagtgcatgttaccaggagtacaatcccagctctaaatgttttgcagacaaaaataatgaacttgttacatagctcagaactcataataaggacttcatcaggaaatctaaatagttctgatgtaatcagaatttataaagcctaatacaatatttcttggcaatcatatttctcctctgcaaggctgataaatataaacaattttataaatacagttattactcaacagagttatatgatcttgtttatgagctgtctccttttcacttccatttctaggcaactccaaatgtctgcaatttcaaaacagaattttacattatatgaaaaatacacaaataccttttctgtataaaaatataatacagaaaagattaaaatgtttctgactaccactcaatcccacctctccatagactgtgtgtagtttcagaacttttctatttgtgttcgtggttttatatagttttgtttttggcattcctactatcatactctgtttcattctgtagtttatcctggggatctttccatgtggccatgttgtttttaactgccacataatgttattgtcaaaattataacataattttgagtgttaaccattcctgtaatgactaacatttatatcatttcccatttttccattactattaacattgcctgtgatgaatatccctgtatatgcctcttcatgcatttgggtatttccctagaggagctatcaaagaagtgccctgttaaaggattagtatgttttgcagcttaaacagatactgccaaattgttctccaaaattttaattccattttacatccctaccagcagtaatactgcaattctactgtagtcctttctttaggttaaggcttttggttcaatggagcacctgctattaaaatgcagattactctggcagaggcaattaagcctttaaaacccaaaaattttagaggtagtttttctgaaagctggggacagaccaggtctttgggacttctaggaagccagggaacaatctaaagatataaggtgctaagaggtaggagtggagtggtcaatagaatgacagttgataacgaagaggtgcaagatcagttacaactggagaagagctggggaagctggaagaatagtagcgaagaactaccacccctccatcagacttgggagctatggggaagggagtgttttgtatacttttgtccctaatacctctacactaccctgccccaacctcctccttttatttcttccagagccagactttgtgtgtgtgcgtgcttgttttatgactctccttaggccatgtgtcaccttttaggggaaatgatggcaagatagagagatctcagcctaaatcagctctggccaaattctttcttgatagataatgatcatttctaagactacaaaagcaaaacaaaacaaaactgctcactctagtcacattcctagtggccatcagttccatatgtaaatttagtgaaaagtttctcggttcttttttttgagacagagtcccccactctcgccaggctggagtacagtggcgcgatctcctctcacggcagccgccacctcccaggttcaagcgattctgctgcctcagcctctgtaatcccagtagctgggattacaggcgccagccaccatgcctggctaatttttgtattttcagtagagatggggtttcaccatgttggccaggctggtctcaaactcctgatctcaggtgatccacctgcctcggcctcccaaagtgctgggattacaggcatgagccactgcacccaaccatacatttaatgaaaagtttctgagcattattccccctcccaaagtatttgacaatcttaggatcctggacagacatttgttctgattttgagaaccttgtttacctgttacagaaaatgaggaagaaggaaaattattttacaatctggtacatatgttttactctccagcgtttaattcatttaatgaaagagttggagttaattaattgtagcagattattttaacagaagtcttaaatttgcaatgaacttggtatcttttctttttttttctgcctatcactagtgcaactgattgttcaatcaaaactcctaagtcagtggctctcaaacattggtgaacatcagaatcacctggggactttacaaccctccccatacccaggtgatatcccatattaattaaacagtgcctggggataggagccaggcatcagtagtttaaactaccgtgatccaatggataaggggggaaaattggcttgaaaaatataatttctaagaggtatgagataatgatatagttaaatatttcgaatactctaagttttttcctttgatcaaagagtgtctgtgatacaatagatataatgaataataatttacaaaataagatagaatactaaaatttgccaaattgagacattaaggtgggtgcttggttgtcaaattgagtacagaaagaacagaaatattaagaaagcatgatagtttattacaagtttgcatggcatacagtgataccacaggcatgctttatgaacctaagaaagatccccttaaagaaatgtagacagatttctcagtaaccagcagagagcacagaggagaacctcattaaggattaaaggaattgttaaatatagtgaaccccaagtttctcttcaaagaatcagtatgtcagtacgttcaggtctcctattctttgattctccattttaaagtttaactttctggttctcttcgtctccttgctcctagtttcagtaaacagcattcccaccagtcctaatcagtagttcacatttgttcccctggtcacctgcttcatcctgactcatcccggtcacctgttggacctgagtcacccctggtcacctgctctgacctaagtcacctttagttacctgttcctaaccgtccttcctgccaaactacccaccccaccactgtggctcatacccctactctctttaaaatagccaatcagaattagcttagactgtgcggtccaaccctagccaataggggaacgacacagcagtagggccatgcttcaggaataagaactcctgcccctcccctgtccaagtgtggtctcaccattactccattcataagttgcacccttatatagaagtaaaaattgccttgctgagaaaattaaatttatgtttgagtgctatttccttgtggcatcaaaaatttatttataacagaattaggagttttttgagccttgaggctggggagaagtaaccagagagaaccttatctgcacttgcattttgtctaaccatttgtgccctacatattacttttactgctcatacgtacttcttcattacttctaaaattctggagaatgccctaaaatgtaagctgctcctccccagctagtgtgggatttgcatctcacccagatgaaagagcaagccgattgccatacctgtagccaagtgagtcagcacctgtacctcgcaagaatgcatacaaactccagggctgctctctcctggagagggagggaggggatttaaaaacctgcagcaacatgggggaggaggctgtttgtccttctctctctggggaagtaactcgctcaaactgccttccttgctgagctgcttcgcgtagctttgaggaaggtctagtgaaattggtctttccattacatctggatgtactaccagagagttctgctgctgttgttttttttagcttttctttctttgagtctttaaagggcaattgtcgacactctgcaaacataccgatttgttgtctgcccactttggagtcttcaatctgggcagtaactatttaccctttttcctgctagcctgtccccctctctggattgaagtcacctgctaagacaatggtatgtgctttgactcctcctgatctaaaaggaatagaattacctaacagttgcagggtcatcctttgggggaactagccctgggcttctgctcagctgaagttgtgttttgacaatgcttcttggtctgttgtggtaagtccttacaaaagccaagcaaaagactgaaatacaagttgtgcgctttctgctgtattttcctcttaccttccccccgaccgcccttgtgttcttatctaacctagattatcacatcttttgtgagcactccctttacccttcttattttgcactgtcacagtagtggcacaatcttagctttcagaatattcttaaagatagaaagggagaactagttcaagtaagttcatctctaaagtaacctagtgttttagctttatgacccctaggtgtagaattccgccttaagacttgactgtgttttcagtttgacgcatgacttatctgaagctttgacttggcctatttgtgtgtttttattgttgttgaatggagataaatgttacaacagttttcatgtttttgagggtgtggttgaaccttgttttaaaaaaaaaaattcttgaaggaaacctaaagtgatggacaattttgtgtaatttatatttattttcttttctttcttcttttctttttttttagacagagttttgctcttattgcccaggctggagtgtagtggggcgatctcggctcactgcaaccttcgccttctgggttcaagcaattctcctgcctcagcctcccgagtggttaggattacagacatgcgccaccacgcccagctaattttgtatttttagtagagatggggtttcaccaggttgcccaggctggtcttgaactcctgacttcaggtgatccacctgcctcggcctcccaaagtgctgggattacaggtgtgagccaccgcacctggccatagatgggtatcttttttattcttttgagagttgaacccttcgtcttcaggacactccataataaagaacctcacaagcacttaacagtctcatggcttactttacatcctttatcattgttgacaagcttagtgcatcttctgtctgaacctgcctataaattgtcatgatctttccactgtcttctaggactaccgaccagactcccggaaatcatgttggtaggatcccagtctttttcgcctggagggcccaatgggatcattagaagccagtcctttgcgggtttcagcggcctccaggaaaggcgatccaggcaagtactgtgtggttctctcccgggatgcagcttgccaaggaagtgaactttgatgttgtgaagagggtctgtgtgcattcagcctcgtcaaaccgccccccccgcctcctccccattttaatctttttcatggaaaggatgtactaaaaattaagtgctatagtttattttctatcatttagaattcctcctgcaaggatgatggctgaggatttaggacaaactagtgatatatgcatagacctctcactacccctccttccacccctttttgaagcacattttccattgcattcagactttggagactatgtttgctatgaaatcatgcagtggataatgattctgcctctgcagattgactctggggagcagatgtaattcagacagaggttgccaaagttagtttttctagtttcctgaatctcctctcatctgaaacaggacttaggggaacttaagaaagaaagaacagacagtgaataagcaacatgtaaccaagtttatcttcagtttttctgttatcataaaggtctttgccctctgaggggccctatgtgctttaacctgtattgtcccatttgtgcacacggtgatggcagagagtataacgaataactaacctgggaggggtgcagtaggcaccttccggcctcggaggtctcggctttcctactgatagctgggtcagtgagtggcctagcctctgcatctcctaattagatcagtactctggttttaagttatcagatatccatcttaccgctgcaagctgtatccctggcactactagagatgttgaaattttataagttatacctaatcagtaatttgcttcctaaaaataaagcttttaaaaaagctacgtgtattttaatgtcatatagaattagctatttgtcatgcttatggtcccttatcgaaaagaatttattcacatcctcgttgaatttcatagacacttgtacctaaaattgcatagtgcatgtatctttttagttggattatatccttctgcctgtttattatgtccacctggaactctttgcccttagcttcctatgatgttttagaaaagcaatacatttccactcagaatacacattccctgaagccagactttgactctaggtagcctctgcccaacagagctttcaggtttcagcagttaacaaatctaatactaagaaactaaatgcaggatggctcagatctgggaacattaccttctgcaaaggacactagtgtgaacacaagatgattacaaagacatttcttggtcaggcacagtggctcatgcctgtaatcccagcactttgagagtctaaggctggaggattgcttgaagccaagagatcaagaccagcctgggcaacatagcaagaccccatctctacaaaaaatgttttaaaaaattatcccagcactttgagaggccacagcaggaggattgcctgaagctagaccctatctctacaaagaaaaaaaaaattagccaggtgtggtggtgcatgcctgtggtcccagtacctcgggaggctgaggcaggaggaccacttgagcccaggagttcaaggctgcagtgagctatgattggaccactgcactttgccctgggcaccaaactgagaccccctctctttaaacaacaacaaactatttagctgggtgtggtggcacatgctacttgggaggctgaggatcacttgagctcatgagtccaggagttcaaggctgcagtgagctatgatcacaccaccatactccagcctggatgacagaagaagactttgtctctaaaacaaacaagtaaataatagaagacatttttctttggtcaaatccttttggatgcccaatcctcacaatttcttctgttctttccataggtgtaactccttcattgaaaattcctccgctctcaagaagcctcaggccaaactgaagaaaatgcacaatttaggccacaaaaacaacaatccccccaaagagcctcagcctaaaagggtggaagaagtctacagggccttgaaaaatggacttgagtaagaacttgaacctgataatgtactttaaggaaagacccaaggggtcagagaaaagctggtcttatgagatcatttttcagatgtctatttctgtaggaggtattttattcttgtaccacaattagggaagcctgacataagtcccagagatgggaaatatattggtattccacatcatattcataacattgatggagacctggaaccctgtgcagtattgagtttcacttaaacaatgatggacagacatatccattctagacattgctgaaggagggttctgaaacctccctgatatcttacagggattgtgaacccagaataagactttcctagtgtgcaatgggacattcactatttgttctatttgactagatagaattctgtcaggccagagccagggctgactctacagacctcttgccccttgcctccccactggtttttcttttctcgactttcagcttttttctccttttctactttcccagctggatagtatccagtgccactgctagacctttcaaaatgttgaaagactgggaaaatacaaagcctcctgcccaactacagagcaaggttcaattcttaatcccctttgagaaggaaaagtcagcaacagcaccagattccacttaacaggcgcagagattacgattacatcttgtcttatctttgcagtgaatatctggaggttcaccagacggagctggacaagttgacagctcagttaaaagatatgaaaagaaactctcgcctggtaggtactatgcagtcattatgatgttaacactgttctttttagccaaatagcttcttttactggatggggctggggaggaatgtttgagaaaagcagatccaaggggcagagtactatctgcatcccccagtatgtcttagaaggaaaaagaagggtatgttttcttcttaatgcattctagttaatacttttcaatattttccaagcatgtttatgagatcattttttaaatgtatatcttcatgaaactttataatcaggaaaaaaatttttaatgtcctctaccaccctcctaaataatacaaggaaatgaaaagttgaagttttcctagcatattgttagtacatacagaatttgggtccaggcacggtagctcatgcttgttatcccaacactttgggaagccaaggcgggaggaacgcttgaggccaggagttcgagaccagcctgagcaacaaagtgagacccaccccccgtctgtgtttttaaaaaatataaaaaattaatataaataatttggaatctagaacttttactccaatttttaaaaaatataatcagtaaaatcagggagggaaaagaggctcaaaggagtaaccaccatgagaagttaagagttcttagaccagatcaagtacatattatgttgcaaatttcttctattctcatgaatctgtgaggacttgtgtgattgaagaggtggttctaatgtctacactattttaaatgattttgttcaactctacatattatacctcactgtttcaagaaatcagcccaagaaaactcaacatagtcctaggaggtgcagctagacattcatagctgctgtctttttcttttgtaggaaatgtgctcaaatgtatactgttgtccttttcaaaggcttagagattcaaggctttatcaatgttaaaaatttttatgttctactgatgttaggatataaattgcctgcatctatgtggaacccctgtgtcagggctttcagagctggtgaatgcgcttgaccatcctcagtggctgcaaatatctctcctggaaaacaacagtgaacaaatgcaggggcttctgccaagacctcatgttccgtaaaaatccttcaattagaggatatgaggatagtgcactgattatactatgatactatgagcacacaggaaatgagctggctttaaaaacaatttgagaaaagcttatcacagcctcaagaactcttcttaaggccgggcgtggtggctcacacctgtaatccccagcactttgggaggctgaggcgggtggatcacccaaggtcaggagttcaagaccagcttggccaacgtggcgagaccctgtctctactaaaaatacaaaaattagctgggcgtggtggtgggtgcctgtaatcccagctactcaggaggctgaggcaggagaatcgcttgaaccagggaggaggaagttgcggtgagccgagatcgtgccactgcactccagcctgggcaaaagagcgaaactctgtctcaaaaacaaaacaaaactcttcttaaatatcaattttatttgtttagacagcgaggcaggtattttttaacacatatgccactgctatgttttatattcgtaccatttattttaaattttttttaatgaccatgaatttacatgcccttcaataggtaggacgggagagctcaaagcaagtgaaaactttagagatcccaaggggcagggaggactgcatgcaatgctagaaacagactgtaaataaatgtcagctcttaaatgtactcttactggtatttaaaataacccaagtttttattcttttaaagcaaaataacccaagtttttattcttttaaagtaaaacatccagtagaattttgtagggatgatcattatttccacagataatgtgcaaatgtgggctaaatcattctgttaagatgggtaaccttttgaaggataatgtttaaatgcagatattcctttttttattgtagggtgtactgtatgacctagacaaggtaagttgccattccgtgttggggtgctaataagaaaaaaattctgcatccttgctgggcacggtggctcacgcctgtcatcccagcactttgggaggccgaggtgggtggatcacttgagcttaggagtttgagacctgcctgggcaatgtggcaaaatcccatctctaccaaaaaatgaaatacaaaacattatccaggcatggtagtgtgtgcctgtggtcccagctacccaggaggctgaggtgggaggatcacctgaagccaggaggtcgaggcagcagtgagccgtgattgcacccactgcactccagcctgggttgagagagcaaaaccctgtctcaaaaaataaaacaaaactctgcatctttgagaagtcaatgggagaccctcttagagacagtaaaatcctagagaactaatagttttttgaatcctggaaaaatgcatacttttgtctgatgaggataatgaacaagtactgtgatctatagattaaataaagtgtttaaggtcacttccattaaaatgccactgggttgtagtgtttttataagtttaagaacttcccaggcgtttggaggcctttacctgtgttgtctctgaatataaattactatacttcatcaaatctgagtcattgttgattagaaaatgcaccattatttcatgtgccatgaagagaaaaaaaggattccagttaaaatctgacagttgtttcattttacctaaaatttgcattttatagttatcaagaaaactgttaggtctgtttagacacagattttttttctctttctttttaaaaaaatttatatacggtgctgctccatgcctttctatgtgcacaataattttatttcaatgctgaatcatagtgtgttctttttgaagacattttaaaaggcaaataaatgcatataataataattacaactcaaagagatgacacatgaacaactatgattatctttgagcttgtacaggcagctgtctgccggtagcaattgtaaaatgcaccccaatttcaaagacactaaaatgtgaatgggaaaaaaaaccaatcttagaagacaaaatatattattatggagaaatttaaatatactccaatatgatactgttctgtcagaatctaatgacttccattggattggcctttcttcatgttaaacacaaggattccgataactaattcaagttcacatctcaaaatatttattcaatattaaaaaaataaatttccagggccgggcatggtggctcatatctgtaatcccagcactttgggaggccaaggcaggtggatcacctgagctcagaagttcaagaccagcctggtcaacatggagaaaccccatctctactaaatatacaaaaattagccaggcatggtggcgggcacctgtaatcccagctacttgggaggctgaggcaggagaatcgcttgaacccaggaggcaaaggttgcagtgagctcagattgtgccattgtgctctagcctgggcaacaagagcgaaacttcatctcaaaaaaaaaaaaaaaaatccaaattggtattagagaatctctaaaatagcttcaaagatagaaggaaaggggaaatatattggattttctaatacttttgagtatgatataatcaagatattctcacaagcctaagtcaattgaactataaatgactgtactttttcaaacttcttttaattccagcaaattaaaacaattgaaagatacatgagacgcctggagtttcatataagtaaggtaactgaaattcctgttctcattgcctgtttttcagttctgttgctaatcaaatacacctttgggctgagcgtagtatctagtgcgtggagaacttcctatccaattgactcctaagctgactagcaattacgtcatcaagtgggcactaaagatggaggaacaataagaatggaaggcctgatggcccagcacagttttgactctacctcagttccacaaacatttattaagtgctaagtaacaggcacagttacttccagcctcagtgtagagtgcttagagataaactatcaatcaaactagccctacaaaaaacttcatgtttgtctaactttacactctggttccacataacacttggtgccccgtaaacttcttcatgaaggccttataactaccaaaagaccgctgtctcagcgcctccctcaatctctctcaagcccttggctctttccactctccctcatatggcatggttttcaggtgccattttatcctctctcccctagatgtgcactactttgtcagtgtccctgacacccagccctgaaccccatagttcactggtggtccaatgaggctgactatcacccccttgttctgggcactatcaggagttattggtgccacctagaaaatatttacctttagaggcagctaaatcacaccattatcaattcctgtttgtctatatctatcagcctctcttccaagtggggagcctgggagttttagcagatctctctaagagtcagaagccctaggttctattcccagctctgccacctactcacttgctatgtcatctatgtgaatcttggctttctactctgtgaagtggagctggggaggtacacagatttgatctacatgatcctaagaatcctttctggtttaaaattctaggatgatttgtatgtatggatatacatgtatatgctactgccttcgtacattcttgctttgaaagatatttactacctaggcaaatctgaaattgctcctatttctgctaaactcaataaataaaacaatgacatccatcagaagttatttatgtggcaggcaagctttgacatattattgtttaattcaaaaaacagcaagaaaacaatcagtattaggtaagggtatatttatcaatcttgcatccatggttgttagatacaacaatcccaatggttttcaaaggtcagtggtactctttctgtttgcaatatcttatattcagatgcctaccaaattatatgtaattgaatgattcaattaatcagtttatttaatgagccactgctgactgataggtaagataaatgcttgcctacaaatggccttctgctaaggtgactacctaggtatactttatccaaaagtttaattccatttggctaggataggttgatatttaagcaaaaacaaagaataaactttctcactacacaaagtaatagattaagtcattatggctataccgatggtcctgtgggcactgtctccttattgaaaggataacaagctcagaaactttggcgtacccactagtaggggaaagggttgcaagggcagttccccagaagaccacatgggtgacatagcctgacctgcattggaagagatattagcacttgggtttctaaaagttttgtggggatctcccacatcagaacaatttgcaatgtttatttaaaatttcagattcctggcccagccctaacctactgaatcagcatctcagagtggggcctgggcatcagcattttaccaagctcaccagatgaggcttagctttaaagcacggaaaccacactctatgccaaccatcaaccaaaagatgtcatcagcagataggacactccttgagtcttatatctccctcttaatcaaagataaatccactgaccctgaagattaaagatgattcttttcagtttgggcattcttctcagcagagttgagtgcattgttgaagtaaatagcaacaaagaatcctttaatcaagagaataatttttagtctcttcatgtttgcattctaaactaagtgtcattgatatctgtgtagagaatgcaattatggaaaattgtaatcctcaaacaggttatagtaatgctttttagtgagcagccaaaagtttgccttcagaacaaaacgggactcttaaactctgaaatctagtatatgcatctccaccttcttctggatctatagttaagcttcctttttgaagaaacaaagttcatactgaaatgaaaattcaaatagtgctaggtaagtatgcctccccaaagcaacaggttttatttgcttttgacaatgcctgatggtattgttgtttgttatccgcctgaaaattcttgtagttaactgcagtcagttaaagatagtaccagacttatagagataaatatcattaggaataactttagaacaggttttttttttagctaagcacaatgatgtgcacctgtagtctcagctacttgggaggttaagaggatcacttgagcccagcagttagagaccagcctgagcaacatagcaagacctcatctcaaaaaaaaaaaaaaaaattttcaaccctagcactactggcatttggggataattctctattgcaggaagctgtcctctgcattataggatgtttagcagcatgcctggcctctacccactagatgccagtagacccctgggggtcaaaattgccttgggttgattgagaatcactgccttagaagaattagctgattatcaggcttatatgagtataaaatcaatagtcatttgaaaagggtatattgttattatttagaagcataagtgtagatgtgtagcaaaagaaaagttcatttatattgcttcaatttatttttttgtaattgtcacataatttacacgaaaaagagttgagttacttaagtgttcagtttgatatatttagcataattgtgttttaccctaatttaagannnnnnnnnnnnnnnnnnnnnnnnnnnnnnnnnnnnnnnnnnnnnnnnnnnnnnnnnnnnnnnnnnnnnnnnnnnnnnnnnnnnnnnnnnnnnnnnnnnnnnnnnnnnatattagcctaggatactacaaagttttcaccttggtatgaaattgtacaaaccctttcagtgtttgttctatatacagaaggctctcatcttccttatttaatagttacagtcttatttaatacttaattatttttattatttaatacttatttgtttaatacttatttaatacttacagaaagctctcatctttcttatttaatacttacagtccacccatgaacccacaaagtcacctgggagtcattttaaacaattccaatgatagcctcaaacaatgcaagagaggcacttcccttttgcataatttgaaaacaggattagagcaaaatctgttttgagacaaaatgtatcacagtggctacaataaaaacgattggtccctatctaaaaggataatacttctacaggattctctttgtagaggtcagaaatataaagtaaattaagcatgtaacaatgatctatgtattttctttcaagcctgacatttatttctgtttcctgttttgattctggcaggtagatgaactctatgaagcttattgtatccagcgacgcctccaggatggtgccagcaaaatgaagcaagccttcgcaacatcccctgccagcaaagctgcccgggagagtctgacagagatcaatcggagcttcaaggagtacacagaggtataactccctaacctgcttaagttgccgaatcccatctggcctggtgtgaattgttggtaattgccaagaacaaggcaaacagcaacccacaacctcattccaccctctagaaagataggttttactgttagcctaaaaagtatgcaagaaaggcaatcggtagaattgcttaaaatgaatgaataagctgggagtggtggcacgtgcctgtagtcctagttattcaagaggctgaggcaagagcattgcttgagcccaggagttcaaggctgcggtgagctacgatcgcgccactgcactccagcctgggtgacagagcgaggccacatctctaaaataaaataaaatgaatgcgtaaaccacattgccctgatttgtgtcatttaaacacacttctaaatattctagtgtaaatcgagcctagttttatccctggaagtggagcagaccctatggttcagatagctacactggatgtcagtgttggatcagtaaccctctgcctacaatgttttttttaattgtgagaaatttttatcataaaggagccaagattaagaaccatgaacagaagtgtgctttcctggtttccaactctctggggcccaagcatctgacatagagaggtcttcactcctcctggggtcacctaataccaatgtctttgatgaaatgactaaattattaaagcagcactcctcactatcccatgagtctttgttcagagatcagatttcatgaatgaagtcatcagcctgtagagggtctgttggacaattcccagagctgagcatctggttcagccctgggatcagaaggacagcttggatgactgtcagtaggatccctttgtgtgtacactcccgtgttgcctcttgtctaaaccaagtttctctctttatttgacttaaagcagggcttctttacctaagttcctcctttagaataatttttttattattttttgagagatagagtcttgctctgtcacacagggctggagtgcagtggcgcgatcttggctcactgcaatctctgcctcccgggttcaagtgattctcctgcctcagcttcccaagtacctctcctgcctcagcttcccaagtagctgggactacaggtgtgtgccaccacacccggctaatttttgtatttttagtagagacggagttttactatacgttggccaggctggtctcgaactcctgatctcaggtgatccactcgcctctgcctcccaaagtgctgggattacaggcatgagccactgagcccggcctagaataatgttttttaaatgcataaaataaaatacataggaattgaaaagaagaaaatatattgaaatacagttatttcaaaatcatcagtatagttttcaaaatatttcaaaagtcaaatatgtgacatagttctatgctgctgctttattaacacatcaaattataagatctagtagtggctctaataactactgaaacatcaaagtaatgaaaagtataaatgattttttaaaaagttatctgcaataaataatgtgacatgaacatatatgtgatttctatcagtgtcaaagtcacaggtatggctaatactgctgtggcttgttttctaccttcatcatacctaaacatgtttaatttcagttaaatgatagtgaaaataaagatctgactcttcccaccctcccccatcctactttgtagagctgcagattgaaaattcctggcctagaagcagtcctagttcacgagaccccatttctacagatctctgaaatgaggagagccgtttccaattataaaggatgtttataggacaaatgcagataactgaccagcagaatgcaggggctgcctttgttggcatatttgcaggtcatttcagacacagccacccttgatcaagtgccagggcatggcatcatgaccttgctcacaaattcaaagacatagagtgcaatttaaactgccttagagaagaaagaagtccaggacttctgtagcctcatacctcatttggtatcaggtggttttatatcctcatggccgggtgcagcggcttatacctgtaatcccagcactttgggaggccaagttgggaggttcacttgaggtcaggagttcaagactagcccagccaacatagcaaaaccccgtctctactaaaaatacaaaaattagccgggcgtggtggcgggcacctgtaatcccagctactcgtgaggctgaggcaggagaatcgcttgaacctgggaggcagaggttgcagtgagctgagacggcgccactacactccagcctgggtgacagatagagactctatctcaaaaaaacaaaaaagcaagaaagaaatacatcctcacataaccacaaaagccagcatgttattatgatgatggtttaaaatgaggatttaacaatgaggtcaaggtaggctcaggtgctttttcgtgtgcagcaatgttcatcagtggctgtgggtggtgggggggtgccagtggtcgggggaggaaaattttgaccatggatgtcctcaagtcttaacctagctgctctcacgtttttcagagatactggtagcaatcctgacatgcatgatagcatagttgatatgtctggaaactgtttcttcacagaagtgcccaatactctgaggaaataaattggtttataatactgaggctttgttttcaaggctttcaagctacgcagagctcagacttcaggaagttttccccagccttgctagctagttcaggtagtgagaatttacaagggaaaaagcaatgccattctctttgcatcccatgagagtgatcatttggagcagaacaacgaaacatagaagaatcagaacctctaggctgaggtcctcagcatacagaattcaaatggaagcaataccagcctgcactaatcaagctggccatgcttttgtcagtgaggccaccctcgaacccctagccttgtgggaggctggcaactgagggagaagcctgcagacatcaccctgcatcaagcttcaatggagactgctgcttagcatagcagaggcagcatccagattgtaagctggtcaagcagcagaagggcctccctggggatggcccatggccgcagcactttcccttttcatttctaactgcaattgttctatttaggtcctcaggtattgaggaagtagggtgaggctagttatgtatctaaccacatgcacagatggtgttactccttctctctatccttttccttcaacatcaaagagaagacccttgtcagacccaaaaataatttttggggcgctgtaggtttgcagtaggaagtctgccttactcacttgagcagaattcagcccttgtgctcttttggccccaaatttttaagaaaaatttcaaacctatagaaaaattgaaagacttgtacattgaacaccatatgcctttatctagatttaccaattggtaatatttggccatatttgctttccctctctctcatatgatcaaatccccctcaagtcatttgacagtaagtgatagacatcatgacatttcaccctatatgtattttaacctggatctctttttaaaatttatttgtaattggcaaataaaaactacatatttatggtatacaacatgatgttttgaagtgtgtatgcacagaaatatgtaatacaatggctaaatcaagccagggatctcttaatagtaacctatggaatatctacatttcctacataaccacataccattactacaaccaagaaaattgacaatcatcccatagaattatataacatattgtccattttcaagttttccctatttggatcaataatgtcttttataaatgttttgatttatttactttcaaatcaggatattatcaaggttaagttgttacatttggtgattatgtttgtctagtctctttatgtagaaattttttcccctatgatactgcctttttgtagaattcatgctaattcctatagactaccccacattctgaatgtgtctatttttgatataatctgacttgctcatctatgccctaaatttcctgtacactaaaaggtgggcttagactcagatcaaacattttgtcaagaatgtttcttaggctgtgctgtgtggagcaaacaggtaaatgcttctcgttgttcacgcagtggttgtgctgctgttcgaacgtcgtgtgctttgagctgttgggtgaaaggctagctctcatgatcgtctcctgtcctctttgcagaatatgtgcaccattgaagtggagctagagaatctgctgggagaattctccatcaagatgaaaggtattattttccttgtttagagagaataaggagccatctctgcagagtgcagagctccttgaagtttgagagcccatgctatttttattttccttgcaaagacgcagcgccacccactctcaacccaccccacttttgatagtttactgatgcttctcatcctgaggcttacctacacacacaaaaatattatgacagaatctcaaacatacacagaagtggagagaacattataatgagcccccataaacccatcacctagatgtaataattagcaagattttgccacatttgctccatctctttgcttttgtttttcctttgataaaagagaagtcctttgatgaaataaaacccagatatgtcagtctgctgctatacacttcagtatgcatctcttaaagcatggggctgtcatcttacataaccacgatgccaagtactgtcacgttttcacagctaacaaaaataataaaccctggttattaacccattccattatcagatttcccccgttgtctcaaaaatgccttgtacatttgattagttcaaattaggatcccaacaaggtccatgcattacaattggttgttaggtatatcttttagatttcctttaatctaaaacaaacctctccctccctttttttctacccttgacttgctgtagaaaccattgttgtacagaatgtcccacattctagcttgtctgttggcttctttggggtgatctttaaattcttcctttagctcctcatgtttctagcaaactaactatgaaattttgtaaatcttggtgttaaacccacagagaatttttcccctcccagtgcctttctggtatttattccagaaagttccaaactagacacattattgagttaaaccacagcatcttcagaacaaaaacgaagtctggttttagaaaatagagcattgctcaggtgttgtcagatttacggctcagtggccaggcatggctgtcaaatgagcggccatcacagcaagtcaatttctcttccaagttttggcccatctgactgcagtgaagagggctggtgcttatgcaattctgaggtttcttagcagcttgatccctgggttgctaatggggatttaatcaccttctttctactttctgcaattaagggagtaaagaaaggagacttttttttgaaagggctcgacaggagggcttcattttccaatgaatcatctaactcaggagggaaattattctgtcaagcactaggcactgacatgtaagagcctgtctgagaatacctggaatataaatgaccttgaccctcagcttcccaaatggctgcatgcttctcttccggcagatccggtagggaatcagtttagtattcagtgttaagtttcaacacttgctttgctactgagtctggcatctgtgcttttttccattttttaggtccattctctacatttttgggtcctcacttgagtcagtggttccaaaatcacgcaggtccatagtcccacgtgggccctggaatttttattttaactttgaggatgattctatcagcagcctgatcaattctggaaaataactgccctgaatcagtgtttagcagaaaaccttccctctacttcccccaactctcagacgccacccacacagactagcacagtcgcagagtctcgcagcctaacggtaattcaaatcatgcacatcacctatcactgctaatataaaaaagtactatatttctcctatttctgatgctcagtattatcaagtgcatctatttttggtgggatggtaatttcctgattttacagatgggaaataggggcctagagaggctaaatgacttgtcccaggagtcacacttaaattggagtcagacaagaaactgaattccagggttctttgttcctaatgcattcccacctctaactccatgttatgagggaagttcagagctgagcagacaatataaaccattgctcaaagaatggtctccctcacgggcagatcctctccaacctagcacagagacaccctaggagtgggatggggaggaaagggaccaccctcggaccagatctggagcttcaggcttggtgttcagggaggagatgatgctggagtccctgccacctactgggggacctggccaccccgctacatcgcagccctgatggactgatgaacttgctgttgctcctgctcctccatctcctcctctctctgttgttcttgctctcctgcctgatgttcctgagagtccacctgaacgcttggtttcttccatggggtttctcaggcctgagactaaatctccttcctcattgatagactcctgtctcctccactttcctcatctaacaggcaaactcagaaactacatctgtgaaggctttcaatggtaaacacccccatggaaatctttctcttcctccataaagagaaagggaaacctcatgctgccaagaaatcctattgtctttgcaattagctgctttctcatctgttactcattctggtaaaaactacttccaacatacatattgacaaacagactatttcacaatactctcagacctggcaaccactaacttcctcgtgccacacccttcctcacttccctttttgccccaaccccaacactagaaaacaaccttttggggtagtgacattaaagataatagagcaagtacttactgagtgcctgctattggccaggcacttgactgcattctgatgactgctccctggccttgagttccacatggtctaccagagaaaacagacatatgaggctgtgcattctcattcaatggaacaaatgaccacctgaacaacagtgtgacccagtttgctgcaaaagcaggaggggagaggaggaaaaggttgccactcacctctctagttggggagaggagcaggaaagaggaaggcatcccagtgtaatgtatggtgaacagcaccagaatagcattcaccaaacagaggaaagcctgttcagaggtgacaagtagaccggtgtggctgacgtgattgttcggagaagagctatggagaattagttgggtcctgactataaaaatccatgaatgccaggctaaacggagagcacttaatctgcaaactatcaaacaggatggaggtaaagggatgtagttccttagagcaaactagttctccaaattattactttgttcaaattaagttccaggcagtgcatatatcctggtccttacagtttccagggcaggtcaaccttcctcagaaggaagaaccaccattgagctagtaaacttgcattatttatgcctggtcaatagatcagtaacacctgtaataggagctcctgactgtatagctacttggttgtcttaaagtaggaagtgtgactcttggaaggaaagatcatcatagaactgggaaaaatgatgtagagcgttcttctggcagaatggtgtctgagcaaaggaaggcaggcaagagtaggcagctgctgtaacaccctccaaacgaggctgtggaggaggtgttagatcagtaatatgtgagcgccgtgaaacatccaaaggtatgacccctgcaagcccccagtgcgcatcctcagaggtaacccccatgatggttttttgagtgaaagctagaaagctttcattaagctttctagatcatgcactggtaatcacaaactgtcaagaacacttgcagctttctccaactgtgaaaatgccagcaggcccccagacaagagcctgtaagaaacctggccaggcctcaaagacagactgtaactgtcattgccccactgttagtgctaattccgtggccagtaccaccagtggcttacacagcagatagaactttaagaagcacggcacaaaagctgtttgtgcctggatagtgccattgtgctacattattgctacaatcagaggatcagtgatgccactacagcagttccaagaaattttgacttagtaacatgggctgagaagtgaaaaaaacatcactaccaagtacctttctcacattgttttcttcagatataaaatttctggtaattttaaaggggggggaaaaacaccttcaaaggatttcccctttattcacctttatctagtaacaatgtcagatcagtttcttttcaaccagtcttccattgtaattacataaacaggcaatagattaatcctgaactaatttgcagaggttttgttttgtttttgagacagagtctcgctgtgtcacccaggctgcagtgcagtggcactatctctgttcactgcaacctccgcctcctgggttcaagcgattctcatgcctcagcctccggagtagctgggattacagatgcccaccatcgcacccggctaatttttgtatttttagtagagacagagtttctccatgttagccaggctggtcacgaactcctgacctcaggtgatccgcccacctcggcctcccaaagtactgggattacaggtgtgagccaccgtgcctgaccaatttgcagaggtttttaaagagcactttggattttattagaattagcatgtccagtttaggatttacaaaaacaagtcgattatactttctttcagaagtattttttttaaagactaactaaatgctgcagaaaattattagtagaatgcaggcttctttaattctgctcttatttcagtaagtctttttaagtgggttgttgtgttctaattattattgaaagctgtttttaaatgtgctggctccacgggcaggaaggcacggacgagctggtgagtttctgccacctactgacaagtgatggtaacagcacatgcttctttttttaagcatccggggaccttttttgctgtcagcttacccacgcaacgtttatcagtcaggtgaaagtagaagcgttcatttaagactctcaacttactgggttttttgctttgttttgttttttgagtcgagggtctcgctctgtcacacaggctggagttcagtggctcacggccgcctgaaactcctaacctcaagcaatcctcctgcctcaacctcctgagtaactgggaccacgggcgcacgccaccatgactggctaatttttaaatttttcgtagagatagggtctcactgtgttgcccaggttggtctcaaactcctgggctcaagtgatcctactgccttggcctcccagagcacaggatcacaggtgtgagccaccatgcctggccaagagtctccagcgtactaacagggctatttgtagaaggcaaaacacattgtgtgataccatccacagcatctttatatgggtaaaatcacgttggaaataaatataaaagcaacccagagcacaaaggttataaatagcaactcaaggaggctgaagtaccaagggaacccatttgtcatatggatgtctttgtgtgggaacagcctaggactaacagctgtttctggaccagctcatcaaaattatttcctcggcagtgcctctaaaaaattactgggtaaacaggggaggaattgttcgtgtcttcttcaatctctatttaaacactttgaaagtagtaacttctttttttaaaacattgagaaatataacaaaaaaaaaataaagtcatatataatcattccacccagtgctaagttttgttaaaattattaaaatatccaaccaacttttctgtgtatacacactccctgccaaggtatgtgatcttttttacatcttttttctgtattacaaaataagtatatcatctttttataaatcaaataaaaattaccacttattgacaaaaatttaattttctccttaattctaccctaccagagataattatttttaacagtttggtatggttttctagacttttttccctggggatccatttatatatggctgaggttatactctatgtaaggttttgtgtccttccttttttttttttttttttttttgagacggagtttcaccgttgccaggctgaagtgcagtggcatgatctcggctcactgcaacccccgcctcccaggttcaagcgattctcctgcctcagcctcccgagtagctgggattacaggtacccgacaccacacccggctaattttgtatttttagtagagatagggtttcaccatgttggccaggatggcctggaactcctgacctcaggtgatctgcccacctcagcctcctaaagtgctgggattacaggtgtgagccaccacgtccagcctgtactgaattcttaactggaaatctcataaaactttattttttttccttcaaaaaatttttaaaggatgaagatttttacctatttttatgaaattattttggttccttcaataaaacttttagtctttaggccccaaggaatgtaaagtgctttgctttgtgattggcaggaaaacaacagctgactaaagccagaaacaactgattaaagtaaagctgggtcactgacaagcctctgttgatgagattagtttcctcatttgctatgcacatgtgactagcatgccttcgtccccacacgtttattcatgcttgacacagtagacatccaagaaacattgtcgaatgcacacatgccattcactcagcctggaagtatctgtacacccatgtcttcattttactgtggtgaaactctgttattcaaatgctactttcctccatgaaactattctacattaaataagatagtctctcttttttcattttaattatatagtaatacattctcataaaaatacagaaaaaagcaaagatctccttctgtctctccactgctgtttgcctccctgatgcatatcaatttactgtgtgttttctttcttttttttttttttttctttttcagacatagtctcactctgttacccaggctggagtgcagtggtgtaatcacggttcactatagcctagacctcctgggctcaagcgatcctcccacctcagcctctgagcagctgggactacaggcatgcaccaccacacttggctaatttttttttttctttttagtagagatgaggtctcactatgttgcccaggcttgtcttgaactcctgagctcaagtcatcctcctgccttggcctcccaaagtgctaggattataggcgtgagccaccatgccagccttgtgtcttttcatatagattacgtctttcattaaatagtggatggcatgtactcaataaatagtattatcccactcttggatatattgtcattaccatgtattaacgacctactatgtgttagatgccgtccattgtccttacaaacaattctatgaagtggacactgttaccctattttaaaggtgaagaaacttgggttaagtaaattttctagagtaggatagccagtagacaaacaaattaacctcaggtgtaactccatcttactgccttcaagtccttgtctgtttcatttctgtgggctttaactgtattttgttctatatcatgggtatccataaaatctttaatttccaaattattaccccgatgcctagcatagacccttacatatagctggctctcagtaaatatctacaaaaagaaagaaaaagactggacaaacccagagttcctgagatggcctcggatggtggccatctagtctgataagatttgtttttgctgctgcaccagagagagatctcgaatcgagcagatccagttagacatgacttgctggatggcacagtagaagaaaagtccagtctttcttttgggggtgtatcatttggttggttggattgattttgttttcttaatcactagctttatgtaagtaataatccattttcagggattttataacagcaaattgtatcattacaccagataaaaaggataaagaaaacatcagaatgagtaaattggggggcagcaagggaaataactgcatggaatcttaactcaaatgggaggcacttaaaaatcacacattttaggacagaaagaaaaataggagaccagattatcttcatgggaatatgttggataaataaataaatctatctttctggccctaataccctaaccctagaatccacttggatcttaaatcagcccaagatattctgagctctagctcccctccttgcccagcctcccctgccttggagaccacctcttccatcacttcatccaggaatgtcttctttacctgtgatagaaggaactcccccaaaaacagctgttccccaggaatggccccaaaaagtgttatgtgagtttgcacaaagttctgacacttcacttgaattctttttaacgtgccagtatgtgtctatagagaggggaaatatgttctacacctcaccttccaatttcttggttacaggtctggctggctttgcacgcctctgtcctggagatcaatatgaagtaagtattgtcttggtctaggtgctggaattatggacctgaagggtaggggccagttgtcatgtcattattttgcttttcaagttgtcttttttttttttaatttttaattttgaaaaacattttaagccaatgagaaagtctggaaactggtacaggattcccataaacctttcatctagattcaccactttgtaacattatgccacatttgctctgtcatcatcatcattattgctgtcattgttactattattttgctgaaccattttatttatttatttatttacttacttatttattttttattttgagatggagtctcgctctgttgcccaggctggagtgcagtggcatgatctcagctcactgcaacctctgccacctggattcaagcgattctcctgcctcggcctctggagtagctgggactacaggtgtgcaccaccacagccggctaatttttttgtgtttttagtagagatggggtttcaccatgttggccaggctggtcttgaactcctgacctcaagtgattcccccccgcccacccttcggcctcccaaagtgctgggattacaggtgtgagccaccacatccagcccctgaaccattttagagcaagatgcaaacaccaggactcttcatccctaaattcttctaagaatggaaagacattctgtcacataggcattactaagccctcaacaccagtgagtttataacactggctcttcagctaacgtcacctggaattagtctatgttcatattttgccaggtgtcccaatattgtactaggtaagcaggtttttttttttttttcctgatccaagggccaatccaggatcatggctgatcataagtaccatgactgaagaaaaataacatccagatctttctttgtaaaaatgtgctccaaaaagtaaaaatagcctttgttattttccctcttcaaaaggaaacttatataaccatttcatctaacatctcctccaaaaccctctatactcatacctcttagcagggggtgagggtgtatcttcccttaaacattaaagcagtctgaccaaggagatattgcacaccttcccccaagagtatgttggatttcaaagtccttgccagctccatctctctatccagagtaaggatgtctttatttcttgcttctgactgctaagggggttttagctgatacttcctcatctcactaaaggagctgggttgtgtggctgctctattgaagtagaactaacaagagagagaactgcttggcatgagtgagcagaagggcacagtgcaatgaccttttactacagaaaacctgtaccctccctgtctcaggcaggcagaacttactgtgctttaaaagtctcgggccaggcacagtggcttatgtctgtaatcctagcactttgggaggctgaggcgggcagatgacctgaggtcaggagtttgagaccagcctagccaacatggtgaaaccccgtcttactaaaaatacagaaattagccgggcatggtggcacatgcctgtagtcccagctacttgggaggctgaggcaggggaatcgcttgaaccctggaggcggaggttgcagcgagccaagatcacaccattgcactccagcctgagtgacagagcgagactccaactcaaaaaaaaaaaaaaagtctcctccccactcatccccagctccattcacacccaagagtaagggggtggagggagagtaagggagaagcggagggcagcagtggctttaggtctttctccttttgatcttggtgttctggtggagaagagggggtggcaagacatgaaggcccttggatgtctcctctccagattttcatgaagtatggccggcagcggtggaaactgaaaggcaaaatagaagtaaatggcaagcagagctgggatggagaagaaacagtttttctgcccctgatagttgggttcatctccatcaaggtacagtattgtcattgcctgttgtctttcctggtgccacggctggatgatccattggtggggcccttacccgtgacccctgcctgttgcccctccatcccacagacttctctgcacaagtctattacaaagacagctgccctctcatcagagtaagtaaagtcaatctaagatacacttttgaaatatccacctctggccaggcgtagtgtagtggctcacgcctgtaatcccagcactttgggaggctgaggtgggtggatcacttgagcccaggaggtcgagaccagcctggccaacatggcaaaacgccgtctctacaaaagtacaaaaattagccagacgtggtccgtgtgcctgtagtcccagctacttgggagtctgaggtgggaggatcacttgagcccaggaggtcaaggctgcaattagccatgatcacactactgcactatagcctgggtgacagagagagaccctgtctccaaaaaaaaaaaaaaaaagaaaaagaaaaatgaaaatccgcttctgatttcagatatgattctgaaagaaatgaccaacctagctcagtaaaaaaaatgacacattattctacctttctcctctgctgtgatgtaaggcctattctctcccactctctctgctaggtcacggagctcaaagggctagcaactcacatcctggtaggtagcgtgacctgtgagaccaaagagctgtttgcagcccgacctcaggtagtggctgtcgacatcaatgaccttggtaccatcaaactgaacctggaaatcacctggtagtaagtgcctcttcctttatttcatcatatagaaatatctgataccggctagtgctactcaaagctggtgcatggaccatccgcatcaccagggagcttgttatgaaaagcagaatctcgggccccaccccaggactactgtgtcagaattgctcaggccccagaatctgtttaacaaactccccgggtaaggtgcacgcgtgttaaagttggagaagcctgggtcatgtcaccaatctcctcttctacttcctattttaaaatattttttctgtcaccttccttccctctctacctttaaatatataagggcatatgtcctctcaagtaaactaatttgaaagaaaatatctgtccaataggaggtactttgacctcagaaaaatcctgattctcacggatgcttattcctctttatcgcataacttcacactgctctggaaaattatgagtatccttagttcctctgcactgtatttactgaaatagaatatccccaaagggcaagagatatcttttttcaaagcaatgaacttagaaatcgttttccaaattcacccggtgagaaaggtcatgataagttattaacactagcagctccaggtgcggtggctcacacctgtaatcccagcactttgggaggccaaggcaggtggatcagctgaggtcaggagtttgagaccagcctggccaacatggtgaaaccccatctttactaaaaatacaaaaattagctgggcattgtggcaggcacctgtaatgccagctactcgggaggctaaggcaagagaatcacttgaatccgggaggcagaggttgcagtgagctgagatcgtgccattgcactccagcctgggcaacaagagcaaaactccatctccaaaaaaacaaaaaccactagtagttcacaacatttaatgtaatgcccccggtatattgccaagtaaatatgacatgttgagtattcatgctcagggtctcatttacaatatggaaagccaggtgtagaagcagcaaagacactcttgctttgtcatcatcagcatgctttgctcagcccttccctccccacaatctgcagtcattgatgtctcacatgcaagatcattcttcttgctggatgaatcgggtgccatgatgttaagtggcatcattgtgaacagactgttattctcttcccacacaagaggctctgtgtcaactgaaatgaatgggattctatttttgagtgttttctttagaatggaacaatagtctgtcgatgtcttataccattaaggtatctagccccgcaaagttcagataatttttatagacttttcaacatcttgttttgtcgaagcaagcattcataaatttgtgtttctaatgttaatgaggaacgggtgtatctaagtgtatagctaaattgtgcttagagctgtgataatattctggggtcccttgggtgagtctagactcagttttctgctccacttttcttttatccaggtttattttctgcaaagcagtttagctaaaaccagcccagttctgaacctctggttgagtttacctttatataatgaggtactctcttagcctgtggtctgttgatgataggtgattttgccaaatgtgcatacctggggacctgttgttttgcagtccatttgacgtggaggacatgaccgcatcctcaggcgctgggaacaaggcagcagcccttcagaggagaatgtccatgtacagccagggtaccccggaaacgcccaccttcaaagaccactccttctttgtaagttcagtgtaatttcccgagtagaatcaatgcacctgagccagtgcttgcacccagcatttgaaatgcttaagagacagtgctgggagttagtaattctatcagaggtggtgagcctcctctgtttttcctctctccttgcccaccttacctattgctgtgatggtaacatgtagatttttctgaacattctctaagatcagccttttaaagaagtgcatataaataatagcctccttgttttaatcaaaaatgcttgctaaaaagctaacaaaatgtagtaacctgattcttcccactaactcccccatcttgctttcacttctgaagaggtggctgcatccttccccagacaagcccaggcggctgtctgtcttgagtgccttgcaagacactttctttgccaagctgcaccgcagccgctccttcagtgacctgccctccctcaggccgagtcccaaggccgtgctagagctctatgtgagtgtggcctgcccgggtatggagtgcttgacttctggggcttgtggcatgtgtgacttagcatgtctcttgttttatcttctctgtcttgctcactgggtatggttacagctgtactgtccttggggcgggacacttggtcgtgcatgtaactttgatagagacgcagtttgtccttctcttctaatgatccctgtttttgtgctgtgatttttctccattgtggcaaagatatccatggtaacaagattttaaacaagtttaagcctttcaaaaactggcattcggcccagcatggtggctcacgcctgtaatcccagcactttgggaggctgaggtgggtggatcgcttgagctcaggcattcaagaccagcctggccaacatggtcaaaccctgcctctactaaaaaatacaaaaattagccaggaatggaggcatgtgcatgtagtcccagctacttgggaggctgaggtgagaggatcacttgaacccaggaggcagaggttgcagttagccaagatggtgccattgcactccagcctgggcagcagcaaactccatctcaaaaacaaacaaacaaaaaattggcatcaaggaactcannnnnnnnnnnnnnnnnnnnnnnnnnnnnnnnnnnnnnnnnnnnnnnnnnnnnnnnnnnnnnnnnnnnnnnnnnnnnnnnnnnnnnnnnnnnnnnnnnnnnnnnnnnnnnnnnnnnnnnnnnnnnnnnnnnnnnnnnnnnnnnnnnnnnnnnnnnnnnnnnnnnnnnnnnnnnnnnnnnnnnnnnnnnnnnnnnnnnnnnnnnnnnnnnnnnnnnnnnnnnnnnnnnnnnnnnnnnnnnnnnnnnnnnnnnnnnnnnnnnnnnnnnnnnnnnnnnnnnnnnnnnnnnnnnnnnnnnnnnnnnnnnnnnnnnnnnnnnnnnnnnnnnnnnnnnnnnnnnnnnnnnnnnnnnnnnnnnnnnnnnnnnnnnnnnnnnnnnnnnnnnnnnnnnnnnnnnnnnnnnnnnnnnnnnnnnnnnnnnnnnnnnnnnnnnnnnnnnnnnnnnnnnnnnnnnnnnnnnnnnnnnnnnnnnnnnnnnnnnnnnnnnnnnnnnnnnnnnnnnnnnnnnnnnnnnnnnnnnnnnnnnnnnnnnnnnnnnnnnnnnnnnnnnnnnnnnnnnnnnnnnnnnnnnnnnnnnnnnnnnnnnnnnnnnnnnnnnnnnnnnnnnnnnnnnnnnnnnnnnnnnnnnnnnnnnnnnnnnnnnnnnnnnnnnnnnnnnnnnnnnnnnnnnnnnnnnnnnnnnnnnnnnnnnnnnnnnnnnnnnnnnnnnnnnnnnnnnnnnnnnnnnnnnnnnnnnnnnnnnnnnnnnnnnnnnnnnnnnnnnnnnnnnnnnnnnnnnnnnnnnnnnnnnnnnnnnnnnnnnnnnnnnnnnnnnnnnnnnnnnnnnnnnnnnnnnnnnnnnnnnnnnnnnnnnnnnnnnnnnnnnnnnnnnnnnnnnnnnnnnnnnnnnnnnnnnnnnnnnnnnnnnnnnnnnnnnnnnnnnnnnnnnnnnnnnnnnnnnnnnnnnnnnnnnnnnnnnnnnnnnnnnnnnnnnnnnnnnnnnnnnnnnnnnnnnnnnnnnnnnnnnnnnnnnnnnnnnnnnnnnnnnnnnnnnnnnnnnnnnnnnnnnnnnnnnnnnnnnnnnnnnnntccctcattggggcccttccctcatgatgtcatccctcagttatagcgtgtacaccattgtactgttgtgtgcttgttgttagacttgtccccttggtagactgcaagtccccttgggcagggcatctcaatttattctcactcaatatttgccacttaagtaggtggaaattgagcttgagtcttggagtctcaagacaaatggctgggaaggactttggaatttgaataagaatcctgactacccaatctccctgccatacccagtgtctcccacctccctctgtgctgccatgagatgtgtgcacagatcagacaaagctgagtggaaccacatggagggcccatgggttctagaagcctaaggaacccccatggatgaggtctagggagaaggctccaggcatccttcatccctcccctaaaagattccttttatctttcctagagacataaggtgtatatgaggtggggggtgcaaatacgggagggaagaaactgaaatacacaagcttggaggggaggaagaggagcaccagagcccaccacaccaacaacattgtggaccacagttcaataatcactaatagagtaaaacatcctcagtttgggaggtaaagagacagagcttgtagaggttactcaagtgtccagtgacacatcatttcactcgtcctgtggttaaagtaagtcaccttccaaccatgctacaacggacagtttgggtgcaacgaactgcatgtgtcgggatctagtggcctcagatacagcagcaatgggaccagggacccagctggaggaggaaggggagcctttgtcttcccttctgctcttcactgcatttgctgtaatgtttttatttgccgggcttattcccagcaaattttgagaatttgtcagtttctatataattaaaacaattattagcatgatacttaccatttatttactttaaaaactgaatctgggatctaagaaaaattaaccattttgggccaggcgcggtggctcacgcctgtaatcccagcactttgggaggctgaggcaggcggatcacctgaggtcaggagtttgagaccaccctgaccaacatggcgaaatcctgtctcactacaaagaaaatacaaaaattagctgggggcgtggtggcgcatgcctgtaatcctagctacttgggaggctgaggcaggagaatcacttgaactcaggaggccgaggttgcagtgagctgagatcgcaccattgccctccagcctgggcaacaaaagggaaactctgtctcaaaaaaaaaaaaaagaaaaattaaccattttgaaggggttaatctcagtaactcaaaagccctttccacagagcagcatttggcatttaggcattatacacagaccacagcacaagagagctgacttcaaaatagaaatgcctgaataaatgaatgatcttggttacctggatatttctggcctctctcttcagagttctgcttcatgaagcacagggcgtacctgtgacaccacccaggtctgcttgacagatgacttggtgtttctaggcagcctgagagccctggggtttgcctcctgcaagattgatgttccatttattagtcttttccttttatttctagagaagctatgcaaatgtatggctggccttgaattatttatggtgtggttactaaattaataaaacattttccagagcttgggatttgtgggcagagattttcaaaaaaataatttttgagaattgaagcagaacaaaacatcacaactttggaactaaattgcatggatgttggaaagttttttaagatagatgcctaaatagaaaaagaaattggtaatgttattcataactatggctgccaaatattatgagctcttggaattcagaaaacaagccccctccccccatgcaaccttttcttttgaaaaatgtcaaaccttgaaactattgccatgaactttcacctagattcaacaatagaaacagtccttgatggtctgttttcttttgccagatacacacacacacacacacacacacacacacacacacacacacggcatcaacaaataaaatgctaacattctgaaagttctgggttttttcattgtaattgccttatattctgtctggaaataaaccatgccaagccaaatgcatcatttgtattgaaaataataatgaggtatcttttatctatagtcaaatctacctgatgacatctttgaaaatggaaaggcagccgaggagaaaatgccactgtcgctcagcttcagtgacctgcccaacggggactgcgccctcacctcccactcaacaggctccccttccaactcaacaaatccagaaattaccatcacccctgcggagtttaacctcagcagcttggcctcccagaatgagggtatggatgacaccagctcagcatcttccaggaactccctgggagaaggccaagagccaaagtcacacctgaaggaggaagacccagaggagcccagaaaacctgcctcggccccatctgaggcttgccgccgacagtcctcaggtgctggggctgagcacctgttccttgagaatgatgttgcagaagcacttctgcaagagtctgaggaggcctctgagctcaagcctgtggaactggacacttcggaaggaaacatcacaaagcagctggtcaagaggctcacatctgcagaggtgccaatggccacagacaggctgctctctgagggttctgttggtggagaatctgaaggctgcagatcctttctagatggaagcttagaggatgcttttaatgggcttttacttgcattagaaccacataaagagcagtataaagagtttcaggatctgaaccaagaagtcatgaatttggatgatattctaaaagtaagtaccttttcagagaaattggattaggtttggagagaggtgtcctaagccaacattctatttaagatgaggtatcatttaaaaaaaaaatcctgtccaatcacaggattaatagctcatcatcattttaaatggcactaatatgccagtagtgcatattaagttttattttccaaacaacagatcaacttatctaaattgattaggatttaaacaaagagctctagagaatgttgaaattcccccagtccccaagttaatcattttaatcccatatgtgaagtagaggcactttgatgattacagtctcacaggcgttactggataggatccctctcagggggtcgggaaagcagggagccctttgcctggttggagtcagagttatccgtcccattgtgagagccatgagccactgcctgctggaggagactacctgctctcacaattggtccaaataaccaagtcagaatctcagattaatcatcagcaaaataatcatccattctactctagagcgggagatctacagactctccagggataccctcaatccatagggatcagacagcccaggatggaggtgggagggtaagatgagaaggatgatttcctcgcaggcgggaggtcctgataatgagatcattattgctgcatcagaatgtatctgtctccacctgcatacagattaattttttaaaaaacactgcacaagaagacagatttgaattgttgtcccaaatctcactgctacttcttgtattctttgctgctctgatttatattgtcatataaaagaaaagagaactcagatcctttttcttaaaagagcagttctttggggacctggtctgtaaaaaggcttgaaagtaaggttgcaggggcaagccgagaaccaacccacagaaagctgttgcatccctttctaagactgttttcctggctgggcatggtggctcacacctgtaatcccagcatgttggaaggccaaggcgggcagatgacttgagcccaggagttagagaccagaccgggcaacatgatgaaatcccatctctacaaaaaatacaaaaattagctgggcatggtggcacacacctgtagtcccaactactagggaggctgaggtggaagaatcgcttgagccaaggaggcagaggttgtagtgagccgagatcacgtcactgcactccagcctgggtgaaaaagtgagaccctgtctcaaaaaaaaaaaaaaaaatatggtgattgtttttatatgtagcctgcccagtggcatctgaaactacatttccaaggctttttgaccatcttatccttctctactcagtcttgctgacctaactctgtaggagatttgtgccccaggcagatgataattcaggtcctgactctccaggtcctcaaatgctcatgacagatagttcagttgatggcatagcctccgagaaacagaagggcactctgaatctactttctgtaaaatatcagttcaaaaccatcagctcagggcttgtatatgcaggctgcttgtctggtattctactaaacacctatcttttctgcaaagttgaccagctttgctttgtgggcaaaaggtattcatttcaaagagctaagacacaaattgatgccatctaaagtgaattccttagagaaatccagtagtgatagcagctcccattccaggcatctagggtgatggtaagtagctcaatccacaggaaacactaagcattattaaaaactggtgatcagagacttctttccagagtattatttcagtctgctgttgttccaaaattgtcctgctactaaaatcctcaactgcccctttctttgtcatgaccaatatttaaacacatctgtactgtacaagataaaattgtgcagacaccttgcttaggaaaaaagaccctagaagtaggtgaagtcaagaccgactccctgtctccccctgagactgctgaaaacatcactagtgagtgtgtttaggtctggggcaaatggctttgtatccagccagaattaaagcatcagctggacaaagctttctcttttctccctccttcacattcctaggatgctaaacaccttgacgatcagaaactaaatggtgctgcctcttggacggagatcactgagggtgaatgagacaactgtgatttaaaagaccgaaagacgttttcccatgtgcttttgtgccatcttgagtgtcagagacagatccctgcaaggcccttcctaccttgcgctaagaaatcagcaaggagtgtcacctaactggatggaggacatttagtgcttctaacttgcagaatttgtcccattcgacccaccccagcatcctcttgaatatttggaaatacttctctccaactctgtgcccatagcaactggcattgttttgcttgtaatgtttctgcatgtggccagcattatagaatgctccaggccagagaatgggattgctcccatgatgccagggcctggtcagggaagtggtgggacttgttccctttgaggcagagctccagaggaagcagggctgcttcttgtcatgcccaaggcattcattctttcctcagtcctcagaggaaaaattatatgctgtgagcaggtgcggtggctcatgcctgtaatcccaacactttgggaagcccaggattgctggagcccaagagttcaagaccggtatggtcaacatagggagaccctgtctctgcaataaaagaaaaaaattagcctggtgtggtggcacatgcctgtggtctcagctacctgggaggctaaggtgagaggattgcttaagcccgggagattgaggctgcagtgagcctgtgatcacaccactgcactccagcctgagtgacagagcaagaccttgtttcaaaaaaaaaaaaaaaaaaaaaaaaaaaaaaaaaaaagatgcagggcttcttacctagggaacatgggctaggtgaatttgaaccacttcnnnnnnnnnnnnnnnnnnnnttgaggctgcagtgagctgtgatcacaccactgcactccagcctgagtgacagagcaagaccttgtctcaaaaaaaaaaaaaaaaaaaaaagatgcagggcttcttacctagggaacatgggctaggtgaatttgaaccacttcctgtttctgggatttgttttgttagtcctttagagcagatgccttagatagctagcgccttttgtaaaacaccgaagacattgccacttggaattagagattggtcagtattcagcattgactcactgacttaaaatttgtctgcttgtggtattttattttggggtgagcactaggcagagggatatagcagttctgtttcccaaggctttgtggttgacatggttttgttttttgttttttttgttttttttcaactttttgttataaaaatttcaaacagaagtagagaagatcctctaatggatcccagtgtgcccatccctcaacctcctcagtgatcaactcatggccaatcttgtttcctattcttcaacctgctgacttccctctggattcttctgcaaccagtcccagatattgtgccattttatccatggttgtacttcttttttggatataaagatttttaaatgcattttttaaatgctaacaaaaaataaaaacttgaaacaaaaaaaaaagtgtggcatctccaattgagcatcgtgtgtctggtttctctttccggatatgttgatgttctccctggtgccttctgcctttacagtgcaagccagcagtaagccgcagcaggtcttccagtttaagtctcacagttgaaagtgctttagaaagctttgatttcctgaacacctctgattttgacgaggaggaggatggtgatgaggtttgtaatgttggcggaggtgctgactcagtattttcagacactgagactgagaaacacaggtaagtctgaagttagtgtctccttatatttctcctgtcacagctgatacagtagttctttgttactgtcagaggggacctggtacacatttccaggaagataaaactctccacatgagtgaccagttggcttacagttcctttttattgtcaagtgcaataaaagggtcaatattattcacctcttttgggttgcttaagggaaaataaatatctttatatttcctctttataaatagagaggaaaattttgtatgagagtgttttatacaagtacatgtgtacacatttttttttaagacgtagtcttgctctgtcacccaggctggagtgcagtggtgcgatctcagctcaccacaacctccacctcccaggttcaagcgattctcctgcctcagcttccggagtagctgggactacaggcacccgccaccacacctggctaatttttgtatttttttagtagagacggggtttcaccatgttggccaagctggtcttgaactcctgacctcaggtgatccacccgcctcagcctcccaaagtgctgggattgcaggtgtgagccactatgcccagccctcacatgtgtcttatagggttcagtgtctacaacttgaccccatgtaattaattccaaattaactaggtatacacatttctgaagaactcttactggatgacaaatttgggcctggttctccctggcttgcactttacttccactgcctttgttttgttgtgcttccctttcccaacccttcatgtttccttcaacccagtgagtctttgccagagattgagttcatcaaggcacgcatccaagtcaagtttaagtcccatggtgcatatttcttgtagaatgtaagaggggatgaccaatgactgccactggtactgcatgtctctaggtggagaatgtgaccttctctggaagcaacagatgaaggtgaaacattgtcaccttcaccgtccggtgtcctcatgcagccaaatcatgttttgagaactagagcctggggtccaaatttataactacatataaagcaaaataagcacaatggaacatacccacctccatcaattgctgtgaaagaaaacacactttcccaaaatgggggtggattgcccgctcatctttaccttggcacaatatgacgtaaatgggttttcaagttacagcaagctatgatttcaaccttcacaaatctccctgaaagatgctagtttttgtttgttgttgtccctgaagggtttcctttttcaaaataaaaccaggaaaaaaaaaaacatgagaacttgaatttaccccataagcaatctggggacatggcaaagaaaatttattaaatgaatgtaatgtttaaattatcctacatttggccaggcatgatggctcatgcctataatcccagcactttgggaagccaaggccagaggactgcttgaactcagtagttcaagaccagcctgggaaacatggcaaaatgccatctctactaaaaatacaaaagttagttgggtgtggtggtgcacacctgtagtcccagctatgcgggaggctgaggtgggaggattgcttgaacccaggatgtcaaggtgagctgagattgtaccacagcactccagcctgggcaacagagcgagaccttctctcaaataaataaataaggccgggagtggtggctcactcctgtaatcccagcactttgggaagctggagggtgaatcacttgaggtcagagttcgagaccagcctgatcaacatggtgaaaccccgtctctactaaaaatacaaaaattagccaggcatggtggtgtacgcctgtagtcctagttactcaggaggctgaggtgggagaatggcttgaacctgggaggtggaggttgcagtgagttgagatcgagccactgcactcccaaacctgggtggcagtgcgagactccgtctcaaaaaaaataataaaaataaattgttctgccttaatattttttagcttgatagaatttgtgaaatacttcttatccaaaaatttttctgcatacttgttaccttaagctgttacaggatgtagcaaagtcaggcatcaatctaaactttttttcttcttgctataagaaacattttaacaaaaaaatatcacaagcacaggttttataaatgttatacatcattgatattaaatatgtctaatttgatcaatcttattatatgtcatcagaagtattagggaagagagagagacagagagagagagagtgtgtgtgtgtgtgtgtgtattttaaatatgtattggctgctatgtgtggactgcccagacacaaactgagtgttttccccttggagtcaaatgtgaatcagaatcagaataaagcattcaaagcctctaagctctggtgctaatctttttaaattgtggacaccagagagtgtgaggctagaagcccaaatcttccctgtcccgtctagctgtgtgaaccaggacactcaaaatctctgctaatcatgtgaaacaagaccactattgccaccctccctagtacgcaggtttagtttatgaataaaattagataatcaatgcaagagatttttttaaatgtaggtgcctaccatgatataacttcatacagttcaacaagggggtttaaacaaaacgtcagaggcagaactaagcgattcctctgaatattcaaacaccctttttaacttttgtccagagtagaacatcatgtctctcttcttggcagctttcctttttccttttattcaagtagcaattgatctgaggccaggaaaaaaccttggcagattatttcttaatggtattgcctttgggaaaccacaaatatagaggacaatttaattccagaaaatttggcagatcaccctgtcaacagagcaggaaagtgcaacacattcaaaatgagggcatgtttcaaagacttctgggtgaaactacttcataagtggttcattaggcttaaaaagtagagaaagaactttgaaagcaatttgtttgcatgtccttttaacactaggcaatttggtgaccaggctgaattaagtaattttttaaaggtgtctctatttttcaagataggcaagtgaaagactgttttcagtgggtgctgttggggcccgatgcaaaccatgttgacttgacctgtggtttgtgcacagaaaaagaatagctaatgttttgcccaccttcaatagttacaggtcggttcacccagaagccagggggcatctcagtgaagcgctcactgaagacacaggagttgggaccagtgtggcaggaagtcctctcccactgaccacaggcaacgagagcctggacatcaccatcgtcaggcacctccagtactgcacccaactcgtgcaggtaggatcagcgatgaatttgtgtttgagatgccaggtgatttacataccaggaagtgtgctttcattttttagtgttgccagggaaatgagaattcaggaataagagaacagtcttgctgtggtttgagccaagtcaaaaactctgatgggcctgcccatccctctacaaccttgggtttttcatcttcgaacctaactctccagaccttcacagtagtaggtggcatatggttagctctcacttttgactcatttggtagtacctgagaataatgtgattaagggggtggggggaagccatttgtattccaccatctgcaatggagtttgaaagccagtagtgctgaatatatattaacatgaatgtcaaatgaattagtttttcaccacctggatagctaaaagaaagtgttaaagaatctaaccacagtctcctggacctgaataagtannnnnnnnnnnnnnnnnnnnatcatcaccatttagctctcattctggggacaccacagtgctaattttccttctcatctcaagcctgtttaccacttaaggtttttcaacagtggagcaaaatgttcttaaattcttttgttgcaggaaagggtttcagctgtcttgaacaaagcatttttcctcaagcatctacttaagagctttctccttgcctggttgcttttcttctaatatcattcttctcccagcttgcttgggtgtatgtggaacaggaagagaatgcagaagctaataaaatggttccagaccaggcgcagtgactcaggcccatagtcccagcactttgggaggtcaaagcaggaagattgtttgagcccaggagtttgagaccagcctggtcaacagagtgaaacctcatctctacaaaagatacaaaaattagtcaggtgtggtggcacaggcctatggtcccagctactcaggaggcggaggtgggaggattgcttgagcctaggaggcagaggttgcagtgagctgtgatggcaccactgcgctccagcctgggtgacaatggttctactcctttctgtgtctctcagagacctgtctcgatcacctggtaggcatagatgcagaacgcagacctgtactaccatgctgaattgtctaaagtatttggactctaaaacaaataggattttcaaacccagcactttgggaggccaaggcctcattaaaaaaagaaaagaaaagaaaaagtgtcaaggggatcagccaagcaggaagggtgcagaaggaggaggaatggtaacccaagagcacagaacctgttggaagacaagagtcagggtgaggagctaggggtccctcgggagcccagcagaggggcagtgttgcctccttggtaacagacatgtgatgagatgtaggagaatatgcttctccaccatagatgaagagcatcagagaagcctcagacaactgtgtgctgtgggagactggttggcaattataactcctgccacttggttagccaacacttagttgaactcttctgttgagttttgaggtcaaaaaccacaaaggtctcacaaaccatgagactgataaccaatctggtagaatgtgcagttttttttttttctgatcaaaacagacagggatttttatttatgtatgactattttctactcaccaaccatttgaacgagacagctctttgtccttgctgagcctgatactatgccaagcaaaccacttgtttctcttttagagaataatagctattttgtgagacataagagaattcttatctttgaaggagtgactgttttctcgcaaagactaattggcatgcttttagtgcaagcagtcaatgcagtgtttctctcggtaataaggccatgattataacaattcatcctttctgtggggatgagcaatggtacaaaaacagaagaggtggatacaaagatgtagattgaaggaatgagatttagaaacttaccttctggcttgcgttgattcatgtgtgagcttacttattagttatataaccacagagagataaagatgtgcattttctaagaatcataatcactacaattattttcaaaataaagcagttcattgctattgtatttactcacaggaagggtgttagtacataattgctgcactagactttgttttgtttttttgttgttgttgtttttgtttttgttttttttgagacaatctcactctgtcacccaggatggagtgcagtggcacaatcttggctcactgcagcctccgcctccagggttcaagcgactctcctgcctcagcctcctgagtagcttagactacaggcctgcaccaccacgcctggctaatttttgtatatttagtagagatggggtttcgtcatgttggccaggatggtctcaatctcctgacctcgtgatctgcctgcctcagcctcccaaagtgctgggtttgaaaatcctatttgttttagagtcccaatactttaaacaattcagcatagtagtacaggtctgtgttctgcatctatggctaccaggtgattgagacaggtctctgagacacagaaaggagtagaaccattgggcagcaaatgacttatatcctttcttctcttaggtcttctcattcttgtgaactgcacacaaataaacccacttacaacttatgtgaccttgggcaggttacttaacctctctgtgcctcaattttctcatcagtaaaatggggatatcaataagacccgcctcattgggttgttttgagaaataacataagctaacacttatacagaactcagaccagtgcctggcacatagtgagcactcatttgttatcaagagacagctctgattgtaattctcattattatttaacctgctcttaactttcagcttgaacacacacacaaaaataaaaccatgctgtgaaaaattactgcatttgtaagacaaatctatttctgcttacacaccaagacacagcctaaactgcccctcacgtttcaaaggggaagatcagattcacaatacataaaagggaaagcagctttataataaccttgtagacctactactgagaaagttccagaatttatgcacacacgaagaaatgcaaagcaacaaaaacatgcctgatttcatcagatgttgtaactggcatggaatgaggatcattatcgagctggaagaaaaacatcgcatgagtttatttagtatcatcaccacattcaggaaggatgaggctgggtagagaaagctctactgaaaacaacataattgaaacaggagttttgtttgttttaccagcaaattgttttctcaagcaaaaccccatttgtggcaagaagtctcttagagaagctttctaggcagatccaagtgatggagaaactcgcagctgtcagtgatgagaacataggaaatatcagttctgttgtggaaggtaagtatctgccagttacaccgctattcacgtaaatgatgacaccactagcccagtccactccctatgcatgttcattgctttgttggaaaaacagaaaagcattcttaggtcacaggattgagaaaggtctccaaacaaattgggctcattaatgtcacatttcggctttctgagtcaaagcagcagacacacagttttttccagagggcctccacccccagaagtcagacccagaaacaaaaacagcatccacttcacaggcagagtttcacagactttctgctggtgcggttccctttagggacagatgactataggatgctcttgcaccctggaggtggctaagacaactcctgtagtgactgtcaattggaagatcctgccagaccctgctggggaaaggtacaaatacatggatgcaaacgcctccaggagagttcctgattctaagagttttaaatgaagaatttgacctgggaaagatgcctttgaatttgtgtgatctggctatggggcacttttgtagaaaccaaaatttatgtctgttttcatatcagatattcagcagaaacagggtcttccagataatctctgattaagcctaaaacttcctctatcttctccctgtgcatttctgcctcccacatccattcccactagaagtaggtgaccttggccggtctctgaggggcatgaagaggggcaggacattcaggctgtgagtgacttgtgtcctctcctctcccagccccctcctcatgatcatgacacattcaagtgaaacattgttcctgtcccacctggtaccatgctgttcagtcatttcagtcagggaaccacctgggcagggtaaaaatttcctccagccacctgctgctacctcccatccccttcaggaaactctcctccagtttgagtccttgatcctgtatgatttctgctgtggagttataggaaatcacaagtttggaatgctgcccaagggtagagctcctgtatttcctatcactcacagcaaacgaacttgtttttgctctattttctttgctccccaagcaggatgagttcctcgtcataacttctttacccttcgggccatctgctgaccacacaggaatctgctagttccatctgaaaactaaccacagtcttatggggagaaaaaaagtccctaaagaccccccacatacacaccctttccccaacacgtcttcatctgcttcatttaaaatgttatggccaggcgtggtggctcacgcttataatcccagcactttgggaggccgaagtgggtggtttgcttgaggacaggagttcgagaccagcctgaccaacatggtaatacctcatctctactaaaaatacaaaaattagccaggtgtggtggtgcatgcttgtaatccctgctacttgggaagctcaggcaagagaatcacttgaacccaggaggcggaagttccagtgagctgagatcatgccattgcactccagcctgggtaacaaagcaagactctgtctcaaaaaaataaaataaaataaaataaaatgtgttacgagatggggggttgctcttcttttccagccataccagaatttcacaaaaagctgtctttgctgtcattctggaccaagtgctgcagccctgttggtgtctaccacagcccagcggacagagtgatgaagcagctggaggccagctttgccagaactgtcaacaaagaatatccaggacttgcagacccaggtatgaggcagcagtagagagagaatttctgtccttcagtgtgagagtgggcattggggtgggggtcgggggagaggggtcctcctaccacttgcctgcagatgggaaacacacaaaaggccatccctgaaaaaagaagtgtactgtccagggaaaacatcatctactcagatttaagaaaagaaagtgttgaactgttttaattcagaatatcagcagtgacatttaaagctactacattttggccaggcgcagtggctcacgtcagttatcccagcactttgggagacggagacaggtggatcacctgaggtcaggagttcgagaccagcctggccaacatgacaaaactccatctctactaaaaatacaaaaattagccgggcgtggtagcccacacctgtaatcccagctacttgggagactgagggaggagaatcgcttgaacctgggaggcagaggttgcagtgagctgagatcacgccactgcattccagcccagctgacagactgagactccatctcaataataataaagctactacattcttatgtattgttatttctatgtgtatacttctttcattacaatttcaccagtacgagagtgtcaaatggtatgatcactttggaaaaactgtttggcagtttctactaaagctcaatataccccctaccgttggatccagcacattcattcctaaatatgtaaagacagataaagtgctatgttcacaagaaaggacatttatatgaaggttcctaccagctttactcacaagagccaaaaattggaaacaacctaaatgcccacaagagaatggataaattgtaatatactcatagcatagagtattacacagcaatttttaaaaacaaaatacagacaaggtctcaccctgtcatccagggggaacgcagtgatgttttaacagctcactgcagcctcaatctcctgggctcaggagattctcctgcctcttccccttttgtactgggactgtagatagatgccaacatgcctggccaatttttgtacttttagtagagacagggtttcagtctcttgcccaggctgttcttgaactcctgggctcaagcaatcctcccttggcctcccaaagtgccggaattacagttgtgagccactacactgggccagcaattttttttaattaattaatttatttattttgagatggagtctcgctctgttgcccaggccggagtgcaatggcgcgatctcagctcactgcaaccttcgcctcccaggttcaagcgatcctcctgcctcagccccacccagtagctgtgattacaggcacatgccaccatgaccagctaatttttatatttttagtagaaacagggttccgccatgttgccaggctggtcttgaactcctgacctcaggtgattcacctgcctcagcctcccaaagtgctgggattacaggtgtcagccactgtgtctggccctgggccagcaatttttaaaaagaacacattgttgctataatcaataatttgaatgattctcacagatactttgttgtgtaaaaggaaaaagacaccaaaagtacatactatataattccatttacatgaagttcaagaacaggtgaaactaatttatgttgatagaagtcagattgttagttgcctatttgtgcccttccctttctttctcttcccttcattcttccttccttctttccttccttccttctcttttcctctctcacttgtctcttcctcctcctttttatctctctcctacacacacatatataatatttattcattatatattttatatataagggaagggaagggtagctatagactgggaaggggcacaagaaaaccttatggaatgcaggccgtcttccatatcttgatctaaatggcagttacacaggtgtgcacatgtgcaaaaccatccagctgcttactttactacttcactctatcttcaaccacaataaaagataaacaacttattgagccaggtgtgatggctcatgcctgcaattccatctacttgggaaactgaggcaggaggactgcttgagcccaggagtttgagaccaacctgggcaacaaagtgagaccctgtctctaaaataaaaataaaaataaaaattattgaatgaatgaatgaatgaatggtcatctatctaaagctgctttgtgtctttcccttccgaatagtgtttcgaaccctggtgtcccaaattctggaccgggctgagcctctgctttcctccagcctgtcctcggaagtcgtcactgttttccagtattacagttacttcaccagccacggcgtcagtgacctggagagttacctgagccagctggccaggcaaggtgggacatgttcttttgtcacattgtagtggtggctcaatttggcgttatctctgctcttttaaatcatggcttttggcaatgatggccttttatttttcaagtccacagtagaggtgcaatttgccttttaagtgacttttggacttttaacattagtgagccccttgttaatgaaccagggattcactaggagcaactcaatcatctggcagagaggtaccatttacaggaagctggtaaatgatttaagctttcactgtaatttatttccttcagtaatgtatttgccattagtcggatcaatcctacaggcaatactattttatattgccctttttggtgaggctttcattaataataggaagaaatggggtttcaaagaaggcaggtaggtaacatggtgggaagggaaaggaggaaaaggtggaaaactaactccagggctccatgtccagggtacaagaacagctgccagtgcaggcatgcagcaatgaagctggttcttgccattccacacggcccttcagagactggaaataaaatagcaatctaaatcaagtgaaaactccactttgggagtggagccaggtagtgaggggctggtttctggttcccaggtttgtgctttataaatccacagagccttgaccaatgcaggttaaaagggacaagaggaatgaggtgtgttctttggagctaggtgagtgtggcacggcaccaggcagcagcaacatgtctggcgcaagcccaggcttaccccttctctctccagaacatcaaatcctgcaacaacacagtcagcacattgggtggcatcatagtgaaggaagaaaaatcttccttcacccagcactgtaccagcacggagcatgggagagagtctgtgcataaccccttacaaggcagacaccagcacagaggaccaggaagagaaagcatgggcagaaagaccttgttttaggaccacaaagtcttattttataatattatagtcttcatttattgatactaaatttgtcccaatctaaatccattttctgagaaaatgtttatattactcagtttgcatcagtggcagtttacatctctaggctcttattacacggtccccaagaaggcctactcatttactaacaacaatggggaatgacaatgaaaaaaacctttaacattttaagtgtcttttttctttcattataaaagggaaaagccttcattattaaaaaaaaaaatgtaaacagagaagtataaagaaagaaattccaatctctcctcttactttttaaattgaatgcatttttcagttgaatgtacatgggttttacattccaaatnnnnnnnnnnnnnnnnnnnnnnnnnnnnnnnnnnnnnnnnnnnnnnnnnnnnnnnnnnnnnnnnnnnnnnnnnnnnnnnnnnnnnnnnnnnnnnnnnnnnnnnnnnnnnnnnnnnnnnnnnnnnnnnnnnnnnnnnnnnnnnnnnnnnnnnnnnnnnnnnnnnnnnnnnnnnnnnnnnnnnnnnnnnnnnnnnnnnnnnnnnnnnnnnnnnnnnnnnnnnnnnnnnnnnnnnnnnnnnnnnnnnnnnnnnnnnnnnnnnnnnnnnnnnnnnnnnnnnnnnnnnnnnnnnnnnnnnnnnnnnnnnnnnnnnnnnnnnnnnnnnnnnnnnnnnnnnnnnnnnnnnnnnnnnnnnnnnnnnnnnnnnnnnnnnnnnnnnnnnnnnnnnnnnnnnnnnnnnnnnnnnnnnnnnnnnnnnnnnnnnnnnnnnnnnnnnnnnnnnnnnnnnnnnnnnnnnnnnnnnnnnnnnnnnnnnnnnnnnnnnnnnnnnnnnnnnnnnnnnnnnnnnnnnnnnnnnnnnnnnnnnnnnnnnnnnnnnnnnnnnnnnnnnnnnnnnnnnnnnnnnnnnnnnnnnnnnnnnnnnnnnnnnnnnnnnnnnnnnnnnnnnnnnnnnnnnnnnnnnnnnnnnnnnnnnnnnnnnnnnnnnnnnnnnnnnnnnnnnnnnnnnnnnnnnnnnnnnnnnnnnnnnnnnnnnnnnnnnnnnnnnnnnnnnnnnnnnnnnnnnnnnnnnnnnnnnnnnnnnnnnnnnnnnnnnnnnnnnnnnnnnnnnnnnnnnnnnnnnnnnnnnnnnnnnnnnnnnnnnnnnnnnnnnnnnnnnnnnnnnnnnnnnnnnnnnnnnnnnnnnnnnnnnnnnnnnnnnnnnnnnnnnnnnnnnnnnnnnnnnnnnnnnnnnnnnnnnnnnnnnnnnnnnnnnnnnnnnnnnnnnnnnnnnnnnnnnnnnnnnnnnnnnnnnnnnnnnnnnnnnnnnnnnnnnnnnnnnnnnnnnnnnnnnnnnnnnnnnnnnnnnnnnnnnnnnnnnnnnnnnnnnnnnnnnnnnnnnnnnnnnnnnnnnnnnnnnnnnnnnnnnnnnnnnnnnnnnnnnnnnnnnnnnnnnnnnnnnnnnnnnnnnnnnnnnnnnnnnnnnnnnnnnnnnnnnnnnnnnnnnnnnnnnnnnnnnnnnnnnnnnnnnnnnnnnnnnnnnnnnnnnnnnnnnnnnnnnnnnnnnnnnnnnnnnnnnnnnnnnnnnnnnnnnnnnnnnnnnnnnnnnnnnnnnnnnnnnnnnnnnnnnnnnnnnnnnnnnnnnnnnnnnnnnnnnnnnnnnnnnnnnnnnnnnnnnnnnnnnnnnnnnnnnnnnnnnnnnnnnnnnnnnnnnnnnnnnnnnnnnnnnnnnnnnnnnnnnnnnnnnnnnnnnnnnnnnnnnnnnnnnnnnnnnnnnnnnnnnnnnnnnnnnnnnnnnnnnnnnnnnnnnnnnnnnnnnnnnnnnnnnnnnnnnnnnnnnnnnnnnnnnnnnnnnnnnnnnnnnnnnnnnnnnnnnnnnnnnnnnnnnnnnnnnnnnnnnnnnnnnnnnnnnnnnnnnnnnnnnnnnnnnnnnnnnnnnnnnnnnnnnnnnnnnnnnnnnnnnnnnnnnnnnnnnnnnnnnnnnnnnnnnnnnnnnnnnnnnnnnnnnnnnnnnnnnnnnnnnnnnnnnnnnnnnnnnnnnnnnnnnnnnnnnnnnnnnnnnnnnnnnnnnnnnnnnnnnnnnnnnnnnnnnnnnnnnnnnnnnnnnnnnnnnnnnnnnnnnnnnnnnnnnnnnnnnnnnnnnnnnnnnnnnnnnnnnnnnnnnnnnnnnnnnnnnnnnnnnnnnnnnnnnnnnnnnnnnnnnnnnnnnnnnnnnnnnnnnnnnnnnnnnnnnnnnnnnnnnnnnnnnnnnnnnnnnnnnnnnnnnnnnnnnnnnnnnnnnnnnnnnnnnnnnnnnnnnnnnnnnnnnnnnnnnnnnnnnnnnnnnnnnnnnnnnnnnnnnnnnnnnnnnnnnnnnnnnnnnnnnnnnnnnnnnnnnnnnnnnnnnnnnnnnnnnnnnnnnnnnnnnnnnnnnnnnnnnnnnnnnnnnnnnnnnnnnnnnnnnnnnnnnnnnnnnnnnnnnnnnnnnnnnnnnnnnnnnnnnnnnnnnnnnnnnnnnnnnnnnnnnnnnnnnnnnnnnnnnnnnnnnnnnnnnnnnnnnnnnnnnnnnnnnnnnnnnnnnnnnnnnnnnnnnnnnnnnnnnnnnnnnnnnnnnnnnnnnnnnnnnnnnnnnnnnnnnnnnnnnnnnnnnnnnnnnnnnnnnnnnnnnnnnnnnnnnnnnnnnnnnnnnnnnnnnnnnnnnnnnnnnnnnnnnnnnnnnnnnnnnnnnnnnnnnnnnnnnnnnnnnnnnnnnnnnnnnnnnnnnnnnnnnnnnnnnnnnnnnnnnnnnnnnnnnnnnnnnnnnnnnnnnnnnnnnnnnnnnnnnnnnnnnnnnnnnnnnnnnnnnnnnnnnnnnnnnnnnnnnnnnnnnnnnnctcctaccaaaaagagagaaggaaaattaaagaatcgtgaacatgctggtagcaggatatatacgcatctgagtgtgcagtttatggggagcaggtctgtgatactctttagtcacactgaggggccagtgttcgaaatgtgcccttagaaatagcaacaggggcccaggcgcggtggctcacacctgtaatcccaacactttgggaggccgaggtgggtggatcacctgaggtcaggagtttgagaccagcctggccaacatggggaaaccctgtctctactaaaaatacaaaaattagccaggcctagtggcacatgcttgtaatcccagctactcaggaggctgaggcaggagaatgacttgaacccaggaggtggaggctgcagtgagccgagattgcgccactggactccagctgggtgacagagcgagactccatctcagaaaataaaaaagtaaaaaagaaataacaacaggtaagacatagccttcctttggctattctatatgcatcttttacttttagggcattagccacaggtgaaatattctcttgttattccaattcagctctcatgtttattccctcaaattcatatttcatgactaaaccttcattatgtgactactgtgtccctggtattatatggagggttttgtggacactgtagaaataaaggaaaagcagtccttacccttgaagagtttccagtagtcagaaaaacaagaaataatacctgtcaagtactgtgtacttcctaaacaccaggcaccgtgcagcatcacttagctgtcttatctctaacaaggtcgatgctatgatcccactttatggattaggaaactgagcctccaaggagttaaacttgactaagactagttaagtaacagaatttggattactacctagaaatgtttgactcccaaagcctgaaccctttccatattttcttatatggaatagcaaaagttattacattaagttcttaaaactagatgcaaagcactaaagcaacacaaaaatgcctctgtgagagctggtgtcactgtaaacccggaaccttgcttcaaggatcatagctattgagacaaaataaaagttgtgtgtgttggttcattattttatgcttttccccacacctagacaagtaggaaatatccactgtcctccaactatactgttgcattcagatgtggttgcttctttaattatccaggactggtcagaggagatgctggtggcctctgcatggtgacaggggcttctggctttataatgtgccttctgtttgcttcctggaattgttatgaatctaagcagccaccaattcttaggcaaccactcaaactaaagtgagcaaccttatgactcaacaggcatttaacaataaataaataggccgggcgcagtggctcacgcctgtaatcccaacactttgggaagccgaggcgggtggatcacctgaggccaggacttcgagaccagcctggccaatatagtgaaactccatctctactaaaaatacaaaaaattagctgggcgtggtggtgggcacctgtagtcccagctactcgggaggctgaggcaggagaattgcttgaactcaggaggcgaaggttgcagtgacctgagatcgcaccattgcactccagcctgggtgacaagagcaagaactctgtctcaaaaaataaataaataaataaaaataaataaatacgtaaagtgagcaacctattcagtaaccccaaaattaacagggtcagctatcatctctgaagttaacatagacaggtttgccctatcacctagcatgttagcttggcacctaacaagtacctagtcatctcttcatgggacaagtgaattgatattttcagatatatttacacacatggttacaatatttgtgttcctgaaatgagggagacaaatatttccaccaacataatcaaactaaatgaattatgactcagcattttgcacagacaccatcgattggtttctgacctccagggccagcccttgttaaaattataaagtagatgaacttcagcacaagactcctctctattttcccctgcccatttctctgtctctcaggtttgttttggattttaatggcgggatcctactttgttacccaagctgggacatgcaccacccaggtggtgcaatcatagctcactacagccttgaactcctgccatttccctcttttactcatatcaagggacttgaaggctaactatcaaaccataggtttaccccttaccaaaaccacatattccaagacttaaatgggtgatcacaacttaaattgtccttcctctcgggcatgtttgcattataacaatgcttcaatagggatgaaatgctaaagatgaccttggtgtatatccacctctggaaatggtagctttggagggggttgatggcaagtggcacttcagggacagtcaccttgttccttttgtactggaggctagtccctgtgtagctgcccacttgtggattgaggcttatttcctccccttttggctgctcaccctcaagtgagtagaggccaaaaggcaagccagagagaggttttcaaaagccaaagcccaggctctaactatttaggtctagtaaagagctagttactgttactgcttttgttcttgctgtaataacctatactgcatatctttgtttcctttaagagtgttaaaactttaagagtgttaagccacagagctgggcactgtggctcannnnnnnnnnnnnnnnnnnnccgagattgcaccattgcactccagcctgggcaacaagagcaacactccatttcaaaaaaaaaaaaaaaacagtgttaaactggctgggcgcggtggctcacgcctgtaatcccagaactttgggaggctgaggagggcagatcatttgaggtcaggagttcaagaccagcctggccaacatagtgaaaccccatccgtactaaaaatacaaaaattagccgggtgtggtggcaggcacctataatcccagctactcaggaggctaaggtgggcgtatggcttgaacccaggaggcggagtttgcagtgagctgagatggtgccactgtactccagcctgggttaccaagagagactctctcaaaaaaaaaaaaaaaaaaaaaaagagtgttaaaccatatgtccacacaaaaaaaccttgtacacagatgttcatagcagcattattcataataaccaaaaagtagaaacaatctgaaggttcatcaactggtgaataaataaaatgtggtctagccatataatggaatattttttggccataaaaagaaatgcaatcctaatacatccttcaacctagatgagccttgaagatactatgccaaatgaaagagcaagacataggaggctacatattgtgtgaattcatttatatgaaatgtccaaagtaggcaaatccatagtaatggagagtagattagtggttgccagtgactggagagaaagggtcttgggaatgactactaatgggtacaggatttctttttggggtaatgaaaatattctgaaatcagatgatggggatgatttgtgaatatactaaaaaccattgaattatacatgctgtagtctaaatattatggtatataaattatattttcaatttttttaaatggaattgtcctataaaactgagaaaacaggggccgtgtgcagtggctcacgcctgtaatcccagcactctgggaggccgaggcggacggatcacaaggtcaggagtttgagatcagcctggccaacgtggtgaaaccctgtctctactaaaaatacaaaaattagctgggcatcatagcatccgcctgtaatcccagctactagggaggctgaggcaggagaatcgcttgaacccgggaggcggaggttgcagtgagccaagtttgtgccattgcactccagcctgggcaataagagtgaaactccatctccaaaaataaataaataaataaaaatagaaaataaaagtaattcagacaaatagcaagaaatgcacaatatagcccaacaaaatcaaaagttagtcctctctttccaccctcaattctcttcaagagtaattaagtttcctatgaaccaatatgacatatagtgattcttattcatttgaattaatgttaagtactacacattttatcaaccatttaggaagaaattagcttggtaaaaataagacaattggccgggtgcagtagctcacgcctgtaatcccaacactttgggaggccgaggtgggcggatcacaaggtcaggaattcaagaccagcctggccaatatggtaaaatcctgtctccactaaaaaaaaaaaaaaaaaaattagctgggcgtggtggtgggcacctgtaatcgaggtaggagaatctcttgaacccgggagatggaggttacagtgagccgagatcacaccactgcactccagcctgggccacagagcgagattctgtctcaaaaaaaaaaaagataatgtacttttatgcagagattttttaaacagagcattcatttgccatgtatcaaactcagcaaatctcaaactgacattaccaccctcctcactggaatgtactgcctcctcctgtcttccttatttctgactgaatacctttttttcaatcaacttccctactgaaatctaagccatcatttccattccagttcaaacatttttgtgaaacttaccctggcactccgtaagatgtctcttctccaagtgactgacttaccttgtagatttcttatgggacctaatacatttcttctcttcagttccttctaaacagtcttagcatttctactacatctaagggctccttaaaagccagaatcataactctctcccaattttatttaataaattgatcccttatattctcctagagtcatggactctaggagaatatttcaaatcttggaatgacacatgagacaaggggcaggagcttgcaggcctttatgatgggacataaagaaagggattaacaccttaaaagaaaaagttaatgatctgggatcaaaaacagctctgagaaattttgccttcctcgttacttggtttaaaaaattacctttaggtggccaataaaagcccacggtcattatgttactcaataaattgatcccttatgttctcctagagtcatagtagatctaggagaacataagggatcaatttattgaataaacgactcttttaattaatatgaatttcaatggctttttttttcttgctctgaaggtagtgcaaaatgtgtaggttatatgctatagtttatctcagagagtaagaatgaggtatacctcttaaactacgaacaaaccaaaatgccttcatgaggtccctccttctctttcaggccttgctctattactgtgaagcactaacaaagacaaacctccagctccagaaagcagcttgcctggctctgaaaatccttgaggtaaagcccagccttggagctcccctggcagctcagcttggagccaggctaagctgagtgtatataacagcttttctttcatgtttgaaagtacttttttagcagtatttcttgtcttctttgcaccgtatgttagttttagtatttttctcccttaaacagtaattacatgtgactttgttttgttaaagtcaataagtggcagaaagcaatcatgttttgcactagcccaagggaaccagtttgcctttaggtcagtattagaaaagtacatcttattagccggcacagtggctcatgcctgtaatcccagcattttgggaggccgaggccggtggatcacctgaggtcaggagtttgagatcaacctggccaacatggtgaaacctcatctctacaaaaatgcaaaaactagctgggcatgatggcaggtgcctgtaatcccagctactcaggaggctgaggagggagaattgcttgaacccaggaagttgcagtgagccaagattgtgccattgtactccagcctgggtggcagagccagactctgtctcaaaaaaaaaaaaaaaaaaaaaaagagagagagagagaaaaggaaagtatatcttattttaaaagggagatgagatgtatggtgatttcactcatttttattgtgaacaacaaaaagcaaggacaaataagatttgaaaagaagtactaaattcagtatgccactgaattcccagatccttccccgcaagctctctttattaagcagagaaccagttttgattgtcataaggaggtgtcgtgagcagggagagagctagaatgtaaacaagtactaaacgaatgggaactcctgacatggatgtttccctttcaatggcaagatgtaatgtttgacctactttcatcacaaaaaaataagacaaatcagtcttgagaaaagaatgagagaaggccaggtgcagtggctcatgcctgtaatcccagcactttggaaggctgaggcaggcggatcacttgaggtcaggagatcgagagcagcctggtcaacatgatggaaccccgtctctctaaaaatacaaaaaaaattagccaggcatggtggcacacacctgtaatcccagctactggggaggctgaggcagaagaatcgcttgaatccaggagacagaggtttcagtgagccaagattgcaccactgcactccaacctgggcgacagagactccatctcaaaaaaaaaaaaaaaaaagaatgagagaaggccacaccttagaacttgccaaaatcttggaaaagagctgcaggcctgataaagaaaggaattaatacctcaaaagaaaaagttaatggcctgtgatcaaaaacagctctagggccaggcatggtggctcatgcctgtaatcccagcactttgggaggctgaggccggtggatcacctgaggtcaggagtttgagaccagcctggccaacatggtgaaacctcatccttactgaaaacacaaaaattagccaggcgtggtggcacacacctgtaatcccagctactcaggaggctgaggcaggagaatcactttaacccaggagacagaagttgcagtgagccaagatcacgccactgtactccagtctgggtgactgaatgagactctgtctcaaagaaaaaaaaagaaacagctgtaggaaattttgccttgttacttggttaaaaaaaaaaattaccttcaggtgcccaaatagaaagcccacagtgattgctatttgggtgctttcctgatatccagtgatatatcagtgacagatgtctgtgatacagacaaagtaaataaagacataaggatacagtgatctgcacgggttttcatactctgaatccactagactgtaaattcttgaggaccagaaccatgtctggtttactgtggaatctctcatgccttatgaatagtctggttcatggagtgctcaataaatatttgtggaacaaacaaatagaagaattgtcattaatggcctttacctcctcctctattttagcatataaactaaatagtaagaattttttaattagagccattttggaatcagtgagattcagtggaaagaaccagggaaaatggattctactctggaaaagcaagctcgtcacttcactcctctagaccaggagtgtgctgtggaatgaggaatttagctgatcatcagaattcctgaaagtaagaactctgggccccatcccaggaaattctgatatagtgcatccggagtggcacccaggaatattgggtttcagacactcagctaggtttgaccccataggtaaagtggtttttagcattcctaccagctggccgggcacagtggcttacacctgtaatcccaccacattaggaggccaaggcagaagaattcgactagcctgggcaacatagtgagacctcatctgtaccaaaggttaaaaattaaaaatcagtcctggctactcaggaggctgaggcaggagaattgcttgagcccaggaggtcaaggctgcagtgagctatgattgctccattgcactccagcctgggcaacaaagtgaggctaaagttcccaccagttgtgaaatgccaagtctcgtggtactctagacctaaatgtcaaaacacgatttaacctatttttcccccataggctactgaaagcattaaaatgctggtgacattgtgtcaatctgatactgaagaaatcagaaatgtggcctcagaaaccctcttgtctctgggtgagttttattgttgttgtttacatgattgtttgcttctggcactctctaacggatgttcccttttagatgttcccttctccagtaaggagaagtttcatgtaccctgtttagcagtttccccgctgtaggctgtcttctcacacacagagtacgaagaactgatcagtgtccatctcaccccaactccttgttctgtctggatgctgagagtgaactatattgtctggagactttctatatggattgatcagtctgtgtactatttagaatcaagaacacagaagtcaaaccataaagcaaaggcaataggaatccaggctgtgttgccaggtggggttgacactccctggaggacagaaattgggtgaggtaccagagatgcatcccagggaatgctgtaaatccccaggtatctcagcctcaccctgactcccagattaacctctgactgccctgtggcctctgcccatctgagccctgatacctaagaaaagaattggagtacttattttattctgaaatatccagataatccttcctcttcactttattttatgaaggttcatgcctagcaggcattatacatttattcttttttggggacttgggagggtggggaaagcccttcttaactctgtattaaaaagtataaatagctgggcttggtggctcacccctgtaaccccagcactttgggaggccaaggtgagtggatcacttgaggtcaagagttcgagaccagcctggccaacatgatgaaaccatgtatctactaaaaatacaaaaattagccaggtgtggtggggtgcacctgtagtcccagctacttgggaggctgaggtaggagaatcacttgaacccaggaaacggaggttgcagtgagctgagatcatgccactgtattccagcctgggtgacagagcaagactctgtctcaaaaaaaaaaaaaaaagaaaaaagtataaataattattataaataattttacttcaacaacacaatcttaaagtataaaaactatgctcctagaaatcctcagacataatccaatcaatactgcagcttagaaaaaagctacccttgtttagtgatactaacttaacaacatgaagaagaatctcatggcatttataatcactgtgaaaatcccatttattgttaggccctctttcttacaattatgggtttaacaaggcttcattctgctattgaatatatgatttcttccacagaaatcttagccagtatatatttgtttaaagaataaaagttactccttatggttgtattaggcatagaaattatttaattctctaaaaatgtaccaaggtattattagtttaaactcctttgtcccttcatattctaaaataaccatgaaggtaagccaggcgcttataaagcatagccaacgaagcttctatttccagtgtaacctaaggaagctgatcctacagaatgtgccccgggcctcactggagctgtgcaaacagcagcatctccagaagccatcaccatacctgcttcaccttagctcttcatgcacactgctcatatcagccctgggccctctcacaccaccagtgtgcagtgctcaacactggctgcacatttgccagggaagcttaaacaatctactcccaaagattctgctttcatcggtctaagtgttccttggcatcaggattttttaaggattttttgaagcctcccaggtgattctaatataaagtttgagacccccctgaagtcaatattatgaatcttctttgaccctaatacacaaatactggcacatttttctcttacacaaatgactgaattaatatagtgaggatagtattttcaataggaattgataaaatgccctatgacaaagggcagaaggtcattgcgggcacttaaaggactcagggctgcaactatttaccaactagtatggaatgatttcgacattttaacctagagctgtccaacagatccctccatggtgatgggattgttctatatgcgcactgtccagtatgacagcagccatcctaaatggctgttgggctgttcacctttgccaccatggaggaactgaagttttaagtttactcaattttgaggatagctgctccttgacttacaatggggttacatcccaataaacccgttgtaagttgaaaatactgttaagtcaaaaatgcacttaatacatcttacttgcagaacatcatagcttagcctagcctaccttaaacatggagtctctctctatcacccaggctggagtgcaatgatgcaatctcgtctcattgcaacctctgcccccgagttcaagcaattctcctgcctcagcctcccaagtagctgggactacaggtggattccaccacacccaactaactctttttttgtattttttggtagagatggggtttcactgtgttgatcaggctggtctcaaactcgtgacctcaagtgatccactcaccttggcttcccaaagttctggggttacaggtgtgagccaccacacccagctgaacttctgattaggcacaactatttccatctttgtctcacttgcattacatgtatgaaagcctgcttcttatcacttgtctttgcattttattttctcattttctaaatcattttttaaagtagaaaaatagaacaaaacattaaaattatttgcaattgcatcctaactgttcaaggtggcgttacggacaaaactgaactagctggtggctggtagaaggcatctctgtatgtttacatagtaaaaagtaatttttagctgaagtttgaaagcctaagattgattttaccacatatcatttagatgtatcgatatataatgtatacaagtaaaagttatgtaaaagttcagtgcattagccatattgaaatccctaatgtacttaaaatataatccatacaattgctctaaaataaatcgattatatgaaatcatcaacatcaaatggccataagacttctactctgtttcataccctggcattctgttggtctctggcattaattagctcaaaagttcttggttgttctaagcattacctggaaaacaatgacataattaggaataacaaaagataacttttccttaccaaaagttagcatagcatattatagcaacccatccctaaacaaatggcactatgttactttgagtaattaataaaaacgttaagtttgaattggtattcatgtttaatgttctgtatttaggagaagatgggcggctggcatatgaacaattggacaaatttcctcgagactgtgttaaagtcggaggtcgtcatggaactgaagttgccacagccttttaattacaggttaactgcctaacagctgtcttaatatctggcccttttcatcaggatggtgctgtggtttgggctggaaattgtttagagcctgagagacacgacaactgaaataaaaatgtaggccaggtgcagtggctcatgcctgtaatcccagtactttgggaggccaacgcaggagaattgcttaagcccaggaggttcaagaccaacctgggcaacatagcaaggccctgtctctagaaaaaaaatagtttaattagtcaggcgtggtggcatgcacctgtagtcccagctacttgggaggctaaggtgggaggattgcttgagcccagaagattcaggctgcagtgagccataattgccccactgcactccagactgggtgacagagcaaaaccctgtctcaaaaaacaaaacaacaacaacaactaaaaaaacatgttatagaaagaattcagagtctcgtttcacagtacctatctacttttcctttggccaatatagaatagggctatggtataattcaaatatattacatcgtcgattgtgtctaataatactcagtgaaagagtccatcttatcttaatatgtatgaaatttaaaaatagccatctttgtacttttttgcaagtttctctataagcttgaaatagtcatgtgatacttcgacaaacatcatatgccttgcagtttttctcggtcgtgttctcagggttgagtagtccccttagctacctaactttactttcaatacaaagcacaaaaaagaatatcttcaaataaaagtttgcctgcagaacctggcaaaatgacccattaggagagtttagatgttttaattttatgtgctcccagctactctggagtctgaggtgggaggatcacttgaggcagaggttgcagtaagctgagattacactactgcactccagcccatgtgacagaggaatgagagccagtctcaaaaaaaaaaacaaaaaactcccataatttattttgtttcttttccccatcctgaaaattcccaaatcatgtttccattatggaaaaatgataagtaaatgactaagaactacattaagattatgcctatacacttaaacaaaaaactcaaagcttatgcttttttttttttaattaatgagagctattttttatgatattcttaccataggggtgttttgctgctaagacaaatcaaaaccaaaagctgtagattcacaaacctgtgatgctctttgaggtggaggaacctagaagtcagagaaatcctaatggagtaggagtggaggaacatttaaagtggtccctccttctgtaaaaatgaccgtgggattagaaagaaggacatcctgaggggtggttactgcccccagggaaatcactcactggtaggattccctggccaaatagttcaaacatcaggtcccattattgcttcagtatcagagatgcaagttcattaagcaaagtacaagaccattcagtagctcttattaaaatatcttttcttcctctaaagagtgtacaaggtggggtatgccaaggtatcaaaacaatatatgtgagtgtaatttaaactgtggaatatcaactgtactatggacgtgtttgtatcatttagatgtcattttaaatatttacattttagcaagacttttaaaaaggactcatttcatttcaaagtgcaaattgtttgccaggcttctggcaaatggttctttcaactgtgaacttatcgtgtacatatctgtatatttataaatattatatatattcatacatccttcactttaaaggtacattgtacagtctgtagttaggaggtatagcctatagcttatgttaaatggttgaaatggttctttttatagaaagtcaaacacagatgttacaggattttgtgtttggtttgtcattttttttattttttattttgactattgcatgagtaattaattccagatcttttgtattcacttctgtattttatgtttggttgaggggtgcttttagttgtgtggcatttgtattcattgatctttcagtcatgtaagttaaaataaaaattatttttgaattactagcatcatgtgcagtctgatgttattttttttcacatgccctttctgagttggtatttacagaacacactgcacctcattttcacctttattttattttatttatttattttgagacgaagttttgctcttgttgccccggctggagtgcaatggtgcgatctcggctcaccgcaacctccgcctcccgagttcaagcgattctcccacctcagcccctcgagtagctgggattgcaggcatgcaccaccacaccctgctaattttgtatttttagtagagatggggtttctccatgttgatcagctggtctcgaactcccaacctcaggtgatctgcccgcctcgagctcccaaagtgctgggattacaggtgtgagccaccacagctcgtgcttttattttcaatttgaaattcctttatctctaaatagagataataaatctcagtttgttgtaaagctaattggagagaaaacagctaagtttcactgttgtatctatgagcagagactgtgagctccttgagggcaaacaggcatggtggcttaccccaagatcgtgccactgcactccagcctgggcaacagagtgagattctgtttcggggaaaaaaaaaataaaaagtgccttcactgatttgtgtatgttctgttcccactcagaccccaccagcatcatcacaaagaagcccttgactttcaactctgacagtatttaccaagtgactcattaaataccagtgattgcttttactgagtcagtggtacaaacattttcctctataaggtttgctactatactgtttaactaaattgccttagttactttacaaaattgtaaagtaaaattgtaaaccttagttcactgaaaaatgccagtacttctcgctgtatcagaaaaactcaaataaaatacttttatccctgacttttcctggagacagtacctcttagtaaacaaatattatcttttgattttgagacagtcctaagtacaccttgttcaaggaataataattgtttgctaaaaattagaactctaacttctcatgcattcaacaagtatttgttgcttacttactatgaacgaggtgtatgccaaggactgttcttggcactggaaatagagtagtagagaaaaataaaagacacaacaatccctgccctcccaggccttatatcctggcaaagcgaagacagcaaagcagagaaggggaaaaatgattgcacaaggtggggtgaagacagacacagggagaaagcaaagatcacaagtttaaagagagtagtcaggggccggcacagtggctcacacctgtaattccagcactttgggaggccaaggctgaggatcccttgaagccaggaaatcaagaccagtctgcatggcatactgaaactcccatctctacaaaaattttaaaaaccagctggacatggtggcgtgcaccagtggtcccaactgcttgggaggctgaagcaggaggattgcttgagcccaggagtttgaggctgcagtgagctacgatcgtgccactgcactctagcctgggtgacacagcaagaccctgtgtcaaaaaaaaaaaaaaaaaaaaaaaaaaggagtgcaaaggcctcacagaaaattacatttgaggaatgacccgaggagctattgggatgagtcacgtggattatctctgggaagaaccttccaggcagaggcaactggaggcaactaaaatattcctctctaaaatgctggagattatagtgaaaaggttaaaacagggacatattctgccactcctttctgccttggtcagctcataaccagagctcagagacagcactgccagaggacccaggaacagactttactcttcccatcaacttaccttcaggcattttctcacctttcggaagcctgaagatggtcttttctttgtcttgtcactagataggattcatggctcttagttaaaatgctatttaagcaaagcccctaagccactgcctagagagagaaatactttggaactgaagtctctcctgcacattgggtacaacacacattaataaacttccgtttatttttcttttgttaatctgacttttattttcaggacagtgtctcaactaaaaatgtaaaaaggggaaaaaaagaaatgatgttttctcccctgcacaacagtaagtacaaaagccttgaaaagaggccatgcttggtgttttggattttctagtacccacacttaagacaaagaaaaaagaacaggtgatattaattataataatatattttatttaacctaatgtaaaacatttcaaaatatgatcaatataaaaattattgaaatattttacagtttttcctactaagtcttcaaagtccagggtgcatgttgcactcacagcacatctcaactgagactagtcacatttcaaatagccatgtgtggctaccttattggacaaggaaggtctgtttttcccaattgtcccagtaataccctttatagcatacacaaacacacacacagagagacacatacacacgtgtttatgtacagaatccaagcagggattacatttttatttttatttatttatttatttttcaagatggagtttcgctcctgttgcccaggctggagtgcaatggcacgatctcggctcactgcaacctctgcctcctgggttcaagcaattctcctgcctcagcctcccgagtagctgggattacaggcatgcgccaccacgcccggctaattgtgtatttttagtagagacggggtttcgccatgttggtcaggctggtcttgaactcctgacctcaggtgatccgcccacctcggcctcccaaagtgctggcattacaaccatgagccaccaccgcgcctggccatttatttttttattttttattttttggggatggagcttcactcttgtcacccaggttggagtgcaatggcatgatctcagctcactgcaacctctacctcccaggttcaagtgattctcctgcctcagcctcctgagtagctgggattacaagcgtgcaccaccacgcctggctaatttttgtatttttagtagaaaaagggtttcactgtattgaccaggctggtcttgaactcctgacctcagatgatccacatgctttggcctcccaaagtgctgggattacaggtgagagccactgcacccggcctacatttttattttagttgtcatgtctctcaggctcttttaatctagcagagtaaccccaatttttttaagccttcacacattaaaatatttgaagagcatatgtaggtatattctgtagaatgtctcaaatttgggatatgttttaaagtagagccagtacattcattgataagttgaaaatgagatgtgagatagatagaagccaaggatgaatctagaattttttacctgaacaactagaaggatgtaataccatcttccaagatatagaaactgagaggcagccagtctagggaggaagacctggaactctgttttggacatgttaaaactgaaaagcgtcttggacattcaaatggggatatcaagcttgtgactgaatacgagtctggagttcaggtgagaaatccagttaaagatataaaattggagcaggcgtagtggctcatgcctataatcacagcactttgggaggcaaaggtgggaggattgcttgaagctaggagttcaaaacagcctggacaacatagtgagacccccatttcttaaaaaaaaaaaaattaaaaatttgctaggtgtggtggcctacagtccctgctactcaggaagttgaggcaggaggatcacttgagcccaggagatcaaggctgcaatgagctatgattgggccactgcactccagcctgggcaacaggggaacatgtctcaaaaaaaattatatatacatataattaatatatatataatatataatatatataactgggagtcttcagcatatgggtaatagttaaagccataaactgcttgatcttatctaggaagtatagataaagaaaaaaggaccgggcatggtggcttacgcctgtaatcccagcatttaggaagcctaggttggtggattgtttgagcccaggagttcaagaccagcctgggcaacatggcaaaacctcatccctacaaaaaatttagctgggcatggtagtgtgcacctgtggtcccagatactcagaaggctgaggtggggggatcacctgagtccaggaggtcgaggctacagtgggccaagatcatgccactgcactccagcctgggggacacagacagaccatgactcaaaaaaaaaaaaaaagaaaaagaaaaagaaaagaaaagaaaagaagaacacatacaaagactgatgagccttgggccctccaatatttagaggtcataagaagaggaaccagtaaaggaaaatgatgagtggccaggaggagaaaaattaggagtgtggtatcttagaagctgggtgaaaagtgtttcagagagaaaggagtgtcaaatgtcaaagactgacaattcaatgaccctgacaggcaatgtcagtggagtcatggggttgaaatcttgtttggaattcatccaagaaagaatgagaaagactggagatggtgagtatagcagctctttaaagagctgtactgtaaaggagagcagggaagtgaatgtgcagtcgctgtgggaagaaagcatatgaagtcaagagagttttctttctttaatgagaaaaaaagcacagcgtgtttgttgataatgcaaagggtccagttgagatggaaaaattaccaagataagagaagaaccgaagagcaacatccttgagtgaggtgagaggagctgattgacatctactgcacaaacagagagggtatccacagtaacaggaggaaagacagagtctatgggtaccgtagacgcagataggtgggtggatgcactggtaagagttatgcaagttctcttttcattgcttctattttctcagcaaaataagataaatctatgatgtagagaactctctttgggtagcaaacaagcaaaagaggtaacaatactacgaaagatcaatggaaagaagcaaagtacatgtgggaataatcagactagaacgggcaagttccaaatataccctgcctgagcaaaggttcaaagacagtagtgagattcatgcgcattacgggaaacaagtttaagttgaggttttgtacaccagagaaataaaagtaaaattgtttagtccaaatagtagaaggctttcaatgacaagctgaagaatttaggcatatattgctttcccctggtttgtatattccattccacagtgttgctaagtgatgcattccagagttcttgactgtgaactcctgtgactgccagtggtgtacctgaaggaccactggcctttttacacaatggctaacagccgattttcttgtacgcaaatttgggttaagatgtatgggtattttgcggggctgtgtcggcgtctccagaaattctggcgtgtcactgttaagggcttttttgttaagaagaaggaaaaaaaaatcccttcagctgagacttattttcatgaggaaaaaattgttgtacttggccaagtgttgatgaatgaatctctacccattgagaagagagctcaagctgcccagaaaattggactgctggccttcacaggtactgatctaaatggctgtgctaaaatgagtgtttcacgacactcattttataacactgtagtttagtaatttttcttagctgtaatcttaaaattctgataacatttcattggatgagggatatttgctaagcgaacacaaccaggttttattcaccttgaaatactcactctggccaggcacggggctcacgcnnnnnnnnnnnnnnnnnnnnnnnnnnnnnnnnnnnnnnnnnnnnnnnnnnnnnnnnnnnnnnnnnnnnnnnnnnnnnnnnnnnnnnnnnnnnnnnnnnnnnnnnnnnnnnnnnnnnnnnnnnnnnnnnnnnnnnnnnnnnnnnnnnnnnnnnnnnnnnnnnnnnnnnnnnnnnnnnnnnnnnnnnnnnnnnnnnnnnnnnnnnnnnnnnnnnnnnnnnnnnnnnnnnnnnnnnnnnnaggttgcagtgagctgagatcgtgccattgcactccagcctgggcaaaaagagcaaaactccgtctcaaaaaaaaaaggaaagaaagaaatactcactcctgggtgcttgcttaaaggaaccagggaggagaccagcaagcagagaccttcccaggtttttcatatcactgcttgcttatcaacacacactttctggtcttcatggcagcagcgtgggaggtgggggaaaacgacaggaaaattcaaagtatccaaagtatcctctacagggcaacaagaatatgaacatataagcattccaaagtgttactagctaatagatacaccaaatacttctggaaatgcaaatgcttgttttacaggaggaccacctgctgggaactttgcagctgagtacatggaagaagtggctcacttgttgcaagatgaggagttggcaccaaaaataaagatcctgctgctccagagtgtggcatgttggtgttacttaaaccctgtcagccagaaaagagccaaaagtctgcaatttattcctattctcattagtttttttgaaggcagattcgagtctactatcaaaagtgaaacaaacagctacctcctccttaaattttggacttgttacgttctctctgtcatgacatgcaataacttgtcttgcgtcaaggagcttaaagaccacagtgctctaaaatatcatttgcaaatgttggctgctgagaattggtctggatggacagagaattttgcagaggtgctgtatttcctaattggttttcataggaattagtttctctaaatccagttacatgttgcagctctctgtgtattaccctggaaaactgaaataaacaataaaaatcgatgttttcctttgtagttgaagagttctgtatagattttcatacagttaactgcaataatcaaacttcagaaaagaaatgctgtttaaaattacctcgtagagagagcccattgagcttgctcatgagtgtattctttcccattaggaaataaagatgttaaagcacgcagttagatacaatgcggaatatgaatgaaaccacctttgcaaaaatgatgacagtgagaaaaatctgacagcgaaagaaagctgacctcactgacgccatcttgcttctaacctctaagctgcccttgttcattcctgggcataggccaaactaactttgggaagaatttagttcatagtttaactatgaaacaaagatgattacctagactcttccctgaaacaaactccctccttgcttggggaccagactgcttttataaaactaacacattagccacagactggaaattatggctcaggagtcatacagccagaggccacaagattccaacctccccggttgcacctacagattagtattgaaaaacctaagattggtatttgaggtatttttcagatcctgcattctgatggatcagctggcaccacccagactgccaagctgggtcttctgatcttatggtcaccaaccagcaactgactcagcacaagaggacaagttccagccccctatgatttcatccccaatggaaccaatcagcattccccattccctagcctcttgcccatgaaactatccttaaaaaaccctagcctccaaattttcagagaggctgatttgagtaataacaaaactctggtctcccatttagccagctctatgtgtcttaaaatctttctctattgcagttcccctgtcttgataaatctgctctgtctgggcaaagagcaagaactcatggggcagttacatgaatacttgtaaaattacagaactggaattattattttttgccatctattatacgaaggctagagagaatgtctatccccaatgtctaccattaaatcatgaaactcttattttctaatatatctttttttgaagttgattaaaaatatgtattttacaactgatttcccattggaaaaaatatgctggtaattttttttaaccttgtgcttctgtgtagtaaaaaaaaaaaattattaaaagtgaaaaaaaaagacctcataaaaattaagttcataaaattctgaaattcatcagaagatgcatcatgtatataactgttaggagcaatggtgcactttgggagttactagatgatattaaaccaaggcactcagaaaggccaaatcctagccccacccacggctgcctccttcagcaggcactattgacccacctgaatcctttcagccctatttcagtacagaacctccggtggtggtgcttttgagatggttctccagctatcagagcatgatctggttgcacatggggctgactgggaattagcactagaattagcactcctcttgcctacctccacctgcagcagcccgcaactccactggcacaaacgtttggatggagatggagcgcgtgtgttccgacacctaaagttaggtaggctcttagattttcataaaaagatgttattctctctgttttgtctactagataatctgccacagaatacctgcactctatgtgtgttaaccaacctcatcaaaagttttattcgaaaaaataatattggcagaaaagtgcctaagggatatgtacctgattctctaactacacctgcctctagcttcagttgcaaccataacattgaattatgtactttcatctttcacagacttgctttgactgagctgtgctttagtgttaggcacagagggggctattttaaaaaatgtcgtgtagattcgtgatcctcacttgtatttgggataggaatgttgtggaggatgctaatcacatcatcagatggggtttccttaagaaggatctggaggggaattttctcagatcttagaccagaaaaagctatgttctgctgagcaactgtacatttccatactttgtggttttgtgaagtatggaatgtagagtttctcaactagaatctagttgataggaatacattaagggttggaaactggaagttccatttagatactgaattactgccaggaattactttttttcttttttctttctttctttcttttttgagatagcctcttactctttcacctgggctggagtgcagtggtgcaatcatagctcacaccactgagctatgaacattatcaagacaggggaattgcaatagaaaaagagtttaatacatgtagagctggctaaatgggagaccagagttttgttattactcaaattagcctttctgaaaatttggaggcatagatcatacataaccttgaactcctgggctcaagcaatcctcctgcctcagcctctcatggagctagagttacaggtggaagccactatgccttgctaatttctttttcatatatatatacacatatatgtttacacacacgtttttaaaatagagatggagtctcgctattttgcccaggctgatctcgaactcccaggctgaagcattccctcctgccttggcctcccaaagttttgggattacaggcatcagccgccagattcagccttttaatgcttttaaaattaagtttttatttcaaagtaatgcacgtacacagtttaaaaagtcaaataatgtaaggcctctagtgagaaacagcagtctctgagtcccttccccatttacactcccagagggaatcatctgaattgtttcagttgtttcttctggtatttatttaccttcatatttctaaataatttatatacattgttaattcttgtcttttttttttcaattttggggatttttgttcttccttctgaataggacagatggaatttggcattctaacactcatcttgcctaccttcacctgccctactcttcctctctcgatgtaattatgtcaca

SEQ ID NO: 369 - DNA, 5497 bp, Homo sapiens
agccccgcaacttcaccccgcgcgccgcagctgctgcgagcggacgcggcagggcagccggcgctggggacagctcgcgtccacccgacttcctcccggggtccccttcacccaagtgagccagctcaggctgtctgcaaagccggaggtgcgggcagctccgggcattgcattggtgcggaggcttttatatgccagagaaccctgagtgtgcccctgacatgacaaggagccgtcgtcgttagtgccttccttgctgagctgcttcgcgtagctttgaggaaggtctagtgaaattggtctttccattacatctggatgtactaccagagagttctgctgctgttgttttttttagcttttctttctttgagtctttaaagggcaattgtcgacactctgcaaacataccgatttgttgtctgcccactttggagtcttcaatctgggcagtaactatttaccctttttcctgctagcctgtccccctctctggattgaagtcacctgctaagacaatggactaccgaccagactcccggaaatcatgttggtaggatcccagtctttttcgcctggagggcccaatgggatcattagaagccagtcctttgcgggtttcagcggcctccaggaaaggcgatccaggcaagtgtaactccttcattgaaaattcctccgctctcaagaagcctcaggccaaactgaagaaaatgcacaatttaggccacaaaaacaacaatccccccaaagagcctcagcctaaaagggtggaagaagtctacagggccttgaaaaatggacttgatgaatatctggaggttcaccagacggagctggacaagttgacagctcagttaaaagatatgaaaagaaactctcgcctgggtgtactgtatgacctagacaagcaaattaaaacaattgaaagatacatgagacgcctggagtttcatataagtaaggtagatgaactctatgaagcttattgtatccagcgacgcctccaggatggtgccagcaaaatgaagcaagccttcgcaacatcccctgccagcaaagctgcccgggagagtctgacagagatcaatcggagcttcaaggagtacacagagaatatgtgcaccattgaagtggagctagagaatctgctgggagaattctccatcaagatgaaaggtctggctggctttgcacgcctctgtcctggagatcaatatgaaattttcatgaagtatggccggcagcggtggaaactgaaaggcaaaatagaagtaaatggcaagcagagctgggatggagaagaaacagtttttctgcccctgatagttgggttcatctccatcaaggtcacggagctcaaagggctagcaactcacatcctggtaggtagcgtgacctgtgagaccaaagagctgtttgcagcccgacctcaggtagtggctgtcgacatcaatgaccttggtaccatcaaactgaacctggaaatcacctggtatccatttgacgtggaggacatgaccgcatcctcaggcgctgggaacaaggcagcagcccttcagaggagaatgtccatgtacagccagggtaccccggaaacgcccaccttcaaagaccactccttcttttcaaatctacctgatgacatctttgaaaatggaaaggcagccgaggagaaaatgccactgtcgctcagcttcagtgacctgcccaacggggactgcgccctcacctcccactcaacaggctccccttccaactcaacaaatccagaaattaccatcacccctgcggagtttaacctcagcagcttggcctcccagaatgagggtatggatgacaccagctcagcatcttccaggaactccctgggagaaggccaagagccaaagtcacacctgaaggaggaagacccagaggagcccagaaaacctgcctcggccccatctgaggcttgccgccgacagtcctcaggtgctggggctgagcacctgttccttgagaatgatgttgcagaagcacttctgcaagagtctgaggaggcctctgagctcaagcctgtggaactggacacttcggaaggaaacatcacaaagcagctggtcaagaggctcacatctgcagaggtgccaatggccacagacaggctgctctctgagggttctgttggtggagaatctgaaggctgcagatcctttctagatggaagcttagaggatgcttttaatgggcttttacttgcattagaaccacataaagagcagtataaagagtttcaggatctgaaccaagaagtcatgaatttggatgatattctaaaatgcaagccagcagtaagccgcagcaggtcttccagtttaagtctcacagttgaaagtgctttagaaagctttgatttcctgaacacctctgattttgacgaggaggaggatggtgatgaggtttgtaatgttggcggaggtgctgactcagtattttcagacactgagactgagaaacacagttacaggtcggttcacccagaagccagggggcatctcagtgaagcgctcactgaagacacaggagttgggaccagtgtggcaggaagtcctctcccactgaccacaggcaacgagagcctggacatcaccatcgtcaggcacctccagtactgcacccaactcgtgcagcaaattgttttctcaagcaaaaccccatttgtggcaagaagtctcttagagaagctttctaggcagatccaagtgatggagaaactcgcagctgtcagtgatgagaacataggaaatatcagttctgttgtggaagccataccagaatttcacaaaaagctgtctttgctgtcattctggaccaagtgctgcagccctgttggtgtctaccacagcccagcggacagagtgatgaagcagctggaggccagctttgccagaactgtcaacaaagaatatccaggacttgcagacccagtgtttcgaaccctggtgtcccaaattctggaccgggctgagcctctgctttcctccagcctgtcctcggaagtcgtcactgttttccagtattacagttacttcaccagccacggcgtcagtgacctggagagttacctgagccagctggccaggcaacaggccttgctctattactgtgaagcactaacaaagacaaacctccagctccagaaagcagcttgcctggctctgaaaatccttgaggctactgaaagcattaaaatgctggtgacattgtgtcaatctgatactgaagaaatcagaaatgtggcctcagaaaccctcttgtctctgggagaagatgggcggctggcatatgaacaattggacaaatttcctcgagactgtgttaaagtcggaggtcgtcatggaactgaagttgccacagccttttaattacaggttaactgcctaacagctgtcttaatatctggcccttttcatcaggatggtgctgtggtttgggctggaaattgtttagagcctgagagacacgacaactgaaataaaaatgtaggccaggtgcagtggctcatgcctgtaatcccagtactttgggaggccaacgcaggagaattgcttaagcccaggaggttcaagaccaacctgggcaacatagcaaggccctgtctctagaaaaaaaatagtttaattagtcaggcgtggtggcatgcacctgtagtcccagctacttgggaggctaaggtgggaggattgcttgagcccagaagattcaggctgcagtgagccataattgccccactgcactccagactgggtgacagagcaaaaccctgtctcaaaaaacaaaacaacaacaacaactaaaaaaacatgttatagaaagaattcagagtctcgtttcacagtacctatctacttttcctttggccaatatagaatagggctatggtataattcaaatatattacatcgtcgattgtgtctaataatactcagtgaaagagtccatcttatcttaatatgtatgaaatttaaaaatagccatctttgtacttttttgcaagtttctctataagcttgaaatagtcatgtgatacttcgacaaacatcatatgccttgcagtttttctcggtcgtgttctcagggttgagtagtccccttagctacctaactttactttcaatacaaagcacaaaaaagaatatcttcaaataaaagtttgcctgcagaacctggcaaaatgacccattaggagagtttagatgttttaattttatgtgctcccagctactctggagtctgaggtgggaggatcacttgaggcagaggttgcagtaagctgagattacactactgcactccagcccatgtgacagaggaatgagagccagtctcaaaaaaaaaaacaaaaaactcccataatttattttgtttcttttccccatcctgaaaattcccaaatcatgtttccattatggaaaaatgataagtaaatgactaagaactacattaagattatgcctatacacttaaacaaaaaactcaaagcttatgcttttttttttttaattaatgagagctattttttatgatattcttaccataggggtgttttgctgctaagacaaatcaaaaccaaaagctgtagattcacaaacctgtgatgctctttgaggtggaggaacctagaagtcagagaaatcctaatggagtaggagtggaggaacatttaaagtggtccctccttctgtaaaaatgaccgtgggattagaaagaaggacatcctgaggggtggttactgcccccagggaaatcactcactggtaggattccctggccaaatagttcaaacatcaggtcccattattgcttcagtatcagagatgcaagttcattaagcaaagtacaagaccattcagtagctcttattaaaatatcttttcttcctctaaagagtgtacaaggtggggtatgccaaggtatcaaaacaatatatgtgagtgtaatttaaactgtggaatatcaactgtactatggacgtgtttgtatcatttagatgtcattttaaatatttacattttagcaagacttttaaaaaggactcatttcatttcaaagtgcaaattgtttgccaggcttctggcaaatggttctttcaactgtgaacttatcgtgtacatatctgtatatttataaatattatatatattcatacatccttcactttaaaggtacattgtacagtctgtagttaggaggtatagcctatagcttatgttaaatggttgaaatggttctttttatagaaagtcaaacacagatgttacaggattttgtgtttggtttgtcattttttttattttttattttgactattgcatgagtaattaattccagatcttttgtattcacttctgtattttatgtttggttgaggggtgcttttagttgtgtggcatttgtattcattgatctttcagtcatgtaagttaaaataaaaattatttttgaattactagca

SEQ ID NO: 370 - protein, 931 aa, Homo sapiens
MGSLEDLRVSAASRKGDPGKCNSFIENSSALKKPQAKLKKMHNLGHKNNNPPKEPQPKRVEEVYRALKNGLDEYLEVHQTELDKLTAQLKDMKRNSRLGVLYDLDKQIKTIERYMRRLEFHKVDELYEAYCIQRRLQDGASKMKQAFATSPASKAARESLTEINRSFKEYTENMCTIEVELENLLGEFSIKMKGLAGFARLCPGDQYEIFMKYGRQRWKLKGKIEVNGKQSWDGEETVFLPLIVGFISIKVTELKGLATHILVGSVTCETKELFAARPQVVAVDINDLGTIKLNLEITWYPFDVEDMTASSGAGNKAAALQRRMSMYSQGTPETPTFKDHSFFSNLPDDIFENGKAAEEKMPLSLSFSDLPNGDCALTSHSTGSPSNSTNPEITITPAEFNLSSLASQNEGMDDTSSASSRNSLGEGQEPKSHLKEEDPEEPRKPASAPSEACRRQSSGAGAEHLFLENDVAEALLQESEEASELKPVELDTSEGNITKQLVKRLTSAEVPMATDRLLSEGSVGGESEGCRSFLDGSLEDAFNGLLLALEPHKEQYKEFQDLNQEVMNLDDILKCKPAVSRSRSSSLSLTVESALESFDFLNTSDFDEEEDGDEVCNVGGGADSVFSDTETEKHSYRSVHPERHLSEALTEDTGVGTSVAGSPLPLTTGNESLDITIVRHLQYCTQLVQQIVFSSKTPFVARSLLEKLSRQIQVMEKLAAVSDENIGNISSVVEAIPEFHKKLSLLSFWTKCCSPVGVYHSPADRVMKQLEASFARTVNKEYPGLADPVFRTLVSQILDRAEPLLSSSLSSEVVTVFQYYSYFTSHGVSDLESYLSQLARQQALLYYCEALTKTNLQLQKAACLALKIATESIKMLVTLCQSDTEEIRNVASETLLSLGEDGRLAYEQLDKFPRDCVKVGGRHGTEVATAF

SEQ ID NO: 371 - DNA, 155462 bp, Mus musculus
  misc_feature (1)...(155462): n = A,T,C or G
tagatgactttttgcccttcccccatttcctctgactttgagaccctctttctttgatgaagaggagggacattgatactctctttttttggtgaagagggaggtatattgacctatgacgtatggttcaagggaagattggggaggaaaaattttattttcatgtattaaatgaaatatatttaattctaaaattcaatggaatatcaattttataaatgtaagtgatcgcagacaaattgatcattgacaaatcagaacattaaagttatttttctttttaaattttttattgattcctttatactgtgtgtgcttcattttggcacattcacacatacaaatagcatactttcaccatctccgcttctctctttactctcctgtatccctcttctcattccaggtccttttccccctaccttttagatgggctctttgtgtagccgactggcttctatagcgtgggcttccaggcttgtgtctctgtgtcattcactacatacagtctgctttaagagacttcagtggaggtcttattacacaggtattgtgtgtgagtccagtggaacaggagagggcaactgttgcaaaggtagttgatttgctagtagctcctgagaggcagactgtccacccaacacgaggccatggagccaggagaggcctgggccaaagcctctgttatggtctttatggagaggatggggtaagcaagggtaggccatataagcaagtgtatgtctgactacatatgtgcttgactctttaagaagtgggccagggccagactctataagaagtattcacagtttaaatattatgtaacgtgcttttttaaaaacaaaaaactgttttgtgaattcttccaaggaaacatgacctaaattctagtttttatcaaagcaaaacacaactctcatctcagagagaataagagacagattatgagccaaatacgagtgacctgggacagagattgaatgtaccagtgtgttaacaattcaggatgttttatagagacagagcaaagtcataagtcaaggcaccttccagatatattagtaagaatattaggtatgagggttgaaccaaagcaggaaaatctattgcaggcctcaggctgtattgaagacatttcccttttggtcagtagaagtcagtggtctcttgtgttaatagattcctacaagttttacgtgttagttacaaggatgttaagtcaggaggaatcccgtgataacttgtgagtaggcgcttggcctgtgtcatcccagcctgtccatgagcaccgagttttccatcagtcactagaccttgcaggaggttctgtgcaaggtatggttctttgcaggaactttttttttgctcacgtggctgcctcccaaaagtgtgtaatagacttttttcaaggcttagtaaatggtgttaagaaggttttcttcttcttcttctttattatagaattgtggagggaattggagagatcatgtagaaatattgattacttatttttaattgctgtccataagctggctctcttaaagcccagtgttggaaccactgtgcagtgtgcactgtgaggtgcttgctcttcattcagggtggagcacagagtgctaaaggtttgctggctcccagctgaccttcgcttgagatgttatgcagggggttgttctgggagggccataatggccttggcattgggaacctctcttgctatagaaaggagatgaggagaaaagtaccaacctcacagatctcaggagtaagtcatgtcccacagcatcagggggacaaaactaaactggaagggactttgtttgccttttctgttgaaacggctggctaaagatgaggtgggagagctttatggtaccagtgcactgtctttacgggtttctgactctcttgataaaacacagcttagagattcagttcttggtgtttgcccatgtgttaggcagtagggccactcacagttttgaagtttagatccatttagttagttttaatagtttacatttggctagttatgttacattagcattgagggccattgaggatgtaagggctctgttgaagctcattaaaagcaagcggtttcctcctcatcaaaagaatggcatctacacctgaccctggatggagggagacatgacattctgatctgctccaaagattagaatatttcatactattgtctcgcccttgagagttggggattgtcagtcacatgatcaaaagaccacccttcaagaagcctggttcaccaaaagccaaggcaaggaggtaggaataatacccccctcaactggacagtttatgtatcctcccacgaggcctttcctttttgtgtaggcatttgcatagttgcctgcatctagcacgatgctcgttggctttttggctgcccaggaaagtgttacttacctcttcttctttggatcctgtgctttgtttgccgaagtctgggcttgcttcctccacactctgtgctttctcacctcttctcgggaagcctcacttccttctgccttagtctcttgctgtccccattacctaagctgcttgatttcttaaagacatggcttcctcctctccatcctcctcctcctggcacctgctgaggtcttcagcttgctgaacctgctaatttttaatctttcaaactcttaataaaattggccttgggcttgcttccaaatttgtttctgaattctttcattaataagactaagatataaagtatgaacttcgatttccctataatgattgtattatgattaatttaacatttttagtaatatcttatttagaatttattagttctcttagaccctggagtagcaatataaaccttaatcaaaaatagattctgctagttcttggtttgcccttttggatcatgtgaaatattcagcttcctgtgtaattatgtaagtcacaaataatacttcggtcattgtttgacatcatgtctaactgtctggagcctagtggctaaagctgatacagaatagatgtcatcacagccgtagcactttcccattgtctgcttgttcctttttagacaggaatctgaaggtatctatgtggagcttagagtctgggcatgtaggatggccaggaagtaggttcctactgtgaccaaagaaaacataaagaagacatcatttcagaaaggtcatgacattactatatggttgtgaatttgaggggcagtgctgagcatctgatattttacctacaagttgtatctgaatgcttggtcttcagccatgacttactgtcatgtttgtttctttgataaaaatacctccatagaaaacaatatagaggagaaaggtttattttagttaaccatttcttttaagtccattcttgtggggaaattaaggcagcaaggacttgaagcatctagtcagattacaactatcgcccagggcagagagaaaagcatgcaagcatgctgcttgcttttgtgttcagtttgatttcttcactctcacagttcatgctgctgagctactggtgtagtgcacagagaccaactatgctatttaccatcatgccatacacagggcagccttaaccacaaatgttggtcctgttgaaagctacagtttgggatgagaagcacaagatactctggtttttcccgactacttgagagaggcctaagaggcacttgaatctcaggaacattgtcagagctctcatcctgagaagtgctccagaatggagttatcaggttagacagcagaagaactggcgagagtggccatcagacaggagtagtgcagaagtttagcgatttggaagtgggtggctggcaccctgcttttaataatcagtgagagtctgacagacattaagtaagactataaaaaacaagcttattaaacactgccgtctgaagcagtaatctaagaacatgcccagaacagttattgatgttcatggcaactaaaaaaaaaaaaaaaaaaaaaaaaaggaaatttatggtaacttctgtgatgattttttatttcttgctgtgctggagattaaaaccagggctttgcctatggtaggcaaatgctttactactgagccacatttctagcccttattaaaggtgaattttgtcccatgtaatagtggaaacgttaatgcaaagtagaaatagcctggccaaacatttgaaaattatatatacatttttaaagtataaagtctcgtacttagaaattttctttatggagaatatgtcattattagtgacctagtaagttaaaccttgctatatttttgcaaacatattttcaaaacaatctcattagtattggcttccagtaagcaaagccttgctatatcatggtatatgtctgcaaacagtttcaaaaactattaggaagttttggtcccacatttatctctttgtctctgtgtctctctttctctctggtgtgtgggcacatgtacatgttggtgcctgagggctgacatcacgcatctttctttgtctccacctttactttttgagatagcttctacctcaaggctggcagttgaagcacagcactatgcccagcttttgctttaggggatttgagcctccttccagccttcatgtcttactgacttttcaatcggtgtaaagagatgcttagagaggaaagagtttactagtgcttacagtttagagggtgaattgtagccatcagggcagaaaacatgagaggaagctggtcggcatggcactggagcagtaagtgagagcttacatcctgaggtatagccatgaggtagagagagagagagagagagaaacagggagggagggagggagggaggatgatcacacagtaactaggaacgatgtgtgcttttgaaaccccaaagccctccccagtaacacatctccttgaataaggtcacacctcccaatccttcccaaactgtgccaggttcaacagctgggacaaagcattcagatatacgagtctgtcgagccatcctcattcacaccgccacagctcagctttaggttttgagtagctaaaatattacaatacattgctgaaagttgtagcttacttgctatgttggccaaagttttacggtggtactactttaaatggaaacttaccaatgaaaatacatgcagcggtatattttttttctgtcaatctttctttggtaaatataaattttagaacataatcctacttttcacccttaattcaatacatatatattctactaaaatacctttaatttgttaggtcacctttatgtagtaaagtttgagtatattgtaaaggttattcttgaagtttagtaatacagaaatacataaaacactttgtgttttctggtttggaatgcaagaaacttggagaccacttcattgcattcttccagtaaggaaaaactagatttttaagaaagttcttttttagtatgaaaatccccaatttatttccttcagatatttatcctaggacagattgctgccctgcacatacagagacaaatagactcagtgttgggttaatcatgtgcaacaaacattactgaccatgctcaggtgtggcatggatatgaggattaacaacagcttaccactacaattatatgtcaagggctcttgtgtaaataatacctgatgtactaacagataagtaatgtaaataggcagatgggacgtttaagaaaaagtagagataaaaacaaacaaacaaatcttgactttgatgggctttcctgtagattgatttctgtggagaaaagagtctctattgaaactgaaactatacagaaaagagtaaaaatcaccacagaaaatggaacaggatatccaagaattgtgaaaaagactataatgtatgcatgaggggaattttagaaggggaggagacaggaacattgactgagagtgttcaaaattgtaagagatgtcaaaacccagacctaggaagcttggataagagtagcaggcataccccaaactacacaaaagtacattcaaactgcaggaaaggcagcagcagtggcagtctagagagtggcggagagggccgggagggaacaccttgcagggaggaagagttagttcctttagaagaggaccttcctttagaaaccatttaacatttaactagttaaggggaaaaaaaccctaccaatgtggacttctctagtggaagtgtcacttattgcaggacagaggcatagcagcttgaatatttcccttcatccttgagcttctactttggtttaaatagtaaatagaatgctttgctttgccagagtagaatttcaaaaaaagccagtataaagcagagttggagtttattaaatatacattttttatgtatatcctaattatgagcagtaagaggaatagaggcaagcactcaggaagaaagtaaggccacaccaagagcaggagtgtgggcttctcaagaagggtcacattttattgtcctagtggtgactgtaggaatttggaaaattttggaattttgttcagcaaccttcaagatactctctcctctgtcactactgccttagttacttttctgtttctattaagagacaccatgaccaaaacactgaattggagctcgcttacagtttcagagggttagttcatgactgtcatggtggagagcttgcagccagaagctccacaaacagcaggcagagagaactgactgggaatggcatggcctcaaacattcagtgacagattgcatctaacaaggccacacctaatccctccctaacagttccaccaactggggccaatattcaagtttgtgaccctgtggggcgattctcattcaaacacctatcaccacatttgcgataattttgttttgttaattgggattataagatggtgctagagtcttggatgggtttacagtctgatttgataaagtagtgctgcacacgggagttaggacagatccattcactgtaaatggagtttgtgatatggtttctaaattcaggtttatagctgggaagggagaagaacctgaagcaaatgctgccagttgtgttgaaattcttgattctctgctgttgagaggcctcagcctgtactttttcttgtctacctatcctgtctctttaaatgtaaagaagaaattatttcttagattaacagagaatttgctgctaatcgatgcatttttttttttttccattctttattaggtatttagctcatttacatttccaatgctataccaaaagtcccccttacccacccacnnnnnnnnnnnnnnnnnnnnatgcagaagatacaggacacggatatgcttatctaaacagtccctgtcaaggtgtggctccacacaccctgccctcgctgtcagggcttcaggctcatcctgttggaactgttgacttctctctctggaaacaacaagctccctctggctgctgcctttcccttctcccagtgtgagattccccatttatttgggcatcccttgtttttatagtctgatctttcaaatctgctctgtctcaggtacccactcttagactgcaggtagtcctttctcctgtatgtaatctggataagtcaggtataagatattctggatctttctttctactgatattactttgtgaagaattttaaaatatattgtccaaacaacacagctctacctcaagtggaatcagagatagtttagtctaagccaactatggatgactcccgtacccacccactccccccctttggccctggcgttcccctgtaccggggcacacaaagtctgcgtgtccaatgggcctctctttccagtgatggccgactaggccatcttttgatacatatgaaatcgatgcattttaaatgttaaaatttaccaatgttacaagttctttagatggtaggaaaaaatattgtgtagacacttggtttgacatattgcagtttgttgttcctctgtttatgcttgcgttatgaagaggtgtgagtgactggcgtcctagtcccttcctctgaggaactggtgtgcttgcaaccagaactcatctatggaacaatacagactgcagcttaactgattgttgacttgcaaaagaactagaagcagctcagatgtgtaatcccagcattggagacacaggtgggaggattacaaactcaggccagcctgggttatgtaactagacatctcaaaaacctaaaggacagcaaaacagcaacaaaaccacaacatcagaaaaccaagatttgattttcttgagcctaggctgtgacttctgtatttaaagatgccatagtggatagagtgagtttctggttcacaggaaagggtagctatagtatgtagttttaaagaaaccgaacccatgctaaatcaggctatgcaccggcctcggcggttttacccaccctgatggccagccccaagcggccatcttgccctggttccctcggctagcctgctgccaagttgctctggtcaaaaacccactcccaagctagttttctcagtctctgcttgctaaccttaccaaaccagtcttttcctgaaatgcctgctcacacttcccaggccagccataggaggtggcctgcagaaagcctgcttctcagatcccgttagccctgtgaaatgaaaacactaaagacttacaatataccagccagatttataacggtcaatctccaaccccaaaatgcccatgcaaagaacacaaaactcaattgatataaatacaagctgcacacccaggttgaacaaatgtattctacactgctctattgcccatctatgaagtcctagctacgtgcggctcctccaggccacgtggttctggttcatcttcacttccttctccgtccatttattctccctctgtccttcatctcctatcaccttcttcctcttttccctgtctaaagcttttagaccttttcctgcccaatcacaggctctagccttatctgaccaatcaagatttcccctaacctcacctgagtatgtggcccactcctctccagggcacccctcttgagggagcagaaaatacaaacagcaatccacaacacgtgtagtacccaattataaataagaaaccaacacatgatcacagctgtgtttctccctgctttatagatagatgttagtaatgtctcctgtgtcttaatgtagcagaacattttcttacagtattgtaatgccagttaagttgtggaatcattgaggacaattatccaggtgttcaagaaaaagacatgaatattttaagtgtacatcattaatcctttaaaagctaaacattgttggactttcaaattacaagtgaaaatgctaacaacagcttagaggtttactttatttcacttcagacattgatagttttaatctctacagagagctctctgggtccccttccttttaagagtctagagtttttgctggaactaggaatattattagtgagatctttgagagaaatgacctgggtcagtgtgtcacttctgagctagtttggtggggctctgtcacttgagggaacagttaccctaatcctatccaatttgattgcagcctcccatccatcacatcttgtcccattccagtggtatgtccctcaccatcttagtagttcttctcacacgattctatcctatcatttcatccaatctcatcctacccgctagtcctaccttcccatcccatcatcgcatcctaccccaccctgctccactccactcctcctagcatctcatttaattccagtgctgcagctcatcccttcccttcccagcctatcctgttttagcttatcctgtctcacatttcattccattgcatctctatgtcttattctatcccagcattccatatcatcccattttatttcatcattctgttctatcccattgtacattcccaccatattccaaaattccaacagcctatcctatcatctgtgttggcctgctttctgtcactattgtagccaggtggcacattatggcaggtgtgcattgaggagcaacaccagttctctcatgttccagggagcaggaagaaatggaacatgtttgaaagcatggcccgtggcctaagggctaggcccaccttctgaaggtccactacactttctagtagcaccactctggaatcaagtatttaacacattgacttttgtgggacactttatgtttaagctatagtatatgctaacctgaatgtacatctcacaggctgacatctgcaatgagttcagttctagaaacaacctaggtgctatatactatagtccccttcttcagggaccaaaaagtacgagggcctcatggtgggtaacagcaagtctgggattcatcctctatatggtggtcactgggtctctgccttttaatggatagaacatagcataagtgcagaagcagacagaggattgttatatattcccttgtgtctgtggtgtatgaaaacttgaaatacctgatccacaataatgtgatcatcagagagataagtttattagaggaaatcctgaaggtacccatgagcaactggagctcatgaagagtatggtgggctgaatgaaaatggcccccagtggctcatatgtgtgggcttagtttttagttgataaactgtttgggaagggttagaagatatgaccttgttggaggaggtgtgttgttgctcgtaggctttgaaaagcccacaccaggtcctctctatctctctctttttttctctccttcttcccttctctctccccctgtaggccaaggatatataagttcttccttaccaccatgtctgtctgcgtcccaccatgaagataaatgacctaactttgaacctgttagcaagcacccaattaaatgctttcttttaaaagacaaagaggaactgaaagtttacatagagcaactgattgctctgacctagatgctgctgcctatgagctaaaattaggctgggcggtggtggcggcgcacgcctttaatcccagcacttgggaggcagaggcaggcagatttctgagttcgacgccagcctggtctacgagttagttcccgggccagggaactacacagagaaaccctgtcttgaaaaaaaaaaccaaaataataataaaaaaaagattggaatgagagtcaggactcattttggggcaggagtaagatgaagaaagcagtcagatcttggtctctaagacaccttagtcagagatctgtgccatcatcatcactgcctagttgaaaaaagtggagctgagcaaacactctgctgtactagatgagtatagaagtttgagcttcatcctttgtatttcacatggatcaggactctaggagcacaaaaaaaaaaaaaaagacaaatacatttcacatacaaagattcagtattttcttaagggtaaagaacatcatcaataatatgaaagccaaatactaacctgggccatatttacagggacagagggctaatgttcttgtcagagattttattcttttgttacccatttatttatttaagataaaaatctcaccatgtagcttagactggcctagaatgtaaccctaactttccttaaacttgtgatccttcctccttgcctctgggcccctgtgttggaattattggaatgtgtcaccagcctggtcttatcagagatcttaaaaatcaagcaacaaactccacaaaaggtcatgaatgtaaaattcacatacatacattgtaagttgaagccatgctcttctacctatcacatcactacatacaacatagattgttatatgatgctgctgatgagaaggtatgttgatagaaatttctttgggaaagtttggtaacagaagagttttaatatgtacatgcaataaccaagatttccctttaaacttaactcaagtaaatactgacaaaagtaaatgtattttgtgtaattcattgttatcctaggaataggtcaaaattggatcatgtaaattcctcttatagaataattatttttatcaatatactggaaaactagccatgaaaatgatatagacttgctagcatgtgatagtatggagtgatatccattatatgtgcattttaggcacaaatgccaggttataaaatgtgtatccaatttatcacattatttataagacatgtagtaacgtctgcaagtaatgtctggactgaacaggactataatatatatttagtatatgtatgcaccaaaatgttttaaaagggttggttgtctcaatggtgctggtgattttaattgtagtcacactatgtagagtgaccttcttatgagcagaccagaagcagtgaaatattcaaatagggcaggtaggtaggaaggtgaagagacagtccaaagtgtgtccctgtagcatctgccctcggtggcctcaggtgtaagtgggcctgcaggtaggtggaacccaaatgcaggcagtgctggggcaggagggaggggcagtagagcgcaccccagtcttggtaggtgaactggctgtgtcccaggccggaagggtaagcaggctacactccaggccggaagagtgaaccagctgacttctctggcagcgggctcctcacagctctctctaccaccgaggttttgaggcaccatgaggtttcgggccaggatcaccagcaagcgttttatagagctcttcattcaggtcagcagcaccgtagcaaagctggcgaaggtctgtgtgctccgtgtgtgccctgacaggctgtacttctgtcccatggggctgctgggtgaggcccagctgtggggtgagatgcggcgcgatgtcttccaccacttctgcatggagggtgcctcgcaggagttcaacgagatctgtcttgagctgatgtctgagcatctggccagagccgtgaagaatgccggcaatgcttcatccctgaagctccagctcaccaacaagcagcgcccctgccttactttggtggtggagctggcatcgtgccccggccacacccgtgctgtggtccacgatttgcctgtgagggtgcttcccagaaggcgatggaaagactgcacagagccccatgttcggggctctgatgtgagtgtttatctgccagctctgaagaccttgaagaacatggtggaaaggatggcaaacgtgggcagtcatgtgctggtggaagcaaacctcaatggcagaatgaacttgactgtagaaactgatagagtgactattaaaagctattttaaaaatcttggaaatcctccaaatgccgttctgtgtatgtctcaaggcagagacccagaaaccatggtgcaagtgcgggtggataataggaagcttctacagtgttttgatggacatcagataaaccccacaatggccttatgtaatattttgagcaatactctgcttcatcttgttttggttcatgaagatatttctcttcagtattttattcctgcttcatgaatttcaagcagccttgattttctttttaaaagaattcttaattgaagcactttccagaactgagactttgagttacttgtgttaaaagcctgcaaccccatggatttggtagagtgtttattttgttgagtgcttcctttgtaaactgttaagaaacagttggagaaataattaaaagttcatgtgattgtttttttggttttgacagttacattatattcaacttagttgttttggaaaaaaaggattataataaaataatataactgaatcctgaaacaattattgtattattttattatgaaataaattgtgaagagtgagaaaattctccttttaaaataaactaagtattttgagagacttaatgcgctcagtctctctgaaaggtctgagatggattttgtatgtccaccacagattccgagaggcaaacaagggtcttctgaaggtcctcggtaggagtctttacgttactggtgagtagccatttcagggtttaaactctctgacaactctcttcctcacctcggagtcagacacttgtttgtttggtgactatttaaagaaaggtgagaactatttgtaaacgctattttgggaaagcttcgggatattcaggttgtgtgtgtatatgtctgtgctgtaacacagacatgctttctgatttctattggtaagctcaaacacaatgacccaggcaacttatagaaaggaggggtttttgccttatggtttttagaacaataagaatccattatgacagggaatcttggcagcagatgacagtcatggtacaggaatagccaagagctcaaaccctaaactttgtgtaggaagcagagctttaactgggaatgacagatggcttttaaaaccccaaagctttccccttgtgacatacttcctctaggaagctgtacctcctaaaccttacccagacagcactaccaactaaaccagctacatactcatttgaaccatgtcttccagctttatcctattgtatttcatttaattcaagaagaaagagatttcaagctataataaagtgtgtgtgtatgtgtgtgtgaagaccagggaacaagcctttcaggagcttgtctttagagccatggtttcttattgctctagagcttgacaagtaagctagactggccggccagtgatctctaaggatctacttctccctgcctctccagctgcaaatgtgtgccacgccactcttctgtttgttttgttgtttctcaacataggttctggggattagacttggatcctcatgcttgagcagtaagcacttcagggtgtgctgcccgaaaattcattgcatatctctgggttgtagtatgttcagatgagagccttcgtggtatttgttggattgatcaactctcttctttctaaaccttatgaatcccagcacatccctttttgctaatcatagtcaccattcccaatggttaccggcagtgacatttctgttagtaagcttttctctataatgtcagtgataattccttaatctcattaagatgtcatgccactgtgtttttggcaacagagaaagcagagcatttgtacttagaaatttggttctacgttctatgtgaactagaccagattctgaaagtagtccaaagaatccacgtgcttatccaatttggggtgtaattttcgtagtgtcagtaagataattaaatcactcagaggactcaattttctatgcaaattaaaggcgagtttgcctttgtcaagaattggtttgtggatgttaatccatgagacaaattacttattttatcttttcttgtctattttcaatgcagtaaatgttatagtatctttggaacaacacaattatttgttaaaagagttgttaaatgttctcccctgcccccatgtatgcctttgtaggtccttaaatttttattaatacattaccaggctaaattccacatcatagtttccgggaatatacttaagtatctgaaacactattatgtcttcttttagaggacgagtaaaagagagcaatagttatccctttaaaagaataatcatttgtaaaatgctattttatataaaattaactttacctgttgattattttctattatttaaaatcagtttattagttgcttgtttgtgtattttgtcaatgttaggtataaatatcttcatcatgagtttttaaattaacatgaactgaataggattttaatctgttgcatttgtgttttaattcaaaattatatcaggacatttttaaactttattttgaggtaacttcaaaatttaagaaaataaaagccttttaataatattaaaagtaacaatttctgccaagtcacttagccagatcatccaatatttacttttaggcccgttttctttattctttccatttacctgtttattttgtgtgatgccatttgaaaataaatgtccatcaactgaggtggatgttcagtcttttaaaaatttttcttgattttgacactttcaaagtattattataggtttatctactattcttactaatttggcttggacaataaattgatttctctttgaagttcatttatatggagttgtttaaaaatactatatgactatccagtttttaaatcatgtacttactagtttagtgttccttgagtgatttttctttgtaatatgtatgtctatatatatgtatatatatgtatatgtatatatatttcactttacatcggatcactgttcccccttcctgattttctctgtaattattagtggtcataggatagtaaatgactttctacagtaattattctatgcatctcttcattgattatgttcctagagtagagttgaatatttttaaaacatacacaacttactgctatcagttttgttttatttttcctcagtgtgcactattaaaaacaggcaaggggtgcaggcacacataagagagattgtccttgtatttgggttagtattgtaacactaggggacacaacaggagagccccctggacaactccctttggatgctatattttcctaaatctggacactaattgtctgctaggtaggctgctacaaccttgacatgtctccattcctctgcctcttcttcactggagcatgccactgtgtcagagttttttttatatatgtcctcttttatatgtgcgctccatctttctggaagtagtttgttgcacacaaggaaattcagagcagatgacttttttgaagatactgttttgttggtgatatcagcttgaaatattcactatgagaagtgcctaagtatttctaccactatatgcattgcataaatacttatttatataaattatgcatcatagatgtgtatatacatatactatatatgcataatgttttagtcgtagaaaacattttgaaacagggtcatacaatatagcccatgctatctttgaacttactcgtccttagcttcctgagtactgggattacagatgcgtgccatcatattccacaactgaatttatttatcttctgtgaagtgttttcaaatcttttcaaatcatttgcttatttaaaaaaatattttgctattaagttccattaatttttttttatataagctacttagttgtgtgtgtgtgtgtgtgtgtgtgtgtgtgtgtgtgtgaatatttttttctgggacacttctctgggtgagtagaggattttaattttggtgaagtaaaaaaaaagtttaaaaaaatgtatggttactttttgtttaattaaaaatagctcaatctatacttccagccaatgttggtagttttttatggcatcatcttgtactttataattttagttttcatgtctgagtctataatgcactttgaagtgagttttgtaaggtatgaggttatagttaaaagctttcctttcttttcctgaatacatattcaataatttgcacacgtttgataatattatctattttctccattgatatgctttggaacctctgttagcagtcaaggaacatgcgtgaggtgttttactatatcccaccacctgtcagcccaccttaatggtaataacacattgtcttcattgctgtagacttgtaaaatatctggaatttatgcactttttttgttttaaaattgttttcactgttctaagttccttgactgtctttaggaatttttgagttattttgccaaaatcaatatataaacttgcatgaatttatagatcagttgatattttagtaacatcctgccttatgatccatgaatgtggtatatagatcttcacttacttaagtctttattattcctgtttgtaggttttttttataagttcttgtacatttctttgctcataatgatattttcaatagaaaaagttttgttttgtatgattgttttttgacacaaaggcccattcataccaggctatcctagaagtcactatctaaccaccaaggatgaccttgaatctctgttcatcttgcccatatctcccaagttctggacttaccaacaggggctcccatcgccagttatgcagtgttgaggaaccaacccaagtcttcgtgcatgctaggcaggcattgtagctgagctacatctctagcttgcaaatagaacttggaatttttttctaattgtttccttctggaatgttttaagtagctacatttataaagattcatttgttttatttttaattatgtgtacatatatgcctgtgagaacaggtacccacgcagcaaagagatatcagatcctcctgcacagggactgacatgtggtgtgagctgttcaccatggtactagaaaccaaacctgggtcctctgcaacagcagtatgtgctgttaactgcggagccatttttccagccctaaacaatggatttttttttttaatgtataaatgtgaatcctaatatagctaaactcagttgttagtgctgagttgatttagttcagatgatttttcgtactttttctctttgtgacctctttactaaaatgcttgtaggtacataaagttgatatacaaacacttgcagataataaagcataaataccttttgatgtagaattttgccagttattaaggatgaatgcagacttgcatgttaatgaaatgatgtgtttgttaatatttacataagggattcaggcttggcaaactatttgatgctgtaggatgtagagtatcttaagaattttcagagatgattgatgctctagttttgaatgtaaatgaagtggctgaagatgaaggaggggaggtagagagaagtctagttctaacaagttttaaacacaaaatacttatgtttttccaacataaagcttgtggacagtgggtatcctacaaaaacttctaaaagcaaggatgaaattggttagatgcttagttttgagaactaacagataattgctgagagcggacatagcaaattagagtacagtatttgagcagagctctattttgacttcccagtgtgcattttcatccatgctgtcagttcttagcagtaagtgaatatgtgtttctgcctataaatctacgtcataggtgttcagaaagcatatgtaactcataagaggacatttgcattttgagttagttgtatgtatatttatgtactatatgatagaaaatataaactacattataatttaaacaaagtgaattcctatatttacagggatataaatatattttaattacaactatagtatatttcttagaaaacttttaaagtagaacaatgagatgatttcatgtagtatttgtgactcagttatgtaggcctagagctgtgcagtaacatgatgataacatttgggacctgggacttatggttttgtttctgtgaaatatttctcacagtgctaacaagtgtccattataaacttcatcttggtaaatgttgatggatacagtgaatgaccaaaccaatccaagctccagaactgtagtgaatgaatactttttatgtattgctcccaaatgtcaaacattcctatgttcatggtttctgttagctcaattggcaccaattctctgttttaacaggttgcttctataactggatcacgagtttgctgcacaaagtaccatgtctcgatcccggcagcccccacttgtaacaggcatctctccaaatgaaggaataccttggaccaaagtcacaattagaggggagaacctgggtactggtcccactgacctcataggtaagggcatggcctctcatgcattgtgacaagctgggttttattattaatgtaggatacatagttttgaaataaaaaggaattcttttctattttttttaatgaaagtcattatcaaattagatctatgctgtctttctacaaattctttagaaaatatgtcatggctaaggtttattcctgtttcttcaacttggtgagccctgcttattttgctatgatgaaaccttaatactgtttttaaaaatagaaatgaatgttgggtagctgggctagcatgcagattttaaatgtaactcataataaattatatgaactacaaatgaagttgtagaggtgaattgccagggcatgctgttggatattgttctaatctttcacctgagttcactctagatgtgacattctcacaactggtttcctaattgacagagacccagtgctgagttctagagtctgagctggaactgcctctcgcattaactgctggttgactagtttttgaccatccagaaaatattttctttttagaggaagcaaattgaagtttagcattgcagttaataattgaggtctgtgctgcccagatagggaatctttgctagggttacttaattatattatgtgtaattttccgtttttatccttagctatagtatttgatagtttagtaaacatctcttacatttattcttacaaagataggtgtgtgaagagtgtgaccttgaacttctgacccttttgcctcttcttaccagttgctgggattgtagccatgcacagccatgcttgatgcatgctgtgctgcggaccagggcaagggctttgtgtgtgctaggcaatcattctagcagaggagccacattccagcccagaggggtcaggtctcatccagggtcttgactttgtccggttccttgtttatccatactgggaaataagccttggaatgtatgaaaacatactatatagatggaattcacttctaaattatgtcctatatagtgttaaaacacaacagttagcagtctgtgtacattttgcttttgctttagttttgaatggtgctatttttatttgaccaagtgtatattactttcataaccatgctagtttagctgttgccaagaacttatttttaaaaggagcaaactcaacttgttaaataatttaagtgtttttaactgaaatacacctatattagtcaagtaaaaacactataaaatctactttacttggaattctcttactttttaaaacctgagggtaacccaggtctgggggtggactcctttaagtctagccttgggagtcagaggaggcagatttctttgtttggttgagcccagcctggttgacagaattacaggccagtcagtacaacatagtgagactctgtgtcaacgaacaaacaatagaaataaaaaatttcagtgccccaaaccaatataatatgatgctattatatttcatcaagttagatttgtcagtttttagtaagtaagcaaaaaataaaaagcttaagaaataaataggatacatgatcttattttcattttgtgataaaaataattgaagtctgcccccattcctcagtttgaattatagttttgttacctggcagggtaattaactcatgagtgatttacaatactgtggttttacactatactctggctgggcattgctttcagtcactccttgttagggtgtggtgatgggcctttgtccgggtttactggaagctgaatgacagaaggcatagcatagtgtctgttttattaggaaaacacgaaagcggataaagcaccactgagatctcctgtggagatgtgagaactgagagtaacccagcagaagccaagagtgtgtctgtgaagcactgtgctctagcccatgcgtgatacacattaaatacgcagctcagtccattctctagcctgtgtgtaactgacgtcagaagaagcacatacaaattctttttagaagatggatatgtttaaaatctttttggaaatgatcactaagtgtattcctgtatcttaacaccctgtgttaataacttaaacttgtaatagtagcagttctttctgagaacagtttaagtcttgcagcctaagtaacctgactgcctggacgtagctggaggccattgttctaattctgctgatggttgagggagtgaaggaaatcttaggtatcagagagaaaaccagattccatggcctgtgccaggcgctgtagacatctattcaaacaggaaacattattatgtgtttttattttttatttgttgtatacatgcttttacttccaggcttgacaatttgtggacataattgcctcctcacggcagaatggatgtctgcgagtaaaattgtctgtcgagtgggacaagccaaaaatgacaaaggagacattattgtcacaactaagtcagggggtaaaggaacctcaactgtctcttttaagctactcaagcctgaaaaaataggtaagactttatcctaaagaaaagctattgacctttagatgttaaaactggtagacgtcgtataaaacgcgcttaatgctcatgtcttattagatgtagtgtgttcattttgacaacactaagatgtgtctcaggttgagttaaccttcctttgctggcgactctcatggtagagtcccccgggctggctctgaacccctgtcagcccttctctttgagaggcagttccctaagctgactgtcagtgtgaagacaggtctaagaattattgtctttccaagttactggtgacatctgtcccttggctccttgatcttgaacatatgacattactttaatgttgttatacacttaagattctaagtgaaatagcttctactttggccacatttgtggtggtcgtatccttgtagggccaggtgaagtgcagccctctctacctagctctctgtgctttgtcccctgaggtcccacttcccccctgctgcttggcagccttagtatttggggctgaggaaccagactttgatctccagcagctgtgaagctccaatgcctgttttctgggagtaaaagaagaatagcaccaaacattatcaacctcatagggttggataacctagaagataactgtgaagtgttaacacttacaagaacaaattattaatttttaaattgttccaatggatactttatctctcttaataaaatattgataggtacctcattgtgattttgtaagatcttacaataatatacaaacataaaatttttgtataagaccatcaatccttattatattcagtcagtatctctctatatattgaaaaataaagttttgttgtccatctcagctcatagaggtttattctatagtgctggcctccataaatccttatatgtacttttgaagtaaaaacatgtaaggaatacaggaaaatgaaaatgaattagtttatatatattggtattagtatacatttgtgtatagaaatacaacaccatttaaatatatatgtatatatgtgtatatataaatatatgtgtgtgtataagtatacatatatatgtgtgtatatatatatatatatatatatatatatatatatctttagaaagtgaactgtaaaatcaaagcatgagcctattttacagatttttagaggatgtgtaaacacttttctaaaattcatcattttataattgtttatatagcacataaagaaaacttagttgaaaataaaattttattttgagtacctacttcaggatatttagaatagctcatagaagatgagggccagatttaatgacagccacagaatgtcggatttctgcataagcttgtcctgagcccttgttaatatccatgatggctgctgaagtagtccttttgcacagggtcccattgctgtctggtgctcagataactttcttctgggaagcctcagtgtcttccactcctagtctagccagcaggacacacttgctcagagtgagttactgagtcttcagtcctgctttgctgcagcccagagtccctgcagtgctgaaggctgtgctgtactgagtagggcagtacagagcttggtcccatgaaagagatgctatctttagagtttgtgtcttctttgcagatgtgcacccagtctgttttccctgaataatctgtttttccattatgcaagctatgtattctgtaaccaatttaattgtttgattttattggatttaccaaaaagataccagcctaagatttttttttctaatgatgtaggacatttccagtattcagcataatggagagaataagaaataacaaggactatactaattttgcatagctattcatgttagtgtttagagagataaagcgagttttcaaaaacagttttcaaccatttatattgcacctgtagtaaaatgactttcgattttggaagttaggaaaagaagcttatgttacatacaagtcatacctgtgtgatgttacatctaagtcagatctgtgtgatggcttctcagcgatcgcatgcaaggagcttgctgtgagattagtgctcaacctgaggcgtttaggactggagatttcgcagacagtttttccaaaaagttcagaatatttacttgaataaagagatattataagttatattattatacctcatactttgcaaatgatattattaacttaatcattaatatttaacaatgtacaattaattttatatgttattgagaaaacatctttttttttttcagaatgttttgtgagtggcttaaaatcacctccattgaataatgtatagtgaaatcctaaaccaaaaagtgttacttttgccattatagattctcagtatttgttataaggccagcaggcatgtaaagaacttgagctgtagtatccttaagtctcttacaaaataaagcactgtggtgagatgtcaaggcacctggagagtctctgtcttactgagtgcatattcctacaggcattttagatcagtctgcagtgtgggtggatgaaatgaattattatgatatgcggactgacaggaacaaagggattcctcccttgtctctccgtcctgcgaatcctcttggcattgaaattgagaagtaagtaccatttggttctttaattttaccgtctaagagttttatgttcttgaagtggagggattcatatttagggatatcccacatgggtcatttactgtattatttattttgattattaactttttatttttatggtaatatgtatgaggcttaacaagttttgcttcagtcagtggtttcacagataaaaatctttgacaaatttattttagtttttttggaggagtttacattgtatgataaagaatgttttgaaattttaataactactgtgctttggttttgggggttgactgtgggatgtgtgactcttacatgataggcaagtaaggtggacactacagaggagtcccccatcccataacatactcttgattaatgatataagcatcagtacattttcatatgtttagatagaatttgaaatcagtagaattatctattcatttgcttcagtttcctagaaatattttagaataatttagtccaaagggatcttttgtttttgatatgtcctgcctaaattcttacttaaggcagccctatttagctttatttatcagaattgtgccagttagttatacattttttcataagtgaatttaatgttttgttcttatattcccaagtatgaccaacttttttcatatatcttaagcaattcatctgatatattaattttatataatttattttctggccttaataattctgactacagagttacgtgatgggtgttgcctcatgaacagtcatagaaggtagcaagttagttctagtaacgtcttacccaaatctgcgtgtttcgttttctaagaatgaggaccattttttcccactaacctttaactacctaaccttcatgtctacatcaaagatcattaatacttttgagagcaaagcgcattttcactgctatggtgtccctgctcaggtggatacaaggggcccattttgggtaggaattgtttgttgaaaaaccctagagtgtaggagcttttagtgagcttgggatgtctaggtagcatctttaaagcaggggcattctaaaactgtctcaacgatatttgataccctgtcaattaaaatcaggacagttcaaactagaagggtaaagggtgggtgtgtgggagcacactgtcaactatgcatacataggcttgcagttgatagaaaacccatgaagggcctgcatcaaaactcctgaatgttagcttcttcttgatgctgctgtgaagtacgggaaggagggatcattctgactgctcttccttagcctttacaggtgaaggagaccagggcgatgcacgtgctctataggggcgtgagtcagaccacctgtgctagacagggttcctactgctgggataaaacaccacggcccaaagccacttggggaagaaagggtttattttatcttaccactcttagttcacagtctgtcactggggaaatcaggacaggaacctggaggtaggagttgatgcaaaggccatggaggagtgcggcttactgatttgctctgcagtttgctaagccagttttcttacagcacctaggacctccagctgttgtgtgacagaacatttttagagagacaagttacgtgtctactcatgccagataggaatcccatgacaggccaaagtatggctatcaccagtccaactggtgaaccaatgagttttaatggggttacttataggaatatggctagaaggggttactcataggatcagaagtgactcaaagacagctgtttcactaaagcccaccccagcatgggtaacagctcacaaggctaggaacctggaatattgcacagcctgcgggcagctcaacaggttgtagagtgttctttctgggcgataagtttgtccaaacctcttctaggtagcttagcttgtttctgcttcttccaggcagctgttctagtctcagagtcttcttttcagctcatcctcactttgggagagagtctcagctttaatgcttactctacctcataggagcctagtgaatctggtcaatttcagggacttcctaaagctattttgcattgtttacctttctgcttaaggaacttgagggtggaatgttttaatgttggagaaaactgttatatagacaccagcccaactcagtatcacccataataggcagggccctatgccttgcctacagaccgattttataaaggcgttttctcgtttgagagtccctgttctccagcttgtgtcaagttgacacagagctgagcagcatagcagccagtgctcattgtcgtagttgctactttcactttcattctgacagatgttttttccatagttcttactgcctcgtcctcttcttaccttttggccttgtgctgctagccacagagcagtttgattcgaaccatctctagtggcattgtagtcaggaaggcaggcagaaaaaatggcatgacaaaaggacttgacttgctttggaatttctttatatttctcttaagaggtagtgttctgtgacttggagccaaactctggctttgaattcggcatgcagggcggactgctgcccacttgaggtctggcctaggtttcttaggtttttctcgtgggctcttgtgagggctgtacatgaggacaggtgagcgctgcagccataatggcttgtgtgcttagtgataccttgcttctccctgactcagaacaaaaccttctaagtaaatagtgtaatttcattctgttgctatgataaaatgtcctgaccaaacgcaacctaggggaaaaagagtttgtttgacttaaaattctaggttataatatattattgtagggaagtcaaggcaggaatggaaaacatcctatccacagtcatggatgaagtaagaaggcttcctgctcaggactcctgtagctcactcttaagcagcccaggacccagctcagggcatggtaccacccacattcaaggggttcttcccacctcctttaacaattaagacagttcccaacagacatgcctaccagccaaccagtctagatcatccctctgtcagagcctttccaagatgattctcggttgtggcaagttgacatttaaaactatcacagttaagtttatataataataaattgtgttaaaattaaaaaataaatattatctagtcaaacaggttttctctccttccctgtcttcttctactgctccttccctcccacctaagacagctacaaagattttcctgacttctgttacaggaggatttgtttatccttttgttgtgcctgaggctctatcctgagttgcaccctggcccaggtacagaaagagtgagggaaaggagagccagagagtcagacattagtgagagtctggcttcctaacatacttaatattttttagtaaaatccttttgttcccctaataatgttgcattcggattagaatccttactgcctttcattttactaatgtcctgtatgaatttctaaaatcattaaaaaaattaaattgttggatgaagagcatggagatcttaatattatttgctagtgtaaaagtagtaattaacaaggtctgaagaagtataaatgcatctcgtaaaataatcacttgtggtcctggtgacttgtcagactagtgggaggcggcctttggaagatgagtcagcactcagtacttgcctgggaatgtgaggttcactacagccgacttaggtgtgcagtggaagggtggggagtcctgtggtgctgtgcctgggttctttgtgaaaaagcaagtgaaaataacataatataggctccttgatgcttttggtatgagtcaggttttaatatattttattggtagactcagcatgcatgccgtcatctttcagccccacaagtttttaacaattggcatttattggtgcctttgactgttaaagtccttcatgttcctaaatttttaactgatgtttttgcacacatggtgccatggcacttataaaaacgttactaattgctctgaaaaggtaacttcgcttttactgagactaggctgcgcttgtaaaaggtctgtatttctgatttactgtgctgagtgtcacaaatacatatgttcttgcttggttccagttataatggatacaaactatttaagctgtaaaagaagataaaaataggctcatattaagtgaaagtcctcagtagattttgtttcttgaaagtcctgtttgcctaagaagaatgttcttcaagaaagccttggcagggcactggtatgaagtgaaggcagaggcatggagcgtggctcctgttctcaatcacctcccactttttgagtgagctgttactaggggttggtgtcttaagtattcagttggtacatagatattatctgttttatttctacgtggattttgggcagtgtacatccggctctagtcttattgagtcacatttccaacagaaagaaacagtgactagttttcccagtacgtttagaaatctgcctttacaaaaaaagacagggtgacagcagggtcattcctaagaagatcatagaagtgtctcatttaacttagaattttgtaaaaagtagattggtgggctatggtacagtgtgcaagtccagaaactatgccttattttaaaataaaaaatttcccctaattttaatgtaacatttgtaaattatgttgttgaaatttaaagctgaacgaaataagcatggcgcattgccttcaaagcgcagcatccgttctttaacgtccagcagcctcctgctctccagtgctacaccctgaggcatgcgagcacacagcatgctttctggtacgtgtgtgctttatagacatccctgctgtatgcctgtctactcaggtgccctttctagaaggatgaagtctgagttgacactgccatccaccagaaacagggcagccggtgtgagtagtgtctcactgctttgcttctgtcttgagagtatccgtgagttttcatggcgcctcccggtttctccctcccatctcagtggggaaagtgagtgcaggtggagtctgaacactcatctgctccctctcttagggatccctcatctccgcgtgtgccctgggagtcctggcctgagtcagctgcacttggcagccctcgcttctattttacaatttctagatacacaggttaaagatcagtctattttagcttatttttaaggctagattattaagtcaagatgccttcagctatagataatggggaatgccaatttatttgtcttaaacaaaaaggatatttctttttttgcaatgtataaaattcaggggtgacacactcttagtcatgctactgagatttgtgaaactcaggtttgttcctctggtaaaccagcttccttcataattacaaaagtttttcacaattcctggtgttgaaacttggcataatgatgtgcaggggtaaacgaatagcttttttccgagttctctttagaagggagatctttcccaggaagattctcatcagcctgtctcagacgtcactgatctgagcagggttgctaagtaaagggtaaagcaagcagcacgtacttggcccccagtgcagatagatgctagactagtgctgtgtggagtgtcccaggagtggcagccccatgtacgtaagcgtaaggaggaagagaacacatctaaaggccctagatggaggtcgctgaaagccaccctcagggaacatgtgaaatgcacacctggctcaaatggggtttagtactcactgagcagagcacaggcctccggtggcagtactggcgatgactctggagtgacccggcttcctctcttttcatcctgccctagccctggacctggagttttagagcagaattaccaggacctgtaaccagcaggtagctttagctactaacaccagtaagtaactctttaaagacagtagcatcagaggccaccagcatgccacgtgtggctgttgtaaagagtgtggagtgtcactctcctagaaaagcccatctcatacttgctcacatgccttacgctcttcatgagcttgggatttctgttgaaggtgtgtcttaacaaacctgccacaggaggcctgtactctgctcaggatccagtgttatctgggctaaggttttaaaaaatgtcagggagctccttaggctgctgcagtgactgtctcaggtcctgttacctctgacagaaccacattgggaaggacagataagacattggtctcaagtccgttttcagataactggcatgtacttgaggattaaaagaaggcaggattggggtgaggggtaataggtgtgtatgatttagtagtccttgccaaggtgtgctctcaatggtcactctctcagtttagattctgtatgtttgttgaagaagttcttgttctgtgtggtgctttgaataggaatgccccccccccccagactcatgggttagaatgcttggtccatatttggggaatggcactaataggagctgtagccttcttggagaaattgtgtcactgtggaggctactgtggaggttttatttgctcaagctaggccttgtgtggcagtctctgtctgctgcctatggatcaagatgtaggactgtcagccccttctccagaaccattctgcctgtgtgctgccatgctaccctccatgatgataatggactaaaactcccgccccagttaaatgtttttcttcgtaacagttgcagtggtcatgatatctcttcacagcaataaagccctaactaagccactctgtgagtgggccagtctggttcttataaggtgatgactttagtgtgagtgtgcagccttgctgtcatgaagaactgcacttgtctggggtggtctgtccaaggtaactaaaaatttaagttaggacttctgtgccttctgtaatcctgtgagtgaggaatcaatgtaaaaccagcctttaagtgcctgaaatagcctacagtgtgatacagtaactaacagaggaagggtgaaagcctgcccccgtctgcccccatagcagtcagcctgtcaactattggtcatggctaggaaacagaagcaaaaatatgaccttggggtgaagatgaagctttggtcatggtaggctgctcagcatgtgggagctgtggatgtggtacttggatactaaggctctagacgcgcgcagaaacccttgaactgcctcgtcttcttttagtatagggttgcttctcattgagagcatgcaaaggtgtccgaccgtaaaggggcattctctttaaattgtataattttgcttgtgcagtctatcagggctggggaaacatttttgataaagggctcagcaagtcaggggagtaaagtacacacaaatatgacatgtgccagagggtataatctatttgagtctctggagcttttagtgtgagaactgtactcgaagaaattagtcctaagagatgagcaggtttagtacagagaaacgcttgaatgtgaaattgacaacttggacttcatcttgcaaacaggggtgtgggtcagcagcaaagcctgcaaggttgtatacctagagacagggagtgctcaggacagacatggtgtgaacttttcctgaggaataacaaacatctgttcaactcagctaggacagtgacaggccagtgttcacctcagatgggacaatgacaggtcagtgtttacctcatttaggacaatgacaggccagtgtttacctcagataggacaatgacaagccagtgtttacttcagatgggacaatgataggccattgttcacttcagttagtgcaattacagaccagtgttcacctcagatgggacaatgacagggaaaagaaatgattccacctgtactggttaattttaaatgtcaaattgccacaacaaagcttacatggtatgaaatcagacataatatagaaagtatattccatacatatatttaaatatgttcttgatagcttattgtaggtaaatatgcagacttatatatattaatttattatgtagttcttgggcatgctagtgtcagagcagttgtaatatattttaactctttttctctttagatgtaaacttcctcagaagaacttagaagtgttattccatggcatgagtgctgattttacaagtgagaatttttcagcagcctggtatctcatagagaatcactccaccaccaggttagtggccatcagatcctgatcactgggacttcagacagcttatgcagttatgcagcttatgcagtaacgttgacgtaagcctgctcttacagatggtaacatagctgtagctctgtgaggtgactttgctaagttcctgtcaatttgtctgtttccgtgtttataaaatgtcattcttagaagacttattcctgatcttacctgtagtcttagtagaggactaagtagaggactatccttatcagtcacatgaaaaatggcaattctgtgcacactgtagagcacctgccttccctgacctcagagcacagaaagcagtggatttattgttatgtgatggtaaggaggtggttggctctccccaaggtcgtgtgttcccttgacattttcccatactctaaagattacatttgtaactttttgctagattgatttaaaacagcaatattagtgaaaacatttagataaagagttgattgattgctacttagggtgtatattctctataagtcagtggattaaagagtatattaacataatttattcacttacagagatgaaaaccattattagaaaacatgaagaaaagttggtattttagtacataaatttgatctgatagtgttttaaagcaagtactctaagagtcagtttataattgtagaagattgctttattttttcatcatggacacattttttcctctcataactcagaattgatatgttttgtgtatggagttactacttaaagcaatatttcagattatattaacagatttttgtcagatcaagtggaaataaaatttccaaaataccttttctccctcaatttttgatggagatacaacagcatggttttattttttgttgcttgattgaaaaattttaagctaccgtacacagtagtggattttatcatggtagcaccatgatgtcatatcacatcacatatcacatgacatcacatatgcacctcatgtgccttgtttcttgattcttgttaaattgtgagtcacccacaggctttgtgtaattttgacattaaggacagagtactgtgtattgagtggtgagatgagagttgtgttcagggttccaggacacttgtgtgagggagtgggaaaatctgcttttgaactactgtagcttaactaggccactagaagatactcagaatttctgtcttccaagtcatgtatattatatctacatttctacttacttcttagggacctgacatgcttggaattatcatctatagatataagactagtttcatatctttcagccatcacaataaataaaaggtttagatcgataagaatttaaaaggtttttttttttgtctctatgtagttattgaatcattgtatatacttcacaggaactttagtatgtctagtgcattatcttgtcaggagtgtcagacagttgatttcttttcatttgtttcagttttgagcagctcaagatggcggtcaccaacctcaaaaggcaggccaacaagaagagtgagggtagtctggcatatgtgaagggcggcctcagtaccttctttgaagctcaagatgctctctcaggtaaggcaagcctgagagccatctgctggggcttccactgtggaaacctgacactgtgccccctcgtgtttatggggtgcgacatttggtctgtatttataaaagtagaggtttaaagcgtaccataaatatttgttgcagactaggctggaatctctttgaaggcctggtactgtaaatatttgtctctaaagctctgctgacgcatcttacatgtgaaacaggagaatcctatacctctctatgatgctcagtctttggggctgataagaaattgaatcccagcgggcaaagttctagaattcttaaagtcactttatagacatcgaatcttactcatatgcctaatcctaaaactgttccctagtatgtgttttgtgtggagaggcctgatgaagattgtttttagccattatcccaaggaccccaatgtacagtcacaactgctcactctgacatcctattaaaagaaaggaaaattgtgttatcagagctttagatactgcagtgaaagataacgagtaggtttttgtagactgccatattttctttttatgtagtgaacatatataatgtgtatttttatgtattattaatatatataaatacacattaataaaaattaacacaattattacttttgaaaattaaagtccctataactaagtacttgtatgacattcatttgtttgtttgtttgtttgtttgtttgtttagagagagagagagtgtgtgtgtgtgtgtgtgtgtgtgtatgtgtaccatagcagttgtgtggaggtcagaagacaacttgtggaagtcagttcttttttccatcatgtggtgcctggaatgggactctggccgtcaggcttggtggcagcacttttatccactgagccatcttacccatccataactattcatcttatttaactgtatattagagggctacacctttttcagaaagacagacttttaatatttcacatgtttaaatatttgctatttaactcatactgtttttttttttttttttttttacaaaacaaattcctcttttcactaagtatgtatctcgtattttcctttccttgtaggtggaagttaggactttggttaggtgaaatgtacgcagtgggagtgagtggagcaaggagagtctcttctcccgtgacctgtggtgccttgtggttgctgatgttactgatgtagctctgcattaccaggattggtttctatggcaatcagagacctgagcttgtatgaacagttttgtgttgtaatgcaaacatagtacttaccaaatatttactctagtacagtagttctgagcctgcggttcatgacccctttcgcaggggatgcctaataccattgtaaaacacagatatttatagtatgatttataacagtagcaaaattacagttacgaagaagcaatgaaaataattatgtttggggatcattacagcacaaggaatatcagattgaacaaagatcgtactgataaataatttaattactttatagcatatacaaaataattatcatagtcaattttacatagtcaatttgaaaacattaacaacatgccataagtctggctcctttgttttttatagaaagagaaaagatactgttgaaaaccagaaataataaacaagttattttactggtggaggtaaccatattaacattgcaatgtattttagtctgtttttccttgctaatatgagtatatattacaatgagatcatatcatatgtagaattgtatgtgctagaaatcttttcttttctttcattaatttttttacctgtttatacccatgcaaagtgacttttttctttttttttttcccaatatattgtgtacttggattctgttaacgtcctgcccagctctcctgtctctctctctgagatagttccccttccatttccctctgtgtgtatagagaagatgtggcatctggatatgcttacctcacttattaagaactccagtacatctttttcatgtaaagatacaatttcatttttaattgtgactgaataaaactgtttgtttatttaaatcatctatctatgatctataatttgtcacatttttcttattcatgcacctgttggtgggcatgtatgctaacttgataacttgcctactgtgtgtaacactgcagtaagcatcgatttgtaggtcatctctctggtgtggtgacttagatgcctttgagtgtattttcaggaatggtatatatctggatcataatagctctatttttcatcttgtactggctggttttgtgtgtcaacttgacacaggctggaattatcacagagaaaggagcttcagttgaggaaatgcctccatgagatccaggtgtggggcattttctcaattagtgctcaagtgggaagggccgcttttgggtggtgccatccctgggctggtagtcttgggttctataagagagcaggctgagcaagccaggggaagcaagccagtaaggaacatccctccatggcctctgcatcagcttctgctttctgacctgcttgagttccagtcctgacttcctttgatgatgacctgaaacatggaagtataagctgaataaaccctttcctccccaacttgcttcttggtcatgatgtttttgtatgatgtttgtgcaggaatagaaaccctgaccaagacacatctcttgaggggtcttcataatggctgcactggcttatagtctgagcagtgtataaaggttccttctcccttgcgtccttgccagccctgtttgttgtttgtcttttgataaccacgttcaagtgagtgaggtggaatctcagtgtatttgcatttgactttctctaatgactaaagatgatgcacattgtcttatacgtctattgggctccatgcagcatcttttgaaaagtaccctctcatttcctttttccacgtgttagagctgttatgaggtttgctatatagcttttagttccatccatgttctaggtatcaacccccggttatgtgtcatcagcaaagcttgtttccgttctatagactgtgtctttagggattctttactgtgtcaaggattgtaatttcatgcaatcacatttgtcaaatcctggttttatttcctgaataattttagtcattttcagaaaatccttgctttatcctgtattttgaaatgtttttatctgttttctttgaacattttcacaatttcaggattcattttgtactggatggttggaaatttttgttgttaacttttttgcttgttttttagaccaggtgagaaatagggatttagtttcattctatagatatccaacatgtggataccatttccccagttaaagaggctgtcttttctccagtatatgtttttgacaccgttgtcaaaaatttttgggtcatctcttttatactttgtgtttgtgtgtgtacgtgtgttagtactgtgctatttttcttattgtggcttacaacttaagtagtatgatacctgtagtttttttcgttttgctcaggattgttgtggctattcagagtgtttggtgcttccctatgaaaccaagaatcatttgcatagagaatgatactcgaattttgctagagagtccattgaatgtgtaagggactttcgataacagctgctttcacaatagtaaccctgccagtgcatgaacatgggagatttcttctagtttgtaatagtcctgtatttccccccagtggtttaagttttcactgtagagaccttttactttcttaagattattcctagacttgtttcattttgttctgttggggcagggggcactgtaatagaaattcttttttcctgatttctacttttctacattcattattggtgtatgtttagtaaagctactgtttttgatgttgattttttatatgttgctactttcctgaaagtattcattgatctaagagtttctggtagaacccatttctgtaaatacaggatcttgtcaactgctgctgtgtcacagatctttcttagggaaatgcacacacatatctctgtctgtttcccacagagagggaacccatgacagaccaaagtaatgactgcaactaagtccaacttgatgaaccgtgagtttactaacagaagtataggtgaggactacttagaggagcaggtatgactcaaaaattcaactgcatcaccaaaaagccaatcccagcacaggtggaaactcgcagaagtgccttcctggagctctttgctcttcttgcaggtggctgcacgggtcagagaaaccctcttggcttttgagggacagctctcatttcccaggtggaacaggtttgtttttttttttttacctgagtctcatgagcctccctttctcttgtggagaaaacattcctacagctgcaaatggtggtaatttgactccttccatccctcttccttttccctttgcttcccctgccccttcgggccaagacttgaggtgctaccttgaataagcgtggagagagcaaagcaccccacccacctcaggcctgcctctagagcagtggctctcaaccttcctaataattcctcatgttgtgatggcccccaaccgtaaaattactttcattgctacttcataactgtaattttgttactgttacaagtcatgacataagcatctgtgttttctgatggccttaggtgacccttgtaaaaggaccatttgacccccaaagaggtcatgagccacaggttgagaacctaggggaactagtatttttctgtgattagtataatgttagtacagatttattggatataactttactgtagggaatgttcctcctgttcctattttttctgattttgaactttgtcagaagccattctacctttattttgatgagcatgtgattttctttcttgagtctatttatatgctgtattacatttgcttagggattattgtttgagggcatattctatgttttgatctaatctattcatattctctcctttccaatttcccttctgtttcctctatcgctttttgtctttaaacctcatatgctcttttttaaccctcatttaaatcagtgagtttatttagttgtacctgtatgtgcctgggtggatggggggcatctaatggagaatgggtaacacttccggacctgcatcctcgatcaacactgacctgctgtggtggtttcagtgagatgtctcccaaagtcttagccatgtgattacttgtatccagttggaattgcagtttgggaatgcttaggaggtggggccttgttggaggacatatgccagtgaagacaggcttcggggttcagacatttacactatccaagtttactttctgttttgtgcttttggttcaagatgtcggcgctcagcttccttttcaagccaatatgtgttcactctgtcatcatggactcctaaccctctggaacgataagcctaaataaaccctttattttaaaacttgcctttgttatggtactttctcatagcaatagaatagtcccaaatacacacttccctcctcaatacccatcaattctccaaggctcctcagatgggggtggaactttataaatatctctccacttctgtgttggcttgatattggataggtcttacacatgcaatcccacccctgtgaattcatatgtacaacagagttatcatatctgacaaatattgattcactacagatatttattccctctggctcttacagtctttttatgccctcttctgtgcaatgattcttgaaccttggtggaggaagctctgatgtagatcttcaatttagagctgaactttcaagtctctttacacatcagtcagttgtaggtccccatattgatttccatctacataaagaaatgtctctaatgaagattgagaaatccactgatctgtgtatatgaagataagaactttgagtgcaggttattattattcttctgcttgaggatcttgccatccatgggattttgtgccactcagcagtcagatgtaagttctgtcttatgggagagattttgaatccttttggaatgtgggttggttactcccatgacattcttcccactgtttttccagtggtcatgtgttgccagttattatgactctcaggtcttacagccaggtaagaatgttgatgagttttcttccctgtagcaagtatagcactttccagcactgtgcaagctagatagtagagatgaggtttctaggttagtaccagctggatttttccatgtcttgccattaagttctagagggaactaagaacaatgacagtagcagtggtaatgatgaaaatggagggatctttgggaccccactgactagcaacttgaaaagaagtacaccacacctgttgttcagctttttatttgtctatggcttgtggcactgtgtcccccctaccctcagtacaaggtaactcctgcattacttgtacacatatgcatgtgtgtgcacacgtatatgcatatatgtgaatgtgtgtattttgtgaaggttccacaatagtaggtttccatattgcattttcagaggtcttgtattagttatctcttcccatgccccctcctcttctctgctctcctattcataccccatttaaccttcctgtttctttatctgctttaccctctcatactactgtgtcaccttcctaccatggtctcgtacacatttcctgcccactatatgtattccagatgtaacgttcatatttggaaattcaaagctaatatccacatatgcaagaagccaggcagtgtgttctctttctgggtctggactacctcattcagaatggttagttctggctctgcatatttacctgtgagttttatttttctttacagctagataatattccagagtatacatgttttcaatatccatccatgaattgaaggacacctaggctattttattatcttgctgttgtgaagaacaaccatgaatatggatgaacagtgcccaagtatcatatacctagatcatatgatacatctttttgtacctttttgaagaactttcacactgattttcatcatgaaatcagtttgcattcacaccaacagtgaataagtgttttaaaaaatatttctcattctaaggtcttcttttgagaactccttttagttccatgccataaaattttaatctgttattttaggtttttactcagttccttatatattcctgacataaaccctgtcaaatgtatacctggtaaagatttgtttcccattccttgtagactttctcttcccttgaatgaaggtgtcctttgctacacagaagtttcttagtttcacgagtacaatgtatcagctgttgcttggtcttaatgcttgtgctacctggataccattcagaaagtccttcctgtgcctactctttgaagcatgttttctactttctcctcttaacagaggaatttaaggaatcatgtctgggaagtctttgataattgaagttgggttttattcagggagaaaggttagggcctacttccttctgcatgtagccctctagtgtgaccagtgctatttattgaagatgctacattttctccagtgtctattgttgactctttgtcaaaagtcaagtataggcacataaacagatccaggtcctcagttctattgtattgattaatatgtttgttttctgtcaatactccagatctctagtagagcttaaaatgagaggtggtgatatctccctcagccttttattgttcaaggttattttgactactctgaattgtttgtttgtttgtttgcaagtaaaagttaagatattcaacttccgtgaagaattgtattagaattttaataaaaattgcattgaatctgtaggttgcttttgataggatggccatgtttacaggcctttccatcctttggaagcttcttcaatttatttcttcagggtctaaaaagctttattttataaatctttcacatcattagatttatttcaagattttgtttgtttcatagttttttttttaatgtgtgtgtagctactgtgagattgtttctctgatctctcagtatatttgttattagcttagccaatcccagtataccacaatttcacagttgtgagaggtttttttatacttgatttatcagtatattagatttattttgaggctctttagtttgtactttatgatacattatgaaagcaaatctcaagccgcatgttttctccttatgctttagtataaatccccttcatgagaacatttatatgtataactataatactactagaacaactaataaaataagtaagactacttgattttcaattcaatcacaagtcatgttcaaatgtctccagtcatcccccaaactttcctatgtgttcaaatcaagatatagattgatgggattgcattttattttgactctcttaagagtcttttaaactcgcgtggatcctcttatttttacccttttaatttttcatgtcatgaagaaacaaactcactaaccttgtatggtattctatgctgggaagttcactgacttccaccccatggtgtcatttaacaacattgtatttctggattcaatttcagtattttggtttgagatcatgttgttcttgttacaccagaagtcttttagtgtgtggcagggctggcagtggtgatggtgacttcatcacacacacacacacacacacacacacacacacaagtttctgttgtctctgtatattttttttaattttagtttgggaaatactgaatttactagaaaaaagatcttatctttttagtatcatagttttcatattacttaatatctgtgttataggccttgtcatggtctttttactttatctgtataatttaatttgttttcttttattgaaagtaaggttcattttctcataaatataacctgattacagctttcctctccctctattccttcccacttctcctaccccctggatctatttcctctctgtttctcattagaaaagaacaggcttctaagaggtagcaaccaaatatgacaaagtagaatatactaagataaaacaagccatcatatcgaggtcagcaaggcaacccaacagaaaagggaaagatctccaagagcaggcacaagaaccatagatccacatgttcacacactcaggagtccataaaaacactaagctgaaggctgtagtacgtacatagaggacccagagcagacctgggtttctgtgagtcatgtagccttgcttacttgattcagagggccttgttcttctggtgtcctctgtatcctctggctcttacactctctctgcctcttcctttgaggggttgtcttagctccggtttagggctaagggggaatttgatggagacatcccatttagacctgtgttttctaaggactctctcttcatgtctggctgtgggtctttgcaactgttcctttctgctgcaatgatgactaataaggcactgatctatgagtatagcaaaatatcattaggtctcatcttattgctacgttcttttagtacaacagtattatttgatttcaccataggtccctggctataactccagttccaagggatccattgccttcttctggcctccaagacacgtggtacacagagtacatgtggtacacaggcatacatacatacaaaattagtaatacaaactgaaaacaaacttttggtgctgggaattaaatgcaaggccttacacatgctaggcaagtcctctgctgctggtctgtatcttagtcatatccataataccttttgtaaaccttgggaagttttgttttcattatgtaccttaccagcaatgtatgataggagttatggttttaaaaagcactattctgagagcctttgtctgccactgtactgcaagacagttatccctgtagaaaattgattccagtgatgatgttactgagaagagtcgtaagccaacatggttcttttatttgtatatacattagctgttcgtgtccacaaaaatgattaaaagatatatttgtttagccttgaattaaaaaggaggagggcataaacgagagacaggaaggcacatgccttatagaacatacagaaatgccttgtttccatttgcttatttctgtgcttgatagactttggagggtgtcaaccagtgccttcagttctcaaaaacaatttttgatgctgctagtctttgatgtcctgtgtttgtaggaatagataaaggagcagagtgataaaaccaaaacccagtcctcttctagatatcctccatgggtggttgtcattgtctagactgtttgagagccagcccaagtctactttctcagctgatctcaactaaatatgcagtttaaaatctttattctctttaactttttttgcattcatttttttcataaaatactgctgtatgcccgcgtaacaagcattgtgttatttctagcaacaggcgtctttcccttgcttacactttgctgtttctcccacttttgttggctttgatgctcctgagggtctccagctgctgttcaggcaagcccctagcaagtctttagctcgagaaatgtttctgccacataaattacgcagcagatgtaagaggcccttctgagctcagtagcacctttggttccactcctctgttcctttaccggtccccgaatgcccttggagcccatgcatttacatctcagtggtcacttgtttttggtggcaacccccaaattgtgactgttttgctgtggccagactgaatgaatgttcttggcagtacataaagagaccaaagcagaattcatacacaagccactcagtaccagtttgcatgttgtagctgctccaggaatcctgaagctgagctggggttttggaattttcggtctggcatgtcctgttgatgtatgatgtagtgtaggcagagtgctaggacgcagttccctgagtgagtcattcctacctgttggctttgtgtggcagctgagattggttttattagttcttatttacagtataattagggaaggaaaggaatgataggttacttgcccaatttaaatgtgacatgatttaagcactgttagctttctgttaccttctgttactataaatatttgtgataattgacttacaagaaaaaaggtttattttggctcttggtttcagggattttgttctacgttgcctaggtttgggggtggttgttgctttggttctctaatgaggcatcttgccgtggtggagtatatggcagaacacactcaacagaaagcaaaaaggaaccagaggcagggcccaaagcagtagttttccctttaagggcatgcccaaatgacccaccttccagtaccaccacatgtaatgcagtgtccttgaggacagtcagcactgactgacgttttctatgatagttaatagaaaccagttgcttaatgggcattttaatgaatttgaattagcaaaatacatatttcatctcatccatgtctcgtttattaagtataaccttcagagtctgggacattaacatgactaagctacagcctatctatatagacctagaactaaccttggccatgcttttaagggtagctgtaagaaaaaaacaaatgatgaagataatgactgcagaatagaggctgtaacatttttactctgtggttgtttatggaaatagtctctgctctggctttaatgttctgactcatacaggctagcaggcaagcacagtggttagagcatatagtatgaccttgcatagcaatgcatttttaatagatattctctctctctctctctctctctctttctctctctctctctctctctctctctgtgccttatttaacagtgacatctatgtaagggcatgcttaggcattttgagttttttgactgaagttgcagtttcatattttgctcagtgtgtgtgttttacagacagtgaggcaatgatgtagttcaaaagaaatagcagaccctttcctagaacttcaatttttctttaactagtgctcttataatacctttttgtttcctaactttaagcttatgatgttcaactagcacacatatttaagtttttaatagattagaaacaataacaaacctgtgatcatgtacccagttgcttattgagttattctatttaaaaatgttttcagagaaaataaaaggccaaatgaaccagacattgggttatttggtttaattttctggaaaataggattgcttttatcagatcccagtgtctcttagacctcatgcttggctgacagcttgacagtggctctgctgtggtagagatgggttggaggaagttgctctgtcagcagaaagggctgtaaactgagctcagagaaccaggtcaccccgtcttgacctgctgatcagtgatggcttatgtcagcatcagaaaatgtggccacacagtttcctgtattgttggttctcacttagagaataacatttgcagtgaggctgtggagcatgtgctgcctgcccgctcaggagctcaggacagtgagctgcacagggccagccctgcgtttgcaaccaagcttgtcagagcatcgtttcagcagtgctacatgtgctgtgggcagacttgcttccctagagcagtctgcctagtgtagcttttaatgcttagacgcaggaacattctcttccgtttaactttacaagttgaatgcaagtttaagctttgatgtgtgggaatatgttgggtcatttctactgtgtaatttaagtttgagccagtaaagattcacagtttctttactctgaatcaacaaagacaatttttaaaaagtagtgactgttcctcccccgtgcgtttgttttttcttttatgaatgtgttgattcaattcagtacaggaacagtttgtgtgttttagtatgtaaaacaaaattgaggtaacattacaggaaaatgtattataaagaacaaaattaggattaaaggctaattataataacagaaaaataaacattctctggacttgagaacatattcaaaagtatttgaacactgaatttaaattttaaaaacttactgagttaaaaaaaacagtgcatcaaattgagttatataagtcttgtaaaagaaatagacacatccacatttacatgaagtaggcttgtttgtttctgaagcataaactggcacctgtctaggtaaccaaggggaagctataacagattcaccatgtgaatgtcagtgagtgcctaattaatattcacaagtgctgtttggttcactgaaagaccacaaagtggaacatcttgcatttgggttttcacttgagcaaattgtgtgaaaaagtagaaacccaggctgcttctgccactgttgtgaggagaaacttctttttttacaagtgaatacagttccctaaaggcacagtaagtttacagctctcattttacagacatgcaaacagaagcctaggtagtgccagttagttactgatctgtgctgcgtgggcagcatggactgaggccttaaagactggaacctgactgcccgagctcacattccaaatttggcttggtgaccttctgagacatgtttatttgggtgttaccacggtcttctttctcatcggtcagatataaatactgggatgcacatcactgtcagtgggtgacacacgcacctcagaagtgcagtcttcatgcacagtcacaattcaattagggtttgctctgctggcttcattttgtcacagctttaaaatttgaaatcatagtcttaattccttaccaaaataagcctgagagctgttttaaactttccctcttcattctccagtattctttattattgagtcaaggaatgtaaacacctacccaccccacccctgcctacacacacacacacacacacacacacacacacacacacacacacgcactttctctgcacagtgttggtacattgatatgcgttctgaaatgtttccatggaacctctaggaaattattgtgaatataagagaactaatatgtattccccatgtgatagtccaggtctgaaattaaattttttgaggttggtagaacccaaatagtagtactttctatcttgctgaggtagaagaatgatttcctatggccacatgaagattgtgctaaagacccacaaagcctgaagctccgctttcgcttttccttttcaagtctatattgaagaccagatgagtgtgtctgttgtatactacttgaataatgttaaggtgtgaacaatgtaaatagtatcatctgtgttttcccagaatgttgtatatatatgttcctcttgaatggtgaaaataataggacaatttctaaaattgtttttcaatggctttaaaaaggcttttttatctttctgtccattaaagtggcccacgttgaaactaggtttgtttgctttttcctagctatccatcaaaaactagaagcagatggaactgaaaaagtagaaggatccatgacacagaaattggagaatgtcctcaatagtaagtttgtctactactgacgactgttgatggcctttagaacaaggtgcagtgcaggtctgcgggatttcccagggcaagggcttggtaacgacttacaaaacctcaaggacaatagaatggaatgaatctgtttgcattttacttagttacatttctcaagaactgtaatttgctacctggaaacaaacaggcactgagacagcagccagggctactactgagtagacactggcatctccattgtcagacctgccagcacgtagggcagagcctcagctcctgcacagcagatgcccaggcaacgtctgtctgtttacactttgccctccccagagggacgtactctagaacattctgtaaaagttgatggcccaacagactcccaagttttctgtttcctcctttttcccttttgttctttttctgacattccgaggtatttgccccaatagcagaagaaattcatcagataaattaatttgtactattattaaaattattacatgttttaaatgtaagttatgtttcccacatgtagtcactgtgtaatatgaagtaatgtgcataggatagccttgaatacacggttcccttggaaagaagggttaaaaaaatgaagcaacctcacatagatgtttagagattttatgaattcagggttatgaaacaaagtgaagtttgtttttatggcttggtttagtcccatgagtagaacatcctgggtcttatgtaaccattttcttcataggtccagtgatgtcagtaagaaaatattttgtagaaagaatgctacctttggtggaggctttccttggtggtagaatttgaatccttggacattccatctaagtttctggatttaacgggacttaaaacctgtccctttgtttatcactcctgcggttattgcttgtcttggggtttgttgtgcttttgcctctaagcaccaagtcataaaccgtgtttaaatgaatatattctgaattttccgtaaataagtatttacccaagccatctctgcgtcttaaaagagacagagcatacagccacacagataagcagagtgtggcaggtaggcagtggggtaggtggatgcaggtgtgtctcttgcagggtttcagcagcatgaaagggaggcagtggctctagataggagacaggctgcaagctagtgagcaggagtgatgtaaactctgtgcccaccagagttctccttagactagagttagccttgaagaggtgagcgcccaaaggagctcagccaggaagccgtgtgatggagcgcttagaagagcgggctgggtgggctcactgttgagtcaacaggagaccaggtgcgcgtgtgcgtgtgctatcagaatcaagtacgagaaaaaaactgagttctactaattgattatttggtgaatatttggtagattgcattcaaaaaagaaaaagataagccagccctaattttagctttttcccaaacttgcatcgaaacagattggttcatgagagccaacagcttcagctctctagcatgtgagtgtgtgtgtgtctgtatgtgtgtagggccccaggatgtgacatggttgatggttgtgtgagtaactagtgcacactgtcttaggcactgtgtgctgtcacccagttacagaaagcaactagctagtcttcctggcgcctgttgaaacagaggcactcagagaaggtttagtctttgggaggccctgcctttgccaagtaccagtgtgcattttttgaggtactttaattctccagctactttcacatttgcttttctgttttcaataccttgtctctccctgggacaaactgtgtgatggttgggaaccatcctgtgttgttctagccgctatattcctatgaggcacaacacacacacacacacacctcacttctgtaaactctcttctcaagttgtccttacaaagaaagagactagtgtcatcaccttgaaataggagacagcataatgtctactctaaataaacatgtctgaaattataagataccattagaatgacaaaagtagatcttctaggtgtctgtaagagacaggtatgagtgtaatggattagtgtatagtgtgacagcaacttcttcccttgataccctagggcacatttcactgctctgtaggtctactgtggtggcataagggctttgtggttagttagttcgttcgttcgttcgttccttcattcgttcctggggtccatgtgtgagacagtgatagtcattatccaaatgaactgctgaggaaaccattctcagacaaggggaaagaatagaagacaaggagaaagccctagcatcagcctctgttaaactgggcgtctgagggcaaaggcatgcatgcgtggccctctgatccacatacatttattctgtgttcattcagtggacagccaaaaccatatcagttgccttaaagttgggcattcttggtgtgagggtggagcaaggtgtatgtgaattaacacacatggaggattttggtgggatggctttgtggacaaccagctgatgtctttgtccacatcattagccccacatgtgatgaggaccccgttcctctgcatagtgctcttgtctccttgcagtcataggagattctcaaagcattttgtgactgctggtgactatatatgatgtgtagatagatcttagtttcattgctctgaaacattttattatttaatatctttcataatgtcagaattatgaaccatatttttattgtaaatgcagtgcaaatcacagaaaaatcatagtttactagtgaaagttgtctatataattttcaaccttgtataaattcaggttctcaattcacaaattttggcataaattttaatttcagtttaaatttcttcttataaaattatctataggaaatatatgtattttattcaagagtagtatattttctacctgttctcgttttcatatttttagagttcaaattattggctggaatttttttattactttagaatgatgaaaataatttgaattcagactgtttgctctgaattctttcattgcatagaaaaaggaatttgctcgtgtgagacccaaactttacatgtaaataaataaataaacagaaaagattctgttccatgtcaaatttaagttacaaagcttaaactcatgatgtttatacttttaaaatgataagcaaatgctttaagatatttttttctgaagaaagttttaaaattcaaattagatttcagtgttcactcaagccttcattccatggcttggtgcaagaaggaaatgtatttctcatcccacaatagaggtttagtatccacattaaataccatgtgggaaaaacagctctcttgaccaaacgaagtttttatatcaggcctttaaaatttcaacagaatttaaacattatttagataaaacaatcatgttacaaagacgacttttaacaggatcaggccacccacagtgtggctgtggtgtgcaagccacccagcgaggcgaggtgagtttttcatctttgcttaaagtatagtcactagaccagataatgtagaaactttttacaagcaggtcaaacagctgaaagcagtttattcttgctctctttttttcttgtagctaattaaaattaattcacatgttgcaaaatttaaactatttttgtatatagcaaattttgccttaaaaaaacagcactcatttaaagtgatacgtataatttttactttttaaaggaaagaatcatacaaaatatcctggtcatacatgagtttacaagatttagctgatttaagaaacagtaatgatgctgtgttaagattttgtcattttaaggtttatgtaattttctgtgcttacaacatagagggataattttgtcaagaaatagggttagctttaatgtttttttttttttaatatttttctgaagacagtttcccatatcccatttattaactgtagtgtgatgcagaattaataaaatttaagtggcttgtgtgtgttctttaaatatccagagttgttataaaatttagaagattaaaataagtatagatacattttggagaaagttatttgggcttatttagtaaatgttgcttttaattagataccattcttaacatatgaaaggactttaaaaattagaaattttattttatcaaacttttaaaaagtctcctgaatttcagtgcagtataacattaccgcttgctttttgtgctcagactcaggtcactgtcacccaccttcctttctctgtttacaacaggagcaagtaacaccgctgacacattgttccaagaagtattaggtcggaaagacaaggcagattccactaggaacgccctcaacgtacttcagcgatttaaatttctcttcaaccttcctctcaatattaaacggaatattcaaaaggtacagcatatgtatgtgtgcagttatagatgttgctgatcttaaaatagatggttaaaatagataagataatataaaatattttatattaaccatgtgctcattgttctttcctaatgatctcacaacgtgtttctttttttcaagggggattatgatgtagttattaatgattatgaaaaagccaaatcgctctttgggaaaacggaggtgcaagttttcaagaaatgtaagatttctttattacttttagccctatcctttcctcttgcaggaggacggtggagtgagtgtctatgctgcagagcgctgcttgcctctgagatctggtttatatggttcttctttaaaatgtaaaacaatcagtgcaaactaacctcacaggttttcctactgctgtgtggtgggaatgcacatccgtggcgagggccagtctcagatgctttgctgttttttaatcacaatgcattaaaaactttcatactagagagaagcaatggtaagtttttcacagacatggaaatctgcatttcagtctcttctcttcaggctaaaacagtgcatttatgagttctactcttactctaacgcaaactcagtactttgaaaaaattactctataccaggtttacagaaaataaaagcttaggtaacttatggttaaaaacttattaactaggagaaataccacaggtcttattaaatttaaaagaatgaaatccataaggtttcagaacgcagaatttatttctttactgtggtgaaatttgcatgcagtgaaatgcacagaccttacgtgttacaggtcactgaactctgacaaacgctcatgcctcctatacacttgagatggtgtgttttgatccctccacaaaggtcccttgtgtctcttctcagtcaaaaagcaaccagaattctgctttctgaaacttgattttgaattcagttctgtaaatcttgcatcctttaaaaatagattatgctgaagtagaagcaggaattgaagatctaagagagttacttctaaagaaattgctcgagactccatcaaccttacatgaccagaagcgctacataaggtaaattgtgtgcaaggattctgatagattgcatatatgtatagatagagtatgaaacccacaaacctaatttgggggaatcaaagtactgatgaaatggtaaaagggaagacaatagatagggatatttggtataggacaagaatattcctcgaatataaatacattggaagcagttatagaggcacccacccctcaaccctgccaccaccctttgaaggaaagacagccttctaggttggtcaaaggaaaagcagtctcattgctcagacctgtttttcctgctcagtaatggttaccacctgactcccctggtggactgggtgctgcacctgcaaatgccatactccacaaggtgggaaattatagcccacaagtgtaccatggcttgactgtagtgaaggatatagaaggttttcccttgacaatatgtctgatttacataccttagtgatcctggagagaagtaactgtggaaatagatttccgttggcagtacatttagaaatactcaccagtattaggagagatgggcctcagggtagtggagaagctaagaggatgagcagctctgcaggagtgagcctttcatcctgggcagctctggagccctgctcttcagtgtcttcatctgcagagggaacggaacaagcaacatgactgtgttgcagggccattgagaaggtggtgttcttagggagttagcccagtacccagcacataaggagcaggcagggaggttcagctgtacatagcttacactgcatttggagttgaaacataagttatcagatttttgtaactgagatttaaaaatactgacttaattttctgctatgctatctgagtttagagtaaagtgctatttcccaaattcagtgacttccttaattagtgaaatttactaaaaatttcagtacctctaagatgatgatagacttcatatatgtatgcatatgtatttgcctgtggtcatcttatggatatagaaaatactgtctgtaggccttcctgtagttagaggctaaggacctgcactaaattatcttctaggataggaaggaacagtgggagcagatgtaggacagaggatttagcagtggaaccagagagcagtgaaactgattgctgctcctagcaaatgcaggccctgtgctcacactgggctgagtgctaactgtgtttcctctctggccaaagggtccagcacacacagccacaacaactgcatatctggtgtcagagcccacccttgcctttcttcctctacctttctgaggaaatgttatatttgaggaactttcctgacttgcaaaactgcacaatttaaagtggaaataaactctgagtgagttagctaagtgccttgaagaagctttgctgcttatgtgttaggttagcttgctcctcctgtgtgtgtgagctaaatttattttcagaagtacactaaacttgtgggtacaaatctgagaagacactgagcaatctgatgaataacttttaaaattacattctattcattagtggttttaaaaataagctcagagccgggcagtggtggtgcatgcctttaatcccagcacttgggagttagaggcaggcagatttctgagttcgaggccagcctggtctacaaagtgagttccaggacagccagggctatatacagagaaaccctgtctcggggggtggggtgggggtggaggaagctcagaaccaggtcaagtctgttttactttaacatctatggcaataggtcctgtgggcaccaagtaaagccagagacagcctgtgcatagctgtgtgtgtccgatccactctgccatgtacagtaggagtgatagttccccactgctgtgttgtctgctctcctgggcataactgaaggtagcctcttcctgtagcgtagcaagaagcagtgctcagcgtggttgcgctctctctggctctctctgtctaggtgtctctctttctgtctctctgtttctctctctgtttctttctctctctctctctctctctctctctctctcccttccccccactccccctccaccactgtgtccctattcctggaacccttgagaagcccaaggagggtgactgaaaatgcttttaaatttcctttgttttgttttcctgagtattgagaccagagtttccctgaaaatgttcctcctcctcaaattctaaaagtctgaatctctactcatgagaactaagatcctttcctccgccccctaccttcccagaagccttcttcagaatgttctctagcatatcagttaaaaagaaaagcagtaacttgtatcactagacaaagattcttttaatgaaactgctaggtttaagcttggtactaaaaaggaaaaaaaaggtattgaagtctagaactaacactgtactttgcaaccaaaacattttctagattttctgagacagtaacttcatcattctacataaaatgtttctaagtttcttcaattttatattaagatggtacggagttattaaaacttttagggacataatgtacaagctaaagagatttacaattttagaacatacaaagcaagtctgctgggctactgctaaggagcctgagtgacacactgcctgcagccctagccaggggcttcacaacgaggaggaagcctctcatgtaagagtgttgctgtgctgcgctgttgatagcctctcaactggggctgaagcaaagtgttagttgtaaagtatccagatgcaaagcagccggatagggagatattgcaatagatgactctcagcaggaaggatcagaaggtatgttctcagggaaggaaaggcaactatttgctgtatttatatcccaaataataaaagagaaaagctcttgggagaggaaaaaatcagagtggatttggagaactttgcactgaattcctcatactaagctaaatgtaatttgttggaatgtggctttcttctgagggtagtgctcttataaatgaggaaggcttataggtgccttctttatatgggtaaaatcctttttcttttttaaagttggcttcctaccttctagcacataaacatagctgtttgcagcctgtggacagtcacagggagggcagacggccatcatggtgctgatctggcagagttctgctctctggggagtcaggtctctgagctattagctcctgaaggtcagggttgcctggcgcattcctaatgcatgtcaggtttctattcaacatcttgtttgttgtgaacttattacaaaatggatttgtttctcctctaattagctgctaattgagatgtctgagtaatgagtccccactactgaagaaatgtgggtatgccccacagtgattaggacacggctaaggtcacagcttgtaaccatcaatgaacattttcatagaccacaaatttttaacctcaaggcaaatgttagctgagggttaaagtattttagtgcaataagttcatttgaaaatacttctagagttgatatgtgtgtattatataagggctcagaaccaaacgagtaatatttgacagaaaaattttgattgaaatatatttaaattttctacaaggatttgagtatttcttatacaaagaaaactttaaatattttaagaactgttgaaagttaagaaagcatccatttgctttacattttatagagaaatagtttctcagttgtaaattaatttaccctctagaggtaagtgcatgctgtcaaaaaaaccttaaatcttagtggcctcatactgaagtcattgtagaatagtgtcacattgccatccagtggctgtattttgtatagaagagattgggggcagggacattcacccagtttcctctgctggctcccacctagggaaatgaagttaatgaaatgactcttgaataatagaaaaaacttgagagaagtgactgtttataaatgtaaagttagtttctccctctgcctcaaacaaatgagaaaacctgcccccggcgcttttgcattgcacagttgtggcgaacgcttcctgcaatgtggtttgtgacttgtggatctgtaggggtagggaacaggagggatgtcccgtataccaagtgcgattggtaaatgcgaggtagaattcttctgatcactattggtcagctgttttcttcctccccactctctttatctctctgtctttgtccccctcctcttttcttttcactctatccacccctttgatttttttctgtcatgttttctttaaataatataaaaataagtctaaatgtaaagaagtgttctcaccaaatccttacaacctttggtctttgttgaactagttttgtcttttttgttgattatttggcaaagagataaattaaaaccctacagctgggtcacctgcactcgctgctcttctaaaggacataagttcagttctagtgcccacatggcagctcagagctgcctgtaacaccagtttcaggacattcagtaccatcttctgacctccaccagcaccaggaactcgcatggtgtacttacgtaatgaaggcaaaacatacattcacatacaattctaaaaagagtaaaaacccaacagctttgtcatttactagtgatgaaagcagtggagtagatctcagtataaactaagtaccaaagacaaatattggcaagtgctttactagtttgttaagttttagcctttgctgttacaacaggagcctgtgctttgccttctcaggtatctttccgacctccatgcacctggtgaccctgcttggcagtgtattggagctcagcacaagtggaccctcaagctcatgcaagactgcaaagaaggccacatgaagagcctaaaaggcaagagattctcttccagctcacttgcttcttagtgcttagtagttaaggggatgaagatgagattttcctgatcttggtacctgtcttcattgttgtcggtcctctgccctactgctcagtactgcccctcacagtgccaaagcaagtgccaaaagtaaaaaagagagagcactttttcagaaatctgtggatgttgttgacgagtgctatagacagaaccttattttatagaagagttaattttccaagaggtggacatgattctgtagacattgtatcagcccctggtaagttccactcttcatcagacatagccagagtcacttgtgagttaggcaaataccaagtgctagatagacagtggtgagagaaagagaagcaggctgtctccccgagcgaccagcagaggaaaggaaacatattaaacgtgcagctaggcaattgaaatgttgagacaggccagtaatgaaaagaaaaatgaccatggttttcaaggaagttaactgagaagaatatttcacatagtcagttcgagaagatagcttacagaggctccatattacctaagaatcagaagtagctgccagataacctctagctcaagtaaggaactgctgtctaggattctggggtaagtttaaaaaaagaaattacagctacgtttatgtgcatgtttattgacttttctttgtttaattctgacactcagcaaaaacatattagtgactgtgctccagttagttgtagtgcagtcccaagggtctgacttgtgcgtgcttccagcatgtgaaggaggtgacacgtgactgaccacagggatgctgtataatatgtcacttcctaagacgagaagttctgagtggcatggtagctcacaggagcaaattgtgatcatgctttgagggtcaggaaaggagtgttgtgagatctgtactgaaagaagaaagattggacttgaggaaaacttattctagaaagaacatcagggagccagaggcagccttgcgttctctgtggctggagggaagcacgtgatgaaaagctacaagagttcaggctatagtaaaatggtgaggtaatggaccttgttagctgcttggaggagttgggaggttgtccagagagcagaaatatgcaattgtccaagcagggaaacagcatatctgagaatggacaaggagagattctatagcagcagagtgatgccagtacaggggaggagtccaggctgcttaggaagtagcatggataggacttgggcaggaataactgcctggagtagttcagtaacatggtggactattgagaactaggaaacagaatttgcccctaactcgcatttgacaggtgagtctggaattgtctgtcatgaaagaagacagatctatgcaagaggtagttgtttggagttaacaattcagagccttggaggttgtttgcacccagactgtcccttgctattcatgcatttattcatgaagatggaaaaaacaaaatagaaaaccaagaacagaatctggaggggcctcactaagtgactggaagaatgcaagcctggaatggcaacagtgaagaggtggtcacagggacagcatggccacatgacaacatgggttcaaaaaaccaaatatgagtgttcctggttttaaaattaagagagaagaacaaaggcgtcatgggttgagcagcaagggtgccgctggtatccttggtgagagtagctgcagtgccttagacacctgggaagggaatagagacagcatccaggtcctgggaatgggaaggaacatacaacatgaggtcagcattgcggccccacagagtggtagctgggaagagagccttcctttgtagtttatttgtcttgagtgaactgtctttagtgtatgtggtttttcagttcaattctgtttctgagtttgatactttggaaaccctatatatcatgaactgatgccacaatctcaattgtcaataattgtctcatatttgttgcaagggaagatgacagtatatgatatggaacaactttggaaatcttacaagtccttttatatatacgtgtcagccagtcatttttgagtctgctctgttctgttgactgaccatcagaatcttagggtggttttaacatctgtcattgactagcctcttataagcatgtccagccttttgacattgtatcagaaaactgtggtctacaaagttcaagttttcaagcttgagagtttacaaaacaaacaaaccagcccacccaactgacagacaaaacaagaaaggaaaaaaaaagtcctcagaatctagttttacgtaactttattgtaatgtgctaggctgtatttattatggttgtcctgtggctcatgcagcccacaggttaaagactggctctgtctgctaggttctgagacatagagtaaaagtcatgaatacaggctgcatccccagtgtgctggctgttgtgctagctagagtcacaagacagtgctgagcagacctcctggagctttgggtctatgggacatagaattttttaaatgccatagtgcatgtttggtagtaattgtgaaaaggttgggaagcgcagaatgcagactcgtatgaagtcatagtgcaggagtacctagcctggtagcaggaagacaaggagggtgtctggagacatggtagatagtgctcaacacggtcatggtttgtttgctacacgcaggatgcattctgacgatggactttcttacctatacttgtctaaagagataatttagtatgaaagtatacagatttctgagatatttcagcatgctcatgtgaagacagcatcccagaaaatttcatgccacctttgcctgagagaactaatgactaatatttcatcactgaaagatttgaatcttgattttactccgtactaggattgggagcatggcgcttgtgtgtccgagacaagtgttctgtcacctggcttcatgcccagcccctcttttcaacttcatgctatgtattcctatgtatgcatgtatgaatgtacttaagatgagcatttcaaaagagaaagtgaaacagcattacatgtaatcagattcctcttggttttttcctgtaaatttgtgtagagcttccgcattaattgagaggatgttagttacaagctttacctagtttatttagtaggctgtttttcttaattgaaagtaaaacacagtaccttacagctctttgaaccactctgcagatttcatggcaataccatgtaatttcctaaactcattatgcaaatttacataggttattgttgaatttaatttttcctttagtcttctgactaggcttaactttacctttgttttgttactaataaatgttaatatgaattatttaaataatttttaaacattagtttttattctttaaaaggtcacatttaaccaatattatcttcctccaatttctcctagtatccctaaccatctccctttcgacttttatgtctttttttttttctttttattattaataacctcaagtctcattagtgctgaatgtaaataattttaacatataacatttaattaaaagattgatgtgatcttttgaagaagcagttttattatttcattttagaaaaccacatgcatgtacatgcatacacacagtgctggggactgaatttggggccttacacatgccctagtcacgaagcatattctcaaagacacacacacacacacattgatacccccatatatgtatgcatacacaatttctcatatacctagcttagtttaatcagttgttagctagtccttcacctgttacttccctctccctcatcctatgtatttgaagttgaccacataattatctgtgcatttttagaggcaaatattatttaaaaattttaaatcgaagtaccaatatgaatacttgaaatatcaatatattttatttttatttggaggtgtcttgtttgtttgtttgtttgtttgtttgtttgctttgagtcaggattttttatgaagcccaggctggcctagaacttgcagtggtcctctggtctcagttttctgagtcctggaattgtaggcatatactactatgcctaatcttaataacttatgaataacaaatacctgttaaatttcaagctcattttaactttatctagagtccttcctaggtgtttatacaatcgccttttatacttgatcctaaccaaaagccaggaagcaatgctaccatcactttttaactgatacttctgtagatgaattggcagatgtgcccagtacacgtgcagtttgtatcctatcacagaagagccggttactaggggaaatgcatttgctttaaccctttttgcagaaggatgctttcatgtcagaattatatgagtatatgccattggatttgctcccctttaacacacagtttggcaggcattggatttgctcccctttaacacacagtttggcaggcaatgcaatgatggtgtacaggtctgtgtgtgaggggcagtcttcagctaaaacacatgccttaagtgtaagtttacagggaataaacagttgttctttcatgtaatctatagttgttgatgaacttgtagcagacactcacaattttcttaagtattacaatgtaaggcagagtggaagaagatccactaagtgtgtgggtcctccatcagtcatacgttcctaatgtgacatgttggatttcctttgtgaggaggtgtcacagcaacgactggcagatgtaccttctcggtacacactgatcatgggaaggaatgcctgtccagatccttttctggttgcaccatcctgttctctccaggcctgtgaatcacagcacaccagtccacatgtgcctgcgctgctctgttgtggcaagtgctccatcagactgggatttctctgccaggaaggcaggctggtcccaggctacttaggaagatctgtactgagacttcccaagccagatgagccaagtctactttctctgtgttttgatgctcattttctgtcataggtggattttataaaggaaaggttgtacgatactaagtagtaatccattgaactgttatcctccgcttaagaatgtgatctgagttgacactgagaagatgaaggtgactgctagaaggggcccagaaattatggttgcatctgagcaggatacctctagctttccctctagagcttcaggactcatgggtggcagggatggaaaggatcattgccatcagcctacctgatggtgcttgtggcttgatttgaccgacccctgtgttcagagacagagtgccggactgcctggcgcaagcttggtggtcttgattgtagctgtctgttgtaggtcctgcatgtcagaaggtgtctatattccagctgtcagatgctgtttagaggtggtgtgtgtgctctgaaatgatggtgcctgcatttcatctagaactctgttgtcaaggtgccatggtgctcagaaggtagtctcaggacctcatctcacaatgaaagctggctgtcctttcaatctaaaaacagtgaatctgaaggctttctatttattctagtcactgcacttagactactaactctggagaagagaaatgaatgcagttgtttaaacccagacaaaacagaggctaagaactgagacagtttgtgaaataaaatccagtttaaatggataggctataaatattaaaagcaggggaagaattcttggtgtctttttttaaaaaaatgtcctttatacacatgatctgtatcgaggactgggagggcctcctttggacttcagttgttacattattagtgtacagtcaccctggcagatgctgctcatgaaatgattcaatgggagggctcactaccttcctcagagagctggcattcccagattccctccctggtccctgggtcctgaccctgaagctcagatatgacctttgggatctttttacattgaggaaaagtgtcaggagagaaaagcagtgtttatgttgaaaaacataagcatttttagtttttttaaatctcatgatttatgtatgttataagacctgattttgaaggtttaaatacagatgcaggatttgagtattgtgttctttttagcctgaactgagtgaccatgctgtttctggtgccctgggtgcacaccacccaatactctgaaccattgcacaagttaaactttttccaccgcctgaggattggtctctaggaattcctatgaaataggtccaaaatgagagtatgtcttaaggtttcctggcaggaaaagcctttggttaaccccctgctgggactctcaaacaggactttgaaaggtggccttcaaaggtgtcgtcttctttgttcctaaaatggcttgagtttaactccctgagcagctggctgtctggtaaactgggggaaaggccgtcagctcagtctcgcatctttggatctgtgctctagttagggcttccacaaggacttcctagaatcagagctcagtgaggggcatttagaagaggagccaaacttatgtaagcaatgagttcttaaaaatagacacacaacagaaggaagaaacattcgcacatggctcaggttgtctttgaagacttggaggggacacgtcacacctgactggctttttctctgttcacagtggtgagtgggctgcaggcagtgagctgctcaaagtgcctcacagctctgcatgcacaatcctttgggtttgatgcactgtaaaccaaccagccaacaaaataagatgtttttaatgatttcaaacatctagtagattgttaaatactcactgataaaacgaaagatatttgtccacaaactttaagttacagagggcttccttttcagctgacgctcattcagtagtcggtgtctacaaatgagctctgcttttgttgatctttatctaaatatagcagttatctttatgtacacattttctccataagcattttaaataagtaggttgctagtacaattctgatgttttcctaatggaagagtagtgtagtttccatgtattagagtaaattgtactcctcattaggaaactgttggcgtcactgaattttctttagaattacaaaaaaaatatttccatagttaagacagtagacataagttattcacatattaaatactttttaaaaattataacttttactttaaagttatagtgtggtttgtacattaggaagggttcattatggagttcatttcctggagactgaaacactgaggctgagtgagtgactctcagtgtttgctataacacgccctgaatgatagcccttagaaggagaaggaaagagaagacactactgtagcaagtgcaggtcgattcaggttggtctgcatctttttcctacagctaagtcctctggtattgggcacataaccgctgggcagtgtggaagtgtctagttgcagactccttggagggagtccttcacccggacagttgttctttcacatgctgtaataacagtgtgttttaaattggctttagaagagggaatgtttggtaggatttggtacctgttgtaagtctgggagctctacggggctgcacaggataaagtggatgtaggagagggaagcacaggacaagtgctgagcccaaagcagcattcttctccccaaccaagggagggcaaggatttctattctcctctctctttgtgtgtgtgtgtgtgtgtgtgtgtgtgtgtttgggttttcagaagcaggaagaaagaacatcatgaattggattcagagtgcccacattagaaattgttcctatgtctgaaagtagcataagtgtatataaacggttgtatttgccagaatacaattaacagtttttaaaaacacgattgattgtagattttgaaatacacacacacacacatatatatatgtatgtatgtatgtatgtatatatatgtttgtatgtgtgtgtgtgtgtgtatatatatataaaaaaatttaatgactgttttagtttacttttctgttgctgtgataaaacactgaccaaagctgattgcaggtagaaggaaggcttcatttcaactgatgaattatagtccatcgtttagaagtcaggcaggaactcagcaggggcagtcaggaactatggaggcagaacgaaagcagaagccctggaggaatgctgtttactgtcttgctcagcttagtttcttatataagccaagcccatcggcccccacaggccctcccatgtgaaccattaatcaagaaaatgttccacagacttcctacaggccagggtgatggaggcattgtctcaattaaagttcttcccagataactttttgacttgtgtcaagttgacagaaaactaacgagcagaatgagaattttacctttcaagtgaaaataaagaccaataattttcaccagtaacttaggcactttttaaaaagtggttaaggctttatgaattaggtgtgccttttcagtggagtttcgggtctgcacagtagagtaggaactgttgtgtgtgccactgggaagaaccggatcttgttctctcatcaggagacctgttcacctttttgttttacacagatagatcaccaaggctttgtcacaggagctcttctttgggttgccccctgcagctgattctctgtggcttactgtacagcttgaagacttcttgcagtgagagccacttccacttggtgcctaactaatcctgtcctttcttcctagtagaaattaaggtttaacactaaatgtcgggtacacccagtttagaacatgtgcaaggcaacagtaaaacgttgacatttgcaagtagtcttattctgtattatctgatttttataactctgacttgcataatatagaaagtttcctcaaaagcagaggttaccctttttggttactcctatacctactttattacaaactatttcactggccagttggctgttctagcatcttgaaagttcacatcgttaattttgtattcaaaatttatttccttttttaaactgttgttttgatgttgaagtacacaccagaaatgtggtctagaaccaaaattgggaagctcaaatgtgagtgaggcaaactgcatggtgactaagtcctttgggttaatttggattaaattattcccttgaaattgaggaaactgctctgttggagcttctaatatatagattccgaagatcaaagagcatttttatctgttgacacaggtctaattcatgaggaatttgtaattctgccttgatacccccacccccaccgcagccttggcattgaaattcctctgtgtagtgcttgaaaggaatcctactctgcctctgcctggaggctcctgggcctacatgtttggtcaacaagcaacagtgggtggtcgggctgcagagcaggacaaggacccgctgtgcacaggaaagtgtgttcaaaggtgtttaagggtggcaaggaagtaggctgccctcctgaatctggggctgtggatcagtgtcgtccccctcaacccccactattgtagactgtgagaaacttgctatgggaggcatggagacacagtgaaggtatcccctggctgcgcagctgtaggctttatggatggagcctgctaaacaacgaacggttaacaaatatttgcattttaaaaaaggaaaatccttgcttttaaaaatgagatacatgataatcaaggtatatgacacatgctaaagtttcctttcctttttatagaatctcctagacgtcctattgctatttgaagctgtttcaggttcacgcgttatgtttgtgagcttcacaagtgctctttctgaaacaattaaaagctgaagcccttttatctaatggaaatttcacagtttgtaggaatcagaaatgtttcaaatttatagcaaatggtgacaaatgatgacatgaccaggactggttgcctttagtgaccctaggaacacatccactacttctaaaccaaacttccaactggtttttctcttagtaaaacaagatttctgttctgttttatgttctttcaaaaataatttccagatttaatgtttgttttaatttgttctgcatacttcacattagaagaaacttataaagaatgttgcttcttgaggttatagaaaatttaactggaaaaataagataccaacttttgattgtgtatgggtttaatggtaggtatcgtacagggtcttagacatgtggtcaaattatcagttgatactggctgtggcaactgaaggatgcggctagacgtgagactttactcctagaactgggtggtcttgtctcccgtcctgcatggactttcagagggaagctctctctgtgctgcagggttctgtgcctgcttgacctttccagagccatccgcatggtagttatgcggcagatcgcttccacagagccgtagtgaagggggtttcagtcttatgagtcattcattcattcattcattcattcaaggcgtagttgcgattcatgttcaatgtgaagtggtaaactttatacctccaatcaaataacaactgctaatcaaaatgcatgctttccactttgttcatacaaatgatgcaaaacttcagatcaaaactccctcccagtcataaaataataattttacagctaggagggtttcatagttggaaagcattcatctttgtagctccaattttcaacatagtaagcctctacggagagccatgggctttctcttcatatgaatccctgctgctgttcctagtgtggagatacttagtaaatgcagtcgcctcataattgacagtcaagttttccaagttccccgtgggctgcagatgtaaatcaaaagtacagtggagccggtccttatccccagtgttgccaggagctgccttccccgaagtcccactcaccaaaaacttacaaagttttgctttttgacaaatattatgtctaagaaaacaattgatttgttaaaattcatgttaacttaggttgaaaaggacggggccaaatgttgctttatgtcacctacagaaaaggccaatgcaaacgctaaagcctgaaatgtgtggtgatagagaatgatggagaatggtgtcctcagctgattcccagtggccaggtctctgagcgctcaaagaaaatatgcaaagtgacaccatcttcagtcatatatgctttttgtaaaaagatgattttactttaaattatgtatgtgtatgcaagtctatgtgagtatgtgcacatgggtaccagtctccaggaggccgaagaaggaacagaattgccctggagctggcctcatgtgggtgctgggaactgaactcgggtgtcccacaagagcagccagtacgtttcaccccccatcgtctcttccatcccagttgtgtgtgctttgtataataaacaggttctttaaagcttcttatatcgtgtcataaggtataaatgaagaaaggttgacttttgttgagaattttaaaatcttatgccgagtctatagtttacacacacacaaaaggtatttctcttgttcttcattgtcctatacaagtactcatgatcaaaacaacttatctgtaatcatcttgagaaataaaagtattgagccatgtaattgaagctttcaaggaatgtcaatctgcaaggccttttgatttttgacatagtaataatatgtgatatatggtttgtttaaaatacatgtctgaataaatttcctcctaaactcatactgccctggcattctgtaacacactgtgacacctttggtcagaggaaagaaactaaaccttgagaagagaaactctaggttagtatccgccacttagctggagggtttaaaaagtgattctcagtcttcctaatgagtgctgcgaccctttaatacagttcctcatgttgtggtgaccccagccataaaattattattgttgctactttataactgtaattttgctactgttatgaaatataatgtaaatgtttttgagagctagttgccaaaaggggtcagggcccacagtttgagaccagttgcttcaactcttacatgtagccctgcagcgccaccttctggtcactcagctcacatgtttacagagatcattctgagtggcagtgtgacctgctgggcacacgctgcttcaggtacctgcctgcctgagttattgcttggtgatactaattaccaggtaagcagttctttcgtgtgttgcaagcagagcactggtgtggtgctctctgacagaacagaacatgttattaatatcattgttaaagaaagtgatgaaacaatctttaagtttcaaaattcaagcattcctaaactacaaatattatccaaccatataacttaaagtcaaagcaccagttaaggagaaaaacattttttgaggatctacttatgagatgctaattccaatatttgtagaaatgtagataatatattttcatgaggctagaaaatctttcttacttactcataaatggatagccttagatcccatgaaaataatgtggaatatatattcataaaataaaaacattttgtgatgttttaagtatccatatttatacacattatgaactttcagatatttctaacatgttactaagcttaagcccctttatctttctggtacatcaggaaattagtgttttgatattaatttttctatccttagtaacagtgaagaccgtataaactacagtgtgtaaaatgtcataaatggtgaaaatttccacacattttccatttactacggaaagaaatcaatttcagatagctttatcctgtctgtctgaattccttttgccgccagtgttacagaagctgtgcagaggaagatgtcagggaagaggctttacgcctgctcagttggatttaaagttagtcatggtggtaaagtccaggcagcagtttccacccacagtcaggatgtggagagcaaggaggccttgtgtttggctagcatgctcctttctgtgcaagctaggacccagtatcagagaacagtactgcctacgttagcatgtgccttcccacctcacccagccaacataacccctctcagtgtggaggggacttgcgggtccattagtgtcaactctcggacttactgtttgcagtcttcagctttgcgtcctgtaccactcattgactttaccttctggattgtagaaggcttatgtgtaatatgttttaaagtgggatagtttagcagcagttagcatagtcatcagaacagggtccacaaataattgtactccactgagggagggaaagcaagctatccaagtgacaaaactttcattctgtaaaacccactgtagaatgtagccagtactagatcatgtttggtgatgcacagtgacaggaactcatgaaaaaaggtcctgttccttctcactgtattctctgagtagcaacttcagttatattgaactgtttattgacttattttctgccccaagtcagccagaatctaaagtcctccagaacaatgcacatacgattgctcagtgaatgctggttagatggtattgaatagctgtcatctgtgttgccatagaaatatcaccttattctcatcaaattattattttaatttataaatggcacttttccttagaacttgaaaatatccatatgcttttaaaattgaattataaacagttttttagtaactaacttgaaatcagtcactcatatcttgagggagtagcctgtggaaggcccggacgtggggaagagaggaagcactcagttcttttccccgaggagacagggagctgccttggaggtgagcagcacaagacgttgacagacaacgtgaagttggcagcatgaagcacatccccagggatggtggaggcagcgcaggaggaaagcagtttgagttagggcagcactggccaggcagtagctgtggtggttgcatctttagagctagaagtttacatggatgaagaggagtgagcatgtgtgagctgtggcctttatgtgtgcagagggacgagaagcacggcctggaagactgtgcgtttctagctaagcatggctcttgttttgtagccattgagttcttaatgtctgcttttgcagtgtcgccatgcctgattttgctgcatgctttctcaaactacacattaattccaccatgctgtctcttagaacttggtattaagccagaatggtaggtcgagttatccacatgtaatataatgaaactgactttataaacctatttagggctacaagtagcttggtggcagaacttttacatgcgtgcctggacttaatcctcagcaccacaagaaatagaagaacaaaagctatttgtggaaatttttactttcgttctttacttaaaagagtgaaatggttgagcaaggaagagctgtaaagaagcactagtctggattaaaccacacagaataccatctctcctccaggtcacccaggcccgcacagccccatgctcgacctagacaacgatgtgcgcccctcggtgttgggccacctcagtcagacagcgtcactgaagagggggagcagctttcagtctggccgagatgacagtaagttatcacccctacttccatgtgtttcctcagacttatatactttgaagggatttagtgaaaaggctccgtttcatactctaggaaattgacaggtagtaaaaagatgaaagagaatacgatgctctcatgttcccccatgcttcgtggagtaagccctggaaccacaccactttgcacaggcctggatgaccaagcaacagtgtgttaagtactgagggcctggatgactgagcaacagtaagtacttgtggcacatctagcactacagtgtctgtctgacagcactgcccagagccatgtcagtcttctccattgctgtgaaccaggacaaagttattgtcctagttacccaccaatctgccctaaaatatctgctgaactcagcttttggagtcagtttgctattttttaaaaaataacttttcagtagttttctcataaaatggtttcagctttaatacttattggatttaagaaaggacctaaatttaccttttgctcctgttgtggtttttcaaataatgttttgttttttagtcagcaagaagtcatgatcagctgctttgagactagtgtgtggtgagtgtgtgaatcagagagattcctatatgcatgggtagagtgcacagtgagatgttcagagctctgtcagcttcacaggggtgtgcttctgtccatgctgctttcctggatttcccagcaaggaaggcaggtgctccgggtgagtgttccacagtagccatgcagagcagtggcagtgctccagtgagtgttccacagtagcagtgcagagtagtggcagtgctccagtgagtgttccacagtagccatgcagagcaatggcagtgctcctggtgagtgttccacagtagcaatgaagagtagtagcagtacagagtagtggcagtgctcccgggtgagtgttccacagtagccatgcagagtagtggcagtgctccgaacaagtgttccacagtagccttgcatagtggcagcagtggtcagagagctgagggatggagtaatggtactttgaaatactcctcttgagacagtgccttgtgactgctacagtcaggcaactcttctagtgctttagtgtaaagagcttaacttgggagctggagagagtgcacaatagttaacagcccttggtgctcttgcagaaggcatgtgtgtggttcccagagcccaggttcacatatgtatggaactccacttctaggggatccaatgcccttgtctcctttccattagcataaggctggctggggcatgtgtgttccaggcagcatggtgtttgccattagcacaaagtagttagaggtaatcagttacttttagggaaaatagccctgttgtccaatgaaatgcttcttggtagacttaccttatgttgaatttgtctgttctagaaactgaaggcagagcttgctcagttagtcagcagtccacatagataaggtcagaggtgattgataagcacacagacaatcttcaccagggaacaaataaaagtttacaacacccttagatataaaggaccatattgggaacaaaatttaaaaaggggggctggggccctggggcagaacaaaaggaaaaagatgcccacgccccacctgtttccctatcctctggtcagtcagatgtgggaaagcttctttctaccctatccactcatccctgggtgggcattcctctatcccactcttcagggggtggtcaaggggcagccctgcctgacccccacccctggagctactttgctaaaccagggttgtgggagagagggaagagggaagaagttcccaacactgaccagagtgcacagcggaacttgaaggtgcagagcagagactctatggttttagagctttattatagaaatgcaggggaaagagagaaggtagaaaggacggagagagagggggggggaagaagaagacaaagagggaagaagagagagaagtgagagaaaagaagggtgaaaggacaaaggaataagagagcgaggtgtgggctaagcacccctttttatggtcttcactgttgctaggtaactggggaggagtttaacctgaaggtcagaagctactactggccatgcttctcttgtgggggctgtgggaggtggtaccttaggcaggggccagagatccaggaacatgagggaacgcctaccttgtcatgtaggtgaattatgaccatcggggttcagacctcagctcgactggagaccagcctgcaattctccacaggaccataccttttacttaagagaatgagtttaaaactttcccccacagtatagaaatgctgatgtgccctaccatgcagaggccctaagctggcaaaaggaagtttccatgcacatgaagtcttcactctggttcgtacggtggcagttgtaaaaggcagtgatacttcagtcccacaaagccccagggtttgttctgtgtggtcttgggtttggggcttgtctgttggtaagattttaaaaagctgctgctttcatggttctctgaaagtggacaggaacctttgcatgtatgtagcgatgtccttctcagcattacctatagctgcactttgtgacccagtgactcttgtggtatttattcttattgcaaaatgctgaatgaggaggatttcatttagtgagagtttgttaatttgaataatttcaaatgaaatagtctgcagaaatgctttctgtatgaatatgaagctcagtgatgagaagtccagagagccaaactgaaaaatacagcaatttcaggacttttgacagtgaagagaacgtatttatatttgcttccatatataaaaagcacttaacaaagaattgttaaaaaacctgctcacagctctttatcaacaggcaaatgggggagagacattttaaaatagatctgctgcatccctccctcattgggatacaatgccaacacgttttatctgtttttctttatttctgtttacctggactctttctctgcttaggatagaactcatggtattatgtgttctacacaagtttcagacactgagccaaaaggcaaccctgcctaggaatacctattttcccttgggccctccttattagtttctttgggtgtgcagatagcatggttgtcctgtacattatggctaatgtccacttaaaagtgaatacaaaccatgcgagtgtttctgggtctgaattagctcactcaggatgatattttctagttccatccatttgcctgaaaatttcatattgctgttgtttttaataactgaatagtataccattatgtagatataccacgttttctttatccactcttcagttgagggacatctaggttgtttccagtttctgggtgttatgaataaagctgctttgaacctggtgagcaagtgtccctttggtatggcgggccatctctttgctatagtcacccaggaggaaagtgttttgcaggcagctaggtggaggctttcttctgtcctgggaggagcttgagcactaggagatatccaagcccataccgcagtgacacactttctctaacaatgccacacctcctaatattgccactttctgtgggccaagaatattcaaactaccacactagcaatccttaggataagggtgaagcactgtcctctgaggacttggcagctgctctccccttccctgctgcctggcactgccagtataatgctgagagaagtgcctcaccaaaaggaagaggtgggggcagggtccctgtgtttcagtacaaatgtattcatagtgttttactcttttaccctttagcatggaggtataagactccccacagagtggcatttgttgaaaaattaaccaagcttgtgttaagtcagctgcctaacttctggaaactctggatttcatatgttaatggaagtcttttcagtgaggtatgtatacacttctgactccagatcactgaatttctaggcttaaaactaaggttttggggttcttttaaaaagtcttaggtgtctagtacctttaccaattttttcatatttaaaaaaattaatcaactttatttttaaactggtaagcaaataaatacatcacacaccaaattagacattttcacatttttaaagattcattttaaaaatcttggtgatccttgagtttgttatgtgattgagacttagttttcttatctgtaaacagagaagagcaaagttctcttgtacacagtggttctaagggctaaatgagatgcacatcgaaagagaggtcaaggaagttgatttaaagattcagaatccagtggaaaattgtgtggatgtttagtgtatgaccaagcaatgaagaacaaggaggccacggccctggggctcagatctaagtttcccaatggaaagaatttagtagtcacacaagttatccagcccctgtctctgaatgaagtgttttgtaaatcattgcactttcagagtcagcattagtgagtatagttttaatatacagatctagtttcatctacatgtaaccattgaattttctcagtgctgtgttttgagatgttatcctttctccaatgtgtattttgttatctttgtcaaaaatcaagtggcatataggtacctgtaggtgtaaacaagatttagtagtattggacagtagtagactgatggacgtctacaggagaacaaaagatgtcaaagcggatgaatgcatatgaaatacgagtcccatagaaaatggtctataagtgccatgttaattatttccacccaagtgtttttttttctggccattttgagcctgcctgcctgcctgcctgcctgactgcatttgtttgtttgtttgtttgtttgtttgaagacaggatttctctgtgtagtgctgtgtagaccaaactggccttgaactcagagagatctacctgtctgagtgctgggattaaaggtgtgcacgacagagtacttgcttcatttctttgtagagtcataaagttgacaaatgtttttgatcttttctatctcagttaaaagagaatatacttctttatagatcctacatagttagagtaaatacatatatatttggttataggaaaaactctgcatgtttttggggcatttattctattaaaaagcttaaaagccaccactggagagttgcaaaaagcagaagggttagaaaatgtacctacttggggactggagagatggcttagaggttaagagcactgaccactcttccagaggtcctgagtttaattctaaacaaccacatggtggctcacaaccatctgtaatggggtctgatgccctcgtctggtgtgtctgaagagagcaatggtggtgcacacatgcataaaataaataaataaatcttaaaaaaaaaaaaaacaaaggaaagaaaagaaaatgtacccctcagccagtctctgagtgaaacaagaacgttcattaaatggacataggcatagataattgatataagagagctttaaacactgtccactttaaatgtccttttatttctaaattgtagaactgtcttattaagagctcattcgttacaagcttctaacagttaaaacaatagtcacttctttaaactatttgggcccatgtgaatcagaacagtgaaatctgccgttgggctcaccacaaactggttttggtctgattgtgcaggaaagaactgaggccttaattaacgaaatggctaataatactgcctcacctgtaagttcgctttaaacgtagtatattttaaagtatcaaataattcttatacattaggaaccaacatttttaaagttccagagctttaaagcacatttaaatgttattaaaagtttaaaaagtttgactttcttttaaatagggcagatcttatgaaccctttgtattctatattggggttgctcaggtctgtaatatcaaaaccatcagaaactgttgctatcacacaaaactctcagccatctgctctccattttattgacattaggtctctagaaaagagctccaccaggctttttagaatagtgtggcatggcatgtcatggcaaagcacacaagcataagcataggcttagcatagcagctctgccctggcggctggccagtctgtcacaacaagacttgatatctaggtgattttggcaggcatttagatcagcacagattgaaggtagagctgcttttgaaagcatgttcagaacagtatcctaaccacagtgtgccaggtactgacacatacacacacacatatgcacatgctatacatatacacacatatagtgtacatgcataaatccatcctaaaatactcagataccatgtaaataaaacaatgactgagataaactttactatctttccctcttgaagtgatcaaataaaagtcaatttttaaaaactcatcctaattctgtgagtgtgtatcaaaggaacaaagctaggcttctaatgaaagtgatcaatgatgggatgggaggaaaagggactcagaacataatctctcacctgagccttagcatacaagaagtagacaaaggagttcacacaacacacatgtttccaaagggaggttccaaggagagccctggcatgcacaggtcctagcgggcttgggtgtcagtggattgggttgaggctggaggcactgtgggtcagctgccttttggagagaatcttgggaggaaagcataggtctgtgtgtgcaggcagaataggagtgagagaggtggcagtggggttggggaaaaagtagtgggtgtagtttgtattcagaggtagtgtgcaggtcttgctggtgaatcatagggagaaatcaagacaagtgttcagatatagcaatgaaacaggcttctggctaagcaggtgctgtccacaaagtttctttcttgaaggaaacctgccaggtttctggtttttagtgtactgcatgagaggatcctgtgaacgaatacttaggagataataggtaatctaagatccctgtataagtctcagaggttttgaactgcaaatccccgtaagggagatagtatttgaaactaaaggcaaaattagtgggaggtaatagaagagaaaaatatttcccatactcagatcagacaattggtagctttcagaaggctactgtgtatcactctgtgagccaaacaaagcagaaagcagagcagtagagctctgtggtttgtctgggtgggagagagaaaccctgtgctgtggtaccttcctggctgttggcgtcatctcacctgggcacgtagccttcatccttacaacattcaggctaatcgtgccatttccctgcttactacacttaatacactttggtatcttatataatagtatataaaactacttctcatgtaagacagtgaactcaggagttagctttttaagtgattatgatataaacttttaacttatatttttaagtttcaaagtaaaagtatatttgtacaaagaagaatgatgaaagcttcacagcttaacatgaaatcttaagtcatgtaagttaagggtatgtgctaggtatatatttggtactggttcttaatcagcagagtagcctaacccttcttgtactcattcatgtcaatgatgcccagctccatagctctagtatgtgtgctatatatgcacatatagaaagcatgacttatattctcacattgacttcacgggaatattgtaattatttatgcgtctcttaacttgaaaggtctttgacatgtctttacacttagtcaacagtacctgaaaactttaaacttaacagatacattttgtgttatgttaatgaagtattagagtttgttctacagtacttaattttgttttgcttctctatctgaaaaggtcataagcttgtccttttaggccatttttatatagtagtatttggttgtcagaacatttgttagtaagaaactagcagaagtccagttgaatagattcctcttaactatgaaaacagtctcctgtacattacattaaataaagaaaaacatagactttatgagtaaatagaaataaataattctaaaatgatagaatgtattcactcctaagatacactgcgaagaaaacagtgatttataaataaaaataaagggacagatgtagtgcttgtgtttatgataaatatttaccaatttcctttggcacagatgttgtgtgctctccattagctcagcgtttactctccctttgttgctttgccagacagtgagatgtgatgggaagagtgccgtcctgggcacgacgcaccatgtggttcagttgcaagttgagcattgatgggaaatggcacacctaattcacctacgaaatttgtagtctcagcttggttcttgagtgtgtgcctcgatttgtagcagagcttagaaagacgaaggctaactcgttttggaataagaaaggttttgtttctggttatgtcttaacattcatttaatcaggttaagtctcatgtcttcctgtatggatgctaaagcatttcttaacttttctaagttatttctaaaagatagctaatttttttttgtcaatttcttagacggctgagaagtcaggccagagtgaaagatcaaagaatgtgaggcagagacaaaacgatttcaaggtgagtgaagggtgagaatgctgacttctcagagcactctctctcctggcgttattgaagactttacagtcaagatactgtcttatcatttagaacaaactctaccaggttgatgaccataatgcagttttgcttttcattttctagaaaatgattcaagaagtaatgcactccctggtgaagctgatccggggagccctgcttccactcagcctccgagaaggggatgggaggcagtatggcggctgggaggtgcaggcagagctttcggggcagtggctcgcacacgttatccagaccataaggcaagtgtgggcacgtgggagccatgctcatggaaagggctcagtgggtttacatgcatttgtttgctgtagtggtttttaaaacagtcaacaccccagagtaagatatgctacttaacatgtcattgaggaatttatcttctgcctctctgtcctgaggctcctatttctcacttatctagccaagcagttcttcagcatgtctggtatatgtgctggatgagagtgtcatactgtctgtgcacccatctgctgcagagaccctgtactgttcctgctgcgctcatgctgtcactcctgagctccgtgaggcatacacacaggacagtccaggcaaggcagggctgctcggatcccccttttctcacttgtgttttatctgtttgccaggctaacatatgaatcactgaccgccctggagattcccaatgacatgttacagattatccaggacctaattttggatctccgaatacgttgcataatggtgacattgcagcatacggccgaaggtatcttagttttactggacaaagttacctgagctggcttctttccagcttccaaagccttgaaaatgagagaaaaatagtgttagataaatttgcacctatttattcatttatagctgtagaatagaattttttcttttttttaagtatcttttcaaaacaatttaagatttaaggcattgcagaagtgaaggtagatatacttgaaactaagaatataagaatacctttataataaattttaaatagaaactgctggatatagaaatttatgtaaaatatggtcccaggttaaaaacatgtggatattttctaagttgattttaaaagtcacatgaaatcagaacaccgttagcagtgtttctatgaatattagaaattatacatgcttttctttatatttccagaattttctatatagagccactgacttagttggggtgctcttgctatgaggaaacactgtgaccatggcacttcttataaaggaaaacatttcattgggtctgccttacagttcagaggtttagtccattatcatcattgtaggaagcatggcagcatgcgggtagacatggtgctggagaagaagccgagatttctacttcttgatctgtaggcagcaggaggtgaactgagctgctaggcttagtttgagcatatgagacctcagagctggtacccagtaacccacttcctccaacagaaccacacctactccaacaaggccacatctcccaatagtgccactctctctgagcctatggggggcattttctttcaaaccactacatcctccaaaagttattttttataagtgacctttaaagtattaagtgtttaaaaaaaacaagaactttgttataaacagcataggctggtatcgtctgccaccagggttctaagtggggaaggccttgcactgtagaattggaagttaaaacatgtgtcaaaggagagaatggaatgcaggtaagaagctaaacatgcctcccacctgcacctacacaagcctgccctgctgaaagtttaggtaggcgtcactccacgtgagaggtagccaccattcaggatccagagggagggctcaacactgacgctaagccactcagagcagagaccctggagggctcgttttgcacaagtctagcactgctgcaaagagtaccgagtaagcagtcactgttgtgagcagcttttctcctggtagtgcattgcatgaacattttgttagaatatgtgagaaaagcataactaaatcctcagatataccaatattgagttttatctctgttttcataaacatatgtaaaatactaaaagctacaaacctatagatgtttttgtctctgttgaagttcagtgagataattatactagaaaatatttgtgtccttgttttccatgtagagataaagagattagctgaaaaagaagactgggttgttgataatgaaggactgacttccctagtaagttggatttcttttttattagtcattagtgtttattatatagaataaatgttttatgttaataagggtcatacttgttttacactatactctagtttctagaaattataaagtaatcttaaagtatcctttcctggagtcagttttactgactgctgatcacagccatctaagtgagtgaaagcgggggcttgttcacaggcgcatggcctgtagcacttcttcagtctacattgcttttttattagagcgggcttatttccacaccacttagcaacttacgggcttcagaaagtcaatgttggggacagaagaatgatgtttgcccccaaagctcaaaaccaagcaagacaagaagcacaagctgacatgtctagtctagaaacatcctctgtaggagggggttgagaattacaagagcctttgagaataggtcttataatttttcatgttctcttgcctgtttgaagggtgctcctagcagtctgatggggacctagtcactactgaaacacaggacacaggacaggggttgccttttcccctcacactggccagacagctcatcatgcggccagccagggtcactgtctgcctttgtgactctctgctcaggtctctgtgtggctctcctggtggttctattggacttactcctctcaagaagaaaatacagcaatctctgagctgccatagccactgtcttaagaggctgctggctagagggtgtccccgcgccccaggaacaatgctgcacagcagcctatgtggcttctgccagtgtccttcatgtcctcctttgcaagggagagaaaataaattgtggggagtgaaacttccagtttctgccaagaacagagtggctttgccccacaagttttaagccattggtaagccaggggcaagagaccatacagcatcatctttcctgccaccctgcataggctccaggtagactgactgactttagaggtacatataatatttagctcgtcactctctgagatgtatgaaagactatgaaacatttttatattcattagatgttgaagtaatttaaatattttagtttcatttttgttgctgtgttaaaatactctaaccaaaagtagcttagggaaagaaagggatttttttgcctacaggtccaggccacagttcgtccttgagggaagtgagggaaaggactccaggctgttccacacaacattgccttcagtcaaggaactcacttcacagcccgtgaagtaaagtaggaacagtggaaacggttcttgatgactggaagcagacttttattcccgctagctttcttgtgcagttcggagcagcttgtctaggatggtgctgtcctcagtgggcagtgtccctcctatgtcagttaacaagacaaccctgtacagacagccacaggctgatagatctaggcagctgttgatctgagactctcctctcagatgctctctactgtgtcaaggggactgttaaagccagcaacaaagagatgctgtgctaaatgagttgtattaaatgctcttcctgagctgtcagacatggttcctggactatctcacattgcctgtgtggcttaatctcctagcacatgccacgcttctgagtggtgctgacatagaggctagtgtactgcattctactgagtcagaaccagtcctagggaaggccagggatctgtttggccttattcccccttaatatagaaggagcacaacatgcctttatagtgtgggcttagaagtaaatgtgagtctgtattggacaaaagattttatttgttacattaatgcttatagtaactagggccaccatgctaattacttgtttgaattatttcttactatatcttaaaatctcattcaggaaactatttattaatcatagcaatgttaaagagtatgctaaaagagaaagagtggctattaagcactgatgaaataggtgtaggaagctagccatcagcttaatgcctatgtatgtatctgtcccatattagttttgtgcaaaggaaaacaaaaagccatatgttcagtttgagaaagttaaaaactttctcaaaatttcattaaacaaaaaactgaagaacactcagtcctttagcacaaagcagatgctagctttagctccttcctaatcaaccaatcagcatgcacagcctcctatggcctggcccatagagcagagttctgctgggaagcctggatattgtagaggaactctggaaaatgactagactgaatattagggaaacatgctcctagcctgtttataaaatgcacagggttaaaaagaactaaacccagtgggtcatgtgaacaaacagctgaagtggtgcctctggtgcccttcctttcctcttgagaaagttctgtgatgaagagcaacaagggccatcaagcccaccatgccagcttccttcttcaccagcatttcctgcccccacctgtgctatgcccatatctctcctcctgttctcaggggctttgacaagagaagagccttggggtatctttctttagatgtatttgtgagttttattttttctgacttagtatatgtagaaaatgtgtaccatgacataattgaccttaaggatcttgtacctcctctagatggttgttgtaacaggacaaggggtgacctgcctagaattgagcttgtgactaatatacatgcaatgtagtcttcaggtgtgagcaaacaccttagatttgctcttgtcagtgagcataggcttttggtcagattgtacctttgttcttttctgtccatccggggacttgtcctttcggcatattcagctccataaataaatacatctatttagccagtgttgtctgtgtttgaagatattgttcttcttttttccagccatgtcagtttgaacagagcattgttcactccctgcagtccttgaagggtgttgtcgattgcaaacctggagaagccagcgtgagtttctgttcccttccacctgctttaaaagatcttaagaaatccctgtctgggagtagcaatggagtcacggtgttctctcttactaactgcactcatttagtgacctgcatagacatgtggagttcaggttccagggcaggctgagcagttgaagtgtgagtccagcagctacaggcagaccagggtccttgtggcctgattgaattgctgacttggatattgtcagccaactggggatcagtaccaccataggtagacagccacccacagccagtgtagttttctgtgttttagcttttaggtttcacttatcagtaaaatgttttgttttctcagcaaaatcaatacttttttttttttaatctgaatccttcttcataggtctttcaacagcctaaaacgcaggaggaggtttgccagttatgcatcaatatcatgcaggtaagtgcaaacagagatgtaggctccaagccatgcgttgatttgtcgctcaccttgttgacatcactgtgaaatgtgggttttttcatagtctcctctgtatacatgagagtttagagtaagatgtgaagattaatgttttagcagtacttgtgtgtgtcatttctattgtgttctcctgtctgtcttaatgtactttgtattcagttcctttagatcgcagagtaaattaaatgaaaatcgattgcttgtaattcatctagagttgtaaagtaatttgactggaaccagtgctttgtaggtacataagtaaagttgagcatttgtgtgagtaaataaagaaaagacaaaaatgactttctcctaaaatatactcatgaacataataatgattcaagcaaggtgctattaatattttgtcagttctatagctagacattgttggggtgtatatttagttctatagttagacattgttggggtgtatatttctaccacataacatatgcactcacctatgcacatgcatacgtacacacattcttattagacacacctctcccccagacagttctgctttaatttattaaaaattattttaatattcaaatagattgatatctgaaaatttgtatcactgagacttgctatttttgcccaggtttttatatactgcctggaacaactgagcaccaagcctgatgcagacatagatactactcagtaagtaaatgtggaattgatctcattggtgcatttgtggagtgcagacattccatactgaggttgggtctcacaggaagccttggttgtcgtgaccttattatatgcttggcctgctccctgtctctgtgctccccagccttctgagttctcctaactcttgaaagacacttgtagttctctaccaacactgttgcatggagcatcaacatagtgttgctgtcctcctttttatggcaggccgttgtctggtggacactcggtctgtcttgctgaatgacactgcgcatgtagaactcttgtgcacctaagactcctgctctaacatagtatcagctgaagaaacttgctctgtcacctctggtttttcttcaggaatataactttggcatagctgttttatttatctttatttcatttgtgtcaagcatagtgcagagtaattttctttccaatacaagtcactcatattaaaaagtaaaacagttaaaaataaattgtaaaattcataagaaaaaaaaacacagtatcagactaaagtgtttgaatatagttagcgatttgagaatttttctgttttctgatattaacttttgctcttcaatatataaaactgtcaccttcagtgaccagatttcttttttttaatttatatatatgtgctcatacctggcgtgcttgcatgcatttgtgtgtgtgtgtgtgtgtgtgtgtgtgtgtgtgtgtgtgtgtgtgcgcatgtgtgcatgtgcgtgtgcgcgtgcgtgagtgtgagagagcctgtaggcactttgggaacagaagtagatgatggaggctcttctcagctatacctctgccacattgaggcagggtcagtctttcacttgagcctagagctcactgactaagcttgtcgagccagcccatttccaccagtcatgtgcttaacagtccaggtaaggtattatacttacctggtattcacatgggtgctagagattggactctgctccttataactgcgcacaaacactgaacccacgtgtcttagtcagggtttctattcctgcacaaacatcatgaccaagaagcaagtaggggaggaaagggtttattcggcttacacttccatactgatgttcatcaccaaaggaagtcaggactggaactcaagcaggtcagaaagcaggagctgatgcagaagccatggagggatgttctttactggcttgcttcccctggcttgctcagcctactctcttatagaacccaagactaccagcccagagatggttccacccacaaggggcctttcccccttgatcactaattgagaaaatgccttacagttggatctcacagaggcatctcctcaactgaagctcctttctctgtgataactccagatgtgtcaagttgacacaaaactagccagtataccatgcttatctccccaattccacatttttaatgcttataggtctttttttttttctttttgtctttattttttatttacattgtagtcattgtcccccactcattccccccttccacagttcctcatcatattccttctccccacttgcatctgagagagtactcccccttctacaggccttccccttccctggggcctcaagtctctcgaagattaagcacatcttctcccactgaggcctgaccaggcagacctctgctatatttgtgccaggggccttgacctagcccctctatgctcctgattggtagctcagtctctgggagctcccagcagtccaggttagttgatactgctggtcttcctatgggattgccctcctattcagattcttcaatccttccccaaattcaaccataggggtccccgacttcagaccattgactgggtgtaagtatctgcttctgtctctggcagctgctggtaggacctctcagaggacagccatgccaggctcctgtctgtaagcacatcatagcatcagtaatagtgtcaggccttggtgccctcacatgagatgaatcccaagtctcttctccatttttgtctctacagttcttttagacaggaacacttctgagtcagaaattttgactgtgggttagtagccctgtccctccacttgaggtcctgtctaactattggaggtggattcttcgaattccctctcctcaatgttgggtattttggctaaggtcatccccattgggtccttagagcctctcatctcctgagtctctggcattttctagagggtccccccatcccctaccacaccccacacccctacctgaccttgttcccctttcccaggtcttctttgacttgactttttttttatgagacttattatcccaatcaatcttttcttgttactttgctaaaattcctgtttcatacacattctaaggcgtattgcaggcatttctgaactttctcttctgccatatttattcaaatatactttatttcagttagtgctattttaattaccatttgtttatatttcaactctttctagatcggtatctttttattttatttctatttttttctattttagcatattatttgctatttcatcatgttagacttacatacgaattcaagtcaatcaagttaacgaaaaattctgttaaggtgttacttatgattctgttaaattggtaattaattaatgggttagctagtctgttctccccttagatcttattatgtttttgattgcttttgagttataaactaatttcttagctcacctttaagtaggtttcaaatctgaaagtgggtttcaaatcttcccctgggaattctgataggcaaaaacattttaattatatgagtattatttggttttttggcatttagtagtttatttttaaacataatgcagtcagttgagtattgagaatgcccccaaataagttttatatggctcagaataaaagatagtccttagtgcttttttatgataataataattaagtacaaagaaaatctacagagttatacagccattttcatcaaaacatttggagttattggttttgtgtgagttttaattatgactgttgttttgcctcttctgcctttagtctttctgttgatgtttcttctcctgatttgtttggaagcatccatgaagacttcagtttgacttcagtaagtaaaatggcaagcacagagaatgaagtgtatcatgctaaagggagtggctgtggtagtcagcttaagtcacttgagccagaaacatcatcccatgttaagatggccactgtggtgactgcagtatacattttggggttacgtaaacagacgcaatacagcacctgcatcttgagtgttaaaagtgcctcggctgtttcctgctgctgcagagttgcctggatggacaggtggggaagcagaaggcatgacatttccttcctggcatttgcccttccagccttcttttttcctcccagtcccctcttttatttgaacataggttatatgacaaagccaaaaccaaatccctgtaagcaatctgatagaggcattttctcaattgaggttccttttcccagataactctagcttataggaaacaaaaacaaaacaaaacaaaacacagtaagaacaagtgtcaagagctaagggaagccatgaagtggattgaaatagctgttccatgtgaatctaggaagaaagtggggtagaggagatggacctgaaggaaggagcctttgaaactcagactgtaccagccacctgtcccaactatgcttttgttttcttggtctctcagaaggagccttattaatgcacagtgaccgttctgatctttgttcccttcccagctcccagcaaacgctgtgtaacccatcagccatgtcctagctgatttgtgtgcaccctgacttggagggctactccaagcctcccatctttctctagttagagaggagagcaaggtggttccatgtccatctcccaagaggtgcggaggtgcaccaggttgtcagcggtctcccagggttttcactttcactcctcacaacagcttacctgtccatcacttcccaagttatgttcctttgtttccaaaatctgtgcctgtgttcttccctagtggagggatctcatcagatctgacttgtgttctgagaggacccagatcctctcagggttgtattattcagaaggaaatggataacattgaaaaagatctagattttgagtcagaagactttattcacagtctcaagggttcattgctggtgctgactaggagtacagagaagtactacataagactcattccttcatatacagagactattatggtcaaatgtacatctctataccaggtacaaacaaacttcagattaaccatctaagtttaagaattagattcttgttattctgttttcttcccactttcatgtaatgttcaatataacatacacaaacaaaatgtacttgctgagagttagtctttagattactgaagtagttctcactttgaagagggtccagaagtcttgtaatggagaaaccaagtcagcacagtgggggaacagggcaggatagacttgcacactcaatcaactagaatggaagtcttaatcctaaatgaaagactggtaaaggacaggcttgaagccacttgagacattgagggggttctgtgtgtttggagtagctgctgcaaagtcatttacttcctgcactatgagaagaatgtgttaggataaaacagaaggtagcagaagggaagatggcctcacatgcccagctagcttagtttctctgccattctgccatatattcactttagaaaaataatgtcatttacagtatgacttcctctggccttttttatattccatttcctatctaaaagttatttcagggcccctagcagcagccttctgtttttctgggctatttaatggtgttgtaggctttatatatgcctgttgatgaccaaaaagccaggcgtacatatgtacatatatatataattggttttttgagacaaggtttctctgtatagccctggctgtcctggaattcactttgtagaccaggctggcctcgaactcagaaatccacctgcctctgcctcccaagtgctgggattaaaggcatgcaccaccacgcctggctttttgtgctgaaaataatgacaggcacttgtaatgaagaagtggggagatatataattaccagaagatggatttgcttgcttattgactttagagactttagttcatcctttagtccccacacctcaaagagcaagaacctctgtttttctgcattttctcccctggagtacttaactgtaagttactctgattctgcacagaaagagtaaccaagtgtgggtgagaactgttcctggaaagtggttttgccttagttttagtcaaggatctccactgagggccctggatgagtcaccattccagagaatgcctcccacttataggagctcaggcccaggctgccctgaagtgaaccacagcagcagcagagcaggggccattcctagaattttatttacagatagagttcttctgaactgtaaaaatccactgtattcattagactacaattatagtctaacaattttgtaaggaattgtttaggtggacagagccttgaagactgtaacagcaggaggcattcttcccctctccctgtcttttggggaggctggcatggacatgggatgggactgggccccaggacactgggccaaggaaggaacaaggagcccttcagatagatagtatggcattaaaatgttctctcaagttgtggatgattcataaaccattttctaatagttcctacactttatgtagttattcataatatcaacttgtttggcctttgtgtacataaaatgttaaatggaacatttgactcttcctttggaggatattggaagtaggacacagagccttgagcattccagaaaaggtttcactgttgagtttctaccccaaatccctgtttaaatcctcagtgttatgcttctctgtgtgttaattttaggacacagccaagaaaaccaaggcataggatattgatgttaaagggcagaagcctatcactgtacttaatacaagatcaggattatctcttaaattcaccagtactgtctaagtttgttatggtctgtttgaattacaggagcagaggcttttgatagtcctgagtaattgctgctatttagaacgtcacaccttcctaaacatagcagaacattttgaaaaacacaacttccagggaatagagaaaataacacaggtaagtgctttgtagttagtaggcaagtccagcgctttgccacattatcgtctcagcacctcttgcctccctgtaccccagttccccaggccccatgctcactcttcaccctacccatctgagaatgatttccttcctcactttaaattgttaatgtaacactgctttactcaggagcaaaactgtctgatggttgaactggttaacttaaccctgttctaaaagtctgttcaaaggtcaggcaagacaatcaggagaaaaaagtcaaacctaaatctaagaatcttccccattgactcctgacggaagaaaccttgaggcactgctgagagcaaccctgatcctaactgcaagggatcacttcctgctgatccaacctctgcctcctgtcttctcttcccgactgcagccctcccttagcctgtctgcttaagcacaccctgttctcctgaggctggcccttccttccttccttccttccttccttccttccttccttccttccttccttccttccttccttccttcctgacttcactacaacttttgcttgcttcgcgctccacctgctggatgtaggcaaaaatgtgcatgtgcatgcagatcagtggaaccagttttgtgctttagaatgtttgctgtcttgtttatagtttttcaaataagcagaaagggagagagaggaaaaaaaaagaagttccttgttgctaaaggttggctagttcctgagcaaagtttatcagatttctgggtaaaactgagccactgtctaatgccagcatacttttctcagtgaagaaaagaagaaagataatcatcttgtcaatcatataatcagagtttactctcagtggacgatctactttttataaatgatgcttccagttcgtaaactggcttgggttttttttttttaaataaatgaaaatgtcagagtgggtggctctgtcttgttttcctgcctttcgtaaagattaatcatcctgctgataaatgttgtgacttgaggctttgaggttgaatgtctagtttatttccagaaagctttcatgttcataattacaagatctgtgcaagggggaggaggctttgtttttattcagaaaaatcgtaacgtgactgtatgtacatatgaagaactttattgtttttgcccttaatgatatgtgatgtcattaagaattgcatatgaaagaagcaatgtttgacatttaagtttttgtgaaataataagcagaaattatgttgctttactttatactattaagaagcaaaatgaaactaatataaagggaggtttttgatctcttttccagtctgtgtctgaatcacagagaaaggtaatatgaaggcccggggagagcgcagaataagcagtaggctttttgaccactcagcagtatgagctttaaaaaaattatttcttgagtgtcttgaaactattcagttgtggctgcagtgactagagtaaagcgatgtggacacccactggctgtactgtgtgccgtgtgccgaagctctcattttcatggtgtcaagcaagaaaaacccacttgctctgaagaaaaaaataggtcactcatagcccttatttttcacagttcatgatatactcaaggaaatgaaactaattgattaatgtgcatcattttaacatgcgacactaagtggtgattcactagataagaatatccctgtaaggttccaccttaaagcaggccccttgaggcctctgtaacttctgggtcacagggagcaactgctgtgtgcctagaaagttccacctactcatccattttctcgttgtatttgttaaagacctaattacacatatgtgcacacacacacactcttgactttttttaatttatttttttaattaggtattttcttcatttacatttcaaatgctatcccaaaagtcccccagaccctcacccccacacacacactcccctacccacccactcccacttcttggccctggcgttcccccgtactgaggtatataaagtttgcaagaccaaggggcctctctttccactgatggccgactaggccatcttctgctacatatgcagctacagacacaagctccgggggtactggttagttttaattggttctttgtgagtttcacatcacgctctccagtcctgcacacctccccatcccagcatatctgccctttgctcttgcaatctacctcccttcccaatacacacaaacaaacaaataaacaaacaaaagcaaagcatagaaaactatctcatcatggaagaatgaaaatgtcacaatgtatgccatggtatactgcctctgtccacacactttcactttcaaatgttcattgcaatgacctaactatatttttgaaaaggagagataaaaatcaaggtcatctttaatgtactagactaagtatttatttaataagacatatcccttctgacttgtcccgtcacccccatagtaagtctagacctgtcccgagtcacctgcattcacacacagtggatccgtatctcctcactccccgtcgctgacctcacgtgggaccccgagatttgtaagctcctggtaatacatacccacgttgctttggggggggggggctgatcacattgtgttttgatcatcgtttcccagcataatttttaattgtataatatccatttgtatactttaatttgcatggaaaatgactgcttttacatttttattgcctgtgttgtagaagaaatagctaggaagcatgtagagaccaagggagatacagaggtttgttctgaggatggagaccaaatacaacacagatcgaactcctcaggaacatttgttgagaatatcagatctgtgtggaggataagccttaacatgttattttattgtggcagctataaagatgtaattccagggacttggggggggggggcgggcgcgtgcatatgttagatgcaatcaatattaaggaagcaaagctatacaactgatttactatttgtatagttaaagattcttcctgtctggagaatgcagacattgattaagtattaaatgcattactgaacttctatttaagctcctaaccagaaattccactcaggagggtaaggggacagtttcttttcatcacagatgcaggcaaatcttttatatctagcaaccaatttaaagtatttcttacgacttgaaccataggtattatgtccattaggtccattctttttagcttacctgagtatacttcttagaccttgaggcatttgaatttactgatgaatttatgaatcactgcagccgtgtttccttcctgctgtgttatctgtggctctgcttgtttcgtcttcctcatttcttcatcagactacgttcattaaattttgctaagaaggtatttttaatgttttattgattctttgagaatttcatatcatgcaccctaatcccactcatttcccactcctttatatctgccctccacccttgcaaccaccccccaaagaaaaccaaaccaaaccaaactaaaacaacaacaaaacatcttgtcatggaaactgtagtatgtcacagtgtgtgtcatatggtacacccttttgtctccacattttaccttgcaaatgtttgttgtaatcagtcattggtctggtttgaggcctctggcttctgctatactatcaaccctggatcctcactaggactcttctctgatatcctgttgttgccctgtgtcatggagatcttggaggtttggatctgccagaccagctcctttatcagctccagcagttcataaatggggtagatcttggagtgggctaactaaaagccctagatctgggcttgagtggtagctaagttggtctgcacaccagctctcctgcacccacgccaccagggagagctcttcagtgctatcctggctatctcacccaatcccagtcctcccacatgccaccggggccagttccacactcctgcccagtgaggtgtagatcctgctctcccgagtgctacaactggtgagggccagtcccagctctcctgttctcataacccagggccagctctcccacctgtcacaggctaaaccctaaccctgactgctacagccagtgagagacagggctagctctcccaaccatacttccagagctagctctcccatgctgtccaagggaagggcctaggctcaaatggttgcacaggttcttcatattcacccctttgttagtcccacttttctccacagtgtaggaacctctccctcagcttcactttctctcgcatctctccatctttctcatctcactatcacatattcgctctttgtagtggcacccatggtggatgcttgcttaggtgcctttcttctggccacactggaacaggtgcttgggtctttttattaaattatttttgtgcaacaaattacttttaaggttgaagtttcaaactggtgtatcctctccaactgaggctagacacaacagcccagttaggcaaatgggatccatagacaggcaacagctttagggacagcccctgtgctagttgttgggggacctacatgaagaccaagctgcatatctgctacatatgtgtgggacgtaggtccagcccatgtatactctttggttggtggttcaatctttgagagccttgagggtccatgttagttaactatattggtcttcctgtggagtttctatccccttctcggcctgcagtccttcccccaactcttccataagactccccgaacttcatccaatgtttagttgtgttcctttggatctgttttggtcagctgctgggtggagcctctcagaggacagttatgctatgttcctatctgcaatcatagtagagtatcattaatagtgtcagggattggtgtttgcccatggaatgggtctctcaagttgggctggttattggttagctattccctcaggctctgctctgtctttgtcactgcatttcttggagacagaacaaatttggggtcaaaagttctgtgggtggattggcgtccttattcctctactgggggtcctgcctggctacaggaggtgaccacttgaggttccatattcccactgctaggaatctcagctaaagttaccccccataaactctctagagcctctcccatcccaggtctctggcacatcctagagaggtccccaccatcaccaccggtaccagctgagacaatttccattcattcttctgaccctctcgcctgtctctccccacacctgatcctgaaaacccccattcctctcctatcacttctcctaccagtttcctccttccatctgcctcctatgaatattttcttccctttcctttctgtcatgttaatctcttataattatttttagggggtaagtgtgcagaaatgtgtttgtgtgttttcatatgtgtacagttacatttgtgggtgtgcaggtgtacatgtagaagccagagtccacttatatgtcattctctgtgagctgtccacttggagttttgagacaaagtctcataccagcagtgtccaggattctgcctgtgtctacctctctgggctgggattacacgtgtgtgtcaccacagctgtcttttttatggtctggcttttggtcatgggtggctttttaagtgggtgcatggcagttctttaccagctaagctgcctcccaaccccatcttcatttccagattggccttggcaatcactaccaggtattcaacccaggagacctggctcatactaggcaagtgttcttccactgagctacatcccacattttatttttcaaggaacttgcatactttaatatactcatttggcattagtgattttctttaatatctttttaaaaactgactttgttcctttccacattaattttctattgtgttagttgcttgaaggagtttaaaacattaattctaagtcttcttttaaacttctttttaaacatctgaagctcagtgttctttactcactgccttatctccacaaaagtttagatgcgctgcattttcattgttagcctcgttttgcttaagaagtttttttgtggggtagggcaggggttactaagggaagtcctcttgtatgtctaccattgaactgtattcctgtcttattttaagaatacttgaaagagtttttggagctgcagagcacttaagaacaattgctgttattacagagaacattggcttggttcccagaatctgtaaggcagctcacaaccttctgtaccactagttccagaagatctgatgtcctcttcttgcctccacaggcccctccatacaagtggtacacgcacatacatacatacatacatacatacatacatacatacgggcaaaaaaacataaaacaaaaaccttttgaaaagaatatttacttggaagttatatttcatatttctagggtggttccagtctgttaggtgtattttgtaggaactaggcataatgtagaatgggaaggaacttggatttcattttcttccactgtttccctcacctgttcatcttcctcattctgatttgtttgacctaagttagtgcccttgatcacaaatacaggcaattcattctttgaatcttttcataagcatatgtatgttgtctagacttaggtaaggaattgacatggctctgaggttgggttcctgtcgataccattgcagtggtatcaggttttgaggtgacatttcagaactcatactgatcctttattctctgtaggttttatgactttcttctgggaaagtgaagcccaccccctaattcaattagaaactgggaactcttataatttgcacctgtatgtgtacattgtcctctaacttggaacttagctgtccaccacacctcaaactctggttctgatccagtacaatttcttcttttgtttacgtgttggcttctctcattgttcatgtatgtccacttcaatttctataggtttgtgttataaggcctcctagagctagactatcttccctgtttctaacttcagctttagatttctgtagtgtttctttgtgctttaaaagacagcctgcctttcaattctatatcctgctgtcataaaatcatgtcctgtgatctactctcactcccatctgaagagttttcactgacttctgttcctgctattgctcccaccattgcttggtgtgtgctttggttcccagcaggcgcgtgccttagatgtgcattccactctcctgtcagcttcttgaagttcagctctgatgttcaagaagcctgggcccctaagtaaatgatgtgaaaaaagactggccatgttccactacacataccctgagccagcacactgatggtgtcaaaaggcagttagccacttgagtaccactgagatcaaggcccctcctataaggctgataccaacctctgtctgttttgtcagtactgccagtaggagccacagttggcctgtgctgaactgtgcctagatttaggcctgtagtactcacactaggactctctagtaacatctttgatgtattgtttgaaccatgaaagaacaaaagctgttttctccatggagtgactgtaggacaaactcggactactcagcactgagacacatctcagtcatacagacatgtgattggaagataccagagtagccacaggcaggttgttagaacagagtgccattggatgacattactgatgtggaacactacagttggtgtccttttgtttgtcattgactattaaatatttatactgccagtttggtctttctacagaaaaagagtttaaaggattttgaaagacaacctatagtccatagatgggacttatttcttactgtgtaagccatactaatagttctctttattagtgacatagataagatagaaacctgaactatgtagaaaaattatttttaaaatgtaatagatacatacttgcattattttatttcttctccactcttaacttggcattttttaaccccatgttttgtgttgtaggttagcatggcatcgctgaaagaactggatcaacgactctttgaaaattacattgagctaaaagcagatcccattgttggatccttagaacctgggatctacgcaggctactttgattggaaggactgcctgcctccggcaggtaagtctaggaacattttctgctgctgcaaatggtgacgggtatagataggtttctgtgaaacaagatgtacttaaactatttttctttatattcattcttttctcttcttaccaaaggtgtgaccttatttttacttatggcaattttacttattgctttaaatcatttttaaactattttttttctgtttagaaatgtattcttttctcgtatattacatcccaattgcagtttctcctcctcctacctccagtcttccctccagcacacctcacctttccctctgatccatccttcctctacctcctctcagaaagaagcaggcctcccaggaacatcaaccaaactcagcatggcacgctacaggaagaccaggcacatgccctcacatcaaggccagacaaggcaacccagtaggaagaaaggctcccaaaagcaggctaaagagtaagagacagttcccaaccccacagagtcccacaagaacaccaaactacacagccataacatgtatacagaggacctagctcagacccatacaggctccctgagttccttgacacctacccctcatgaattctggtcagttgattctgtgggccatgttcttgtagtgtccttgacctctgtggctcctagaatccttcctccctctccttgtaaggtctctctgagctccacctaatgtttggctatggactctgcacctgcacccatcagttgctagataaaatctctctaatgacaaatatgctaggctccagtcccagcacatcctgcagacaggaccaactgtaggttgacagatttgtggctgggttggtgtcccaatccctctacttgaggccaaagctggttaaagaagatagtcagttcaaggtaccttgtcccctattgctaggagtctttgctagggtcaccctcatagatttcatggagtttccattccagatttctacctcgcccctgaaatacccgttccagtcatctcccagtattctctcccctcatcctcccacccccagtccacccacaaaatctgttctatttcctcttcccagggagatccttgtagaaccacttaagcttgcttagcctttctgtgtctgtggagtgtagcatgcttatccttttctttacagttaatatccacttacaagtgagtacatactgtgtttgtctttctgggtctgggttacctcattaaggatgtatgttttctagttcattcatttgtctgcaaatttcatgatgtcatttttttaacagctgagtaatattctcttatgtaaatgtaccacgttttctttatccatttttctgttgagggacatctagattgtttccagtttctggctatgacaaatcaagcttctgtgaacatagttgagcagatatcactgtagtaggatggagtgtccattgtgtctatgcccaggagtgctataactggggcctgaggtagatggattcccaattttcctatgttgatttccataatgtctatataagcgtgcacttccacaagcaatggaggagtcttctcattgctccacatccttgccagcatgagctatcacttgcttttaattttaaccattttgaggggagtaagatggaatctctgtcgttttgatttgcttttccctggtagctaaggaaccatttctttaagtgtttctcagccatttgagattcttctgttgagaattctctgtgtagatctgtaccccatattttaattggatttttggatttggggtatctagtctcttgagttttttatatagttcaggtattagacttctatcagatgtggagatggtaaacatttttttcttttttcattttgtaggctgccactttgtctgggcagcctacaaaatgatggatggtgtcctttgccttacagagcttttccagtttcaggaagtcccatttattaattgctaatcttagtgcctatgctatcagtgttctgtttcagaaagttgtctctatagtaggattttcatagaccaccagctatttaaataatgacaccaagtctttttaatatattaatgcttaggctttttagctagagcaatgtcccagccagctatctaaacttaacataactaactggcctacaaccctccatgtggccagagttttacttctctgtacctgttcacaatggtccacttccccactatatcccactggcaagtcttctgaacctgccttcttctcccagagaccctctctcttcctgtaagtttggctctctgccagtacagcaatcaacaattgacaatacaaaaacacaccttcatacaatgtactccaatatgtgtcctgtgccagttcattcaaggctattcctcactttttattctatcaggttcagtgtatctggttttgtgtgagaccattgatccacttggacatgagtttatggcagtgataaaaatatagtcaacagatatttatagaacattttacccaaacacaaaagaatataccttcttctcagtgcctcatagaactttctctaaaactgaccacatactcagacacaaagcaagtctcaacagataactgaaataaccccctgtattttatcagaccatcacagactaacacttgataacaataacagaaacaatacaaagcttacaaattcatggaaactgagcaactttctactaaatgaaaaatggttcaagacagaaataaagaaattaatggccttgtagaattcagtgaaaattaatacacagcatccctaggcttatggtattccatggaagaaaagtgtcctgaaaggaaagttcatagcactaagtgcctgcatagaaaaaattgaacagatctcatactagcaacttaatcacacacctgaatgctctagaacaaaaagaaataggcgaggagtagatggcaagaaataatcaactgaggctgaagtcaataaactataaacaaataaaacaatacaaagaattaacaaagagttggttctttgaggaaatcaagataaacaaatctttattgaaactaactaaaagatatgaaaaagatcatccaccatggtcaagtagacttcattccagagatgcagccatggctcaatgtacaaaaatcaccatataaacaagctgaaagaaaaaaaaaaaaaaaacatgatcatctcattatacacagaaaagactacctaccccttcatgataaaagtcctggagagattagggataaaagggacatatctaaacataataaaggcagtctatagcaaaccaatagccaacatcaaattaaatcaagagaaactcaaagcaactccatgaaaatcaggaacaaaacaaggatgtctactttttccatatctattcaatatactcaaagtttttattagagcaataagacaactaactgaaggagatcaaggggatgcagattgggaagaaagaagtcaaggtatcattattcccagatgatatagtatacgtaagtgacactagaaattccaccagggagttcctttcagcaaagtaactggttacaagattaacttaaaaacaaaaaaaggaannnnnnnnnnnnnnnnnnnnnagagagagagagagagagagagagagagagagaaaggaaaaaagaaaggaaaagaaaattagagtcactagaatcacttctatgtataaatgacaaacagactataaggaagaagtcagggaaacacccctttcacaataggcacagatcatataaaatatttttagctaactctaaccaagaaagacttttatatcaaaaacctagagtctctgaagacagaaattgaggaagatgtcagaagatggagacatctcccatgtgcatggatcagtgggattaacataatgaaagtgtcattttaccaaacacaaactacagattcaattcaatctccatcaaaatcccaacacaatcctttacagaccttgaaaggacaatactcaacttatatattgaaaaacaaaaaaccagggcatggcgagatggctcagaggttaagagcaccgactgctcttccaaaggtcccgagttcaaatcccagcaaccacatggtggctaacaaccatccgtaacgaaatctgatgccctcttatgaagtatctaaggaggacagctacagtgtacttacatataataaataaataaatcttaaaaaaaaaagttccttggaaatatttggaagtaacaatgtttcctccaacctttaaaaaaaaaaaaaagaaaaacaaaaaacccaggatagctaaaccaatactgtagaataatataactactagaggtatcaccatccttgacctcaagtagtactacagaactatactagcaaaaaccatgttagtagcacaaaaacaggcacattatcaatagaatcaaattgaaaaccaagatataaaatcactcacctatggacacctgatttttataaagaagccagaaatacacactggaatcaagaaagcatcttcaacaataatataccttctttatctcttgcacacagttcccaaggctggttctctaacttgagtagtacaaagataattccacagcaaatgtggctctataggcttatctggggagtagcattagatttcttcagatgtgcacccaggaatcacacaacagtaccttcaccctgatttctatattactgagctaatttaactcccttcccaatcctctctaacatttttgatgtccttttctggatgatcattgtggctggggtgaagtgaaatttcaatatagtatttatttacatttttctaatagcttagcatcttgaatatgctttcatatatttgctgatatttgtgcttcctttaagaacttctatttgtttcctatttattaactgagtaatggagagcaatggtgtgtgtgtgtgtgtgtgtgtgtattgtgtatcaggtaaagagctggctctccccatcccgtgtctcccattcttcaggctatctcttcactgtcctgattgttttcctttgctattcagaagctcccacacttgatggaatccctcttggcacttactcctcttattccctaagctattaacgtcctatcatagaagtactgctgttaatgttttgaagtgtttttcctgtaatttcctctaatatgttcagagttttcaagttttacgtggaaggtttttcttttagtctattgtggattgattcatatacaatgaatgacagtaggaatctagtcttactcttctgaatatagccatccagcatcatttcgtgagaaggcttgcctttttattcagtgaatatttttagacctgtgttgagagtctagctattttagctttggagattcatatctcggccttgtcctgtggtattgcttcatgtgtctgcttttgtgtggactctttgttatgtggctcatggtgcaactgagcttcagtctctcttgttgccatccatgtctttcttcatggagagagccattgtccctgtggaatagtagcaatttgcagggctgcagaggagggcctgcttttcctgggccctctgaccactgctgcttctcatggcaaacagcagaggttcctggtggtgaatgtgggcagtgacagcgagccttctctgttggggggaaccagtttcttgctgcacttccctctctaggggcatccttgaaactggcacaagcacctgggaagtcctacactccccagaaagcactgtgaggccctaggaccttaggtgcagtgtcagctggccatgtccacgtgttagggaccctatgacaacactaaaatgtaattagccagggggaagaggtgtgggaatggtggtaggaggtgaggattctcttcagttcgattagacagcaggacttcacagttccacatcctctaccttcatgtttttagctcaggtaaccaaagtctgttttctctaatatcttcaggttctttcaaccctgacatttgtgggttagcaatagagtataaaatatttaatcgtaagatttatcttaacaataatagccttagactgtccagcattgagattctgctggctctgtggcatctaacctctttacctactttgatctcaactgtaagataaacctcttttgtaaacaaatggcactgtcgaggctgcatttctcacattgcacatgtactgagaagccctgcatttatttcacttgttaacctatttagttctgttgtttgtgtagttttgacttgattacagcagaacctccatctttcctagtcatttagtgagtgttagtttgttaaaagctgagatctcatgttaagtgatctggcagaattgacataacaattctaaaatatttcagtcagcaaccttaatagtatttttagaggtattatctctagaaactgaattgtacaaaccacaaaggtaaaactaattgctaacttcaggagttagcattaaattttgtttccaatgctatgtgtagtaatttacaaaatacagtttattagtatcataatttaagaagaaatttgttaaatcccagttatgtttcttcagctgacacatagtatattgtcagctttttattggtaaatgtgtttctaaggttgttttcactagttctgcatcacagtactgactactctgaagattttaggtgttctattatttgtgattatatggcgcttcttgagtatttacattttatgaattgtagaaaaattgaaaatgtctctcattgtcaaatacacattgaagttcaggtctttgaagaaaatctcaagaaaaaactttctttaaattttctcttaagtacttttttaaagctattttttttctatctacaatgcatataaacttaaatgtattaacattctttagagtatttaacaaatgaatttaaacttaaccatttttatccaagtcaaatacacaattgatttttaattcaagtgctttaaattagtaatgatatgtggatttctggtgagcatgtagaggttcacagatacaatgatgtggaatgtctgttaccactcagcaaacacacttgagtgagaatctctagtctgcgatgtttgtggtccagcgcagcgtgtttcctctcctcaggctgggtcagacacagcccacagtgtcatgcgcatggctgagctgttagttattggatatctgttgctgggatggtgtgtgagattgattcatacatcccatgcagagcatatgtgcactattgatgtgacataggaagtccacagctctttcatgtctgtgtttgctgacccaagagcaacgtgaactgtaccttcagctcattacatttgggatattttcactgaactgtgagaggtatagtacagttcagttatcatctattatatctagtaacatgaatcatttgaagctcaggttccaatttgaatgtctagagaagaaaaactgctagaagaaaagaatgaagacaaggaaaaattggagtttgcatttgttttgagaaacttgaacactaaagacaaccttgctattgttccctaaacatctgtggctctctgatttccctctgtgttcttgttcctctgtgctgctgtaaggaaatgcctccagtcaggtagtttataaagaataaggttgggattgaggatcagggtgtagtcatttcagtgtgctgtgtacctgcatccttcagagaggacaaagcctgtatccttgtaccactgaaggaagtgggagaaaagactaacttactcaaggtactttataaggcaggcactcattaatttacctttccaaatgatgtttatgtgagttaatattatttgtaattactgacactattaagtgaagtcaacaagcataatgaatgtgtgactaatatcatctctgggtgtacaaaaaaaggtgtgattgatgccagtaaatataattgtgttaccctattaacaaagcatttatttcagaaaaatgtttcagtgttaattcctatacaagtgaaatacttctgttaatacttcaaacagatcagttgtaaagacaacttataaactataaattaactttgaaagattttttccccttattacctcctggttttctagacaatggaacccagcagtcaacccctttgtttccacctgaagagactcatttacccattcccgggccccagccctctccctgtgagactcctttggagaaaaaagagtttttctttgcaggcagatgtaaattggagggagtttcttggataagggtccatgtccattttcccttcttagcactgggacacacacagtctctgtgagttcatgtgcatcagtcctgttgtgtctgaaagacactgtttccttggaatcacccatcccctctggttccaacaattttccatctcctcttgcacatagctccctgagccctgaggggagaggtttgattacaacatcccgtttaggactgagtgttccagaactgcttactctttgcacattgttcagttgtgagtgtctgtattcccatctactgcaaagggaagcttttctgatgatggctaagcaaggcactgatctatggatatgacagaatgtcatcttattgctttgtttctttaacaggacaatactgtttgaattttccctgtgcccatagtccatccagtgtcagattcttggctacctgaacagagtcagccatggatttcatctcatggagtgggttttaaatccaatcaatgagtggatggttcctcccacatttgtgccactgttatatcagcatatcacacaggcagtcatcattgtagattaaagggtttttttttttggtttggtttggtgtttttttgtttgtttgtttgtttggtttttgtagctgggttggtatttaccctttcctttggtagtgtgcaaagtaccttctaatgccgtgaacactggtctgtaggagtgaagtgaaggctctaatagataccagcttgacttctccatgttcaatgagatatagaagtgataccaccagcaatagggttttactatcagtttgtggagaacaaccataactttggtaatagcctgagatgtttagaagtttccacaggggtccccttgtctcagggaaatacagtttcagcactagtcatgagatgaccatgcgtggctctttagcctcattgcttaaaataagctattcttgtaattagcacccagctgtgcagttattaccagtccaagtgcattctttcccagaggtcctcctcgcacatcatgctctctccactggacctcccaccaccctgccatccccagctgaggcctctagatagatacagaatgccctttcagcttgaacctggctcaggacttctctcctggtgttcccctgcctctttaccctacctggactttttttatcctgtgctgtattcaccctacctagaacctgattcacagtatgcattctctgacagactctttaagcaattagtgggttggtttatgagaaacactctgacaaattcctccagcaaggtacagggcgataataaacagcaattaaaataccagtttacactttagtttttagatgaatagatactttaaacagaatatgagattgaatcaactactcttattcagtgaatgtcaaagaagggaatgttgttgattaaatgacataggtgttgcaaaaatagcatccgtgtagaaggatctgagcatttgtaatgcacatagcactaaggatctcttaagtgccacctgtccagaccccttctcataactctttgagcctatacagatcatatgttctatgcttaggcacttttcaaaacttatttcttctctggatttagaacgtgtgctggatcggtctcctgaactccaactatgagcagctcagctcgctattactactgctttagatgaaaacacgccagctgggtggatctcatctctgaagcaatgccttgtccttcatcctttcctgccctgaactctgaaggaaaaattttcataagccctagggctattcttgatttcacttgagaagctttgtaaggacattttaatggtcctatattttatctgctcacacacacacacacacacacacacacacacacacacacacacacgagagagagagagagagagagagagagagagagagagagagattaattaatttcagttttctgaaggagaataagcctggttgttcatctttctaagtcacaggttcattatgtaagctcactttgtttttcagaccttgtctcctttttacaaacagtttaatatattatagtcaatgccataaaaccacttgtacagtgctttagacatttggttataatttctttgtttgccaagcatttttcaataaagcttaattttggccttactcatcttcaatgtgaaattgattaaccttgaagtggactgtggcttgcatatttcttttgcatgtcttatctgctgaagtatttattacattttaagttgatagctgtaagctatgccacttggcatcagggtaactaatgtcccattgtgcaaacctgactcatttttaaacttttattatagaaaatttcagacacttatcagagtagaacagaataacaaattttgattgacctgttggccaactccagcagttatcagttctggccctgtgtattttgtctgcacttgggcttctagaatctgttattttgaagtaaatctcagatattaggtcatgtcatctgtatgtaaatcacataaagactaatttttcctaaagaagcataaccaatcataatgctattataagacttggaagaaaattaataattccttaatttcaccaaatattttgtcagtgttcaaattccagatgcttatagctcagaaggtttactcagggctcccaggttcctgtattgctttggttgatgtgcccccatttcttgtttgtcggtggttggttagttggttagtttgatgtaactctagcgtctccctttccagcttacttgttggatcaattaagttcttcattgtgtggattttctgaagtcctgggttttaggattgtttccccctgcttttatctgtnnnnnnnnnnnnnnnnnnnnnnnnnnnnnnagagagagagagaaagagagagagagagaaagaaaaggtgttagcttaaattctgtgtccgtgtaagtgttcagggttattactattcttcctgcttgtgatgttaggattgaaaattgaattcaagtgttatttggaccatccttttaaaggttcattgtgaagtttcatctaatgatttatagccactgatttgtgccataatctatcattttctttctattttagtcttttgcatatgaatggaaagtgtatgtaccctgatacacatgtggaagtcagcagacttttcagaacgaggctcccttcttccaacggggtttcaaaggcagagtcttgtttctgccacactgtgtactccaggctgtccagcccaatagcttccagaagtttctcgaatcttcaccttccatctcactacaagtgctaggcttacagatgagtgacaccacatccgactcttctccttggcttctgtggcttgagtgcagaccatcaccaagcccttttacccagtgagctgcctcactcactgctcttttggttctctggttttttttaagctcattattaatacttaagaagatataacaactagaaaaatattctctctccctccttttccctcccttccttctactggacgtctacttggaaagcttgccccatacatagaaggttttccaacacacagctacaaccccaccccactgttacagtgtgaacagacatgtgaaggttaaaacagccagctgggccaggaacactgaggaaggtaaactaggaggccttgtggcggggggtataagatagctaagctgactagttaaaaaggacaggttagtgctggctggctctcacaaagcttcccccaaccctaccctaactctcaccctgccagcaatataagcaaagtgctgtttcccttcatgtgttcctgcttctaatgcatttaataatacagtttacagtagagtaaactgcaagtaagaatggcttagaacatttatctcccacctagtcaaggaagaccaccccttggacaaggagttaaacacaagacaaccaagaacaactacagctacatcttgtaactatgataagagttaactacccattggcaattaaggaaaaagatctgggataaactacaagctgattatgtaaatgtgagaacgaagggaacagtctaacaaaccagcaaaccagacatcctctaagactagcaacacctactgggttgagcgctgcagtaccagccaggacgagtgactagcaggcaatcaaggacagcagctagtcaagcaagtcagagacccacagtggggctgaggttgggagggattccccctgactgagtgagaagctcagaacgtggttgggccagagaaatagacatgcagggctccccttattggttaggcttacagtcagcccagagaaactaaccagtctcagtagaagctacctcagtctttgtctggtttttctcccaagtcctatgagaagcacctagaaaaactacccaatggaattttccctttcgtgggtccccttccatgtgctaatctaccctttttgaagaccctctcccctagagtttctcttactttctagacctttgctttctgctttaagctttctcttcatattctcttctggttgctgtagacttcagtcttgtagtcagtgagacaaggcctggaagaaggaccatggacttggttgaagtagtgggtaacagggagtgtcaccctaactcctgagttgtagccacctgagacaagaacatctttctttccctccatcccacccagataagccatttcttattaagggatacaaagtactttcctcactagctgtttggttccttcataggaaagggcagggcagtgtgtcctttgtttagtcatttccaaacacgttggcttcctagcatttttcaagggtcatcaaaaagatagtcttaactcttaagttttatgaactctttttgaacatacctgatgaatttcatttaattatagtagttgttcttactgtttgctgatgctagccctgaacatgtttactaatcgacccctggaatggacttctgatcttgaaggctgtcattgctgagatcttgtgttgtgatgtagtattgcataccacattcactggtcccagaggaaccagccagtggaaggcaggagggatgtgaaataaggaattcttcctctcagttctcttcctctccctacgcaggctctgtccacttcattattgccaggctttctggtctctctctgaatctcatccagaaatctgttgggacctagtgcctcttatgtctcaggtgtaccgtggttctgttttgcagcaaatccatgctgagcatttccagaatactacttttcctgtctgaccagtgatggaggctgtgcccctgctctctgcagcagtcccttccaggtagtgaggcactggaaaaagtgtacatgtacattctgtagtcagttgtgtgtagtgaacctgtggaacttaagcttctgaagtactgtggaaagcattagggatttcccccctcactttacctcattttgtttgtctggctacaaatctaagaggctctttccagacttaatttccacgctgtttagccttttgcacagtcgtaaacagtgtgataaggaaaagcttttctccatggggttgagtgacttatcagtacttctttagtacttgcttgtgacctgggtgaatgcatgccgcgcttactgtttctcttcggtggttctgtctttaagtgttcatagggcacttgagaacctgccctgtgatgctttctgactcagtctgccgagagccaccactgtctggtgaaacatacccattgctctaatggccatctgcacaggggcacaagcttgaaaacactgaagcttcacagcaaatggtaaaatttggattgttggnnnnnnnnnnnnnnnnnnnncaaatggtaaaatttggattgttggtttcatatgtttagtctaggagctgacatgctgtcaccctgacacctcttcaaaacaaaagccttgcttaccagtcagagccccagtctagtaaatcacacggctttgctggtcttcgctgggtggaacccactaggctcatggtaccctctccacgggggttgaacgtgaggctgcatgacacttgaagattgccatgggctttgggtgggtgggtcctctgcactgtgacataagcacatccacgttgctaagttttgaactgggaacaggatcagtgctgtgatttataacacatcacagcagaaagccaaagtccagatgagttccaaatgttaaatttggaccacttacagggtttaagtcaccatcaaaggtgccttgataatgtagcccgtttcctagaatctaagagatcagagtcacagtagtgaggcttgggacagggcaaacaagtggtctgaaaagaaacccagaggttgttttgtgctaagcttgggtactcaaggcctttcgtgtgtgtgtgtgtgtgtgtgtgtgtgtgtgtgtgtgtgtgtacttgtatacatacttgtgtggggaagggacatttttaatggaaaaccgtatgagtgaaaattattgttgccagctctgccctccccaggaccagggtatgtcttcacagctaacacactactgagttttgagtagctacagtcagctttaaagctgctgctggcctttagaccgtattgtgtaacatggcaattttgcgaccacagtgctatgcacaaataaggagtggtggtgagttacactggttagtgtggatctgtttacctgtgcatgcaggtgtactgagggtgcacacagtgtggcagcctgaggtccctctcagatatcttttcttaatttctttcagcctttatctttctgccccagggcctttcacggaacctgaaacccaggtttttactaggctagccagccagtgagcttcagggagccacctgtttctgctcccctaatactgggactacagggttgtgccatcaccttcagcttctttacacaggtcccttacttgtgcagtaggtcatttactgaacatgaaagatgacaaaccaacagagatggacactgaagagacaagaaatgtgaagatacagctttgcttcattcgcttctaccacccacatgtcttagcccgcctctgtaggttttggttgcttttaaatttctttttcttgtgttccagacgtgtcaggttaaatagattatagttcatagctactcattttgagcaattcaaataattctgagcactgagttgaaaaaattatatttcaaatattctcttttctatataaccattataaatttgtttttggtttgatcaaaagcaacatcatgcaaaggctttttgtatggctagaactaaaagacagttttgtttggttttatttaaattcttttgagaatttcctacatgtgtattatattcacatcatttctacccctccctctgtccctccaactcctcctgtgcccctatcaacctctgtcaagtttatgacctcttcttcctcagttattatttaatatgtatcccattgggtgtgtttagggctgactgcttggggttgagtaacttaccaggaggctcctccacagagaagcctgactccctctcccagcagctgtgaatctcctgaagctcttcacctggggtcttgtgagattcccatccatgtgggcgtgtcagctggtattgccactgtgaacgtgtgctgcggcaaccacattgttgagacttcatggtaggtcttccttgtcatgtctagatgacaccatctagctacaggcatcttagtcctctgtctctgcctttggaaaggtttttccaaccccattgccatgatgtgtcctgaaccttaggtgtagaggtgcattatagatgtatcagttgcggctgggtctcactctttgcattttgattagtgtggatctaaaaagtgtgtgtgtgtgtgtgtgtgtgtgtgtgtgtgtgtgtgtgtgtgtgtgtctgtctgtctgtctctctgtatgtctgtatgtgtgcgtgcatgtgcatgcacagtgaccacagactacttacaactgtgggtacttagaaaacggttggaagttgtattggtttaagcaaatggtgtgttcactcctaaagtctgtgtcccctccatccactggtagctggctaggtgtgcagtaccaggcatggtttccctcctattgagtgtgcctcctgtgtaattagacagctgcctagaagactaaagcacttctactgtgaaagtaggcatatcctgctgtgctggtcatggtagtttggaggctttcccacggggttggactccagattactcttctcccttggccgtttgcacaagagcatctgatacaatgagaggtcgtcttcagggaggagactttcaggtgatcgaagtgtgggtgtccggccaataaataggattttaccttcacattttggaacaaccaagggtcacaacaatagcctctatggtttgaggagtctcttcaattcccctgaccaacaactcttgaaggaggattcccatggctgtcactgggggttttggtagatcgcctatggctcttgtggggatcattatcaccccaagtggcataaattcagatagacagacagatagatagatgtgtgtttactcatacacattatatatttatttctaaatagaacagtatgattctctattgcattttcaaacatccttgatactgtttatctgtcttctctctccctgtattgcctccctcccatctccccagttaaagtcccccatttttcccattttcttctttatagtaacagttatcctctctagaactctccctccccatggtctcttgataattataattcagaatagagcttccattgcttattttcttattggttcctttcacatcattttcaaaacactttcaaggatttttttttaacccttcctgtcacttctgtagctctctgccctttctacaatccatcttgtatctgggaccctgtgggtctcacaggattctgaagctgcatatccgtgtatggcatgtgcttggatgaagagacccatagacttagtcctcttagtgaaagtgagcagctaataggggtttttaagagtgctaaagctcagagcgaccctactcaggttagaattgttcttgcagtgtgtgccgtccagcagcactgataaaggtgcttggtgtatttagtgaagtaatgctcgtagtgctctgctctctcccgaagaagcagcaaaagccacccacctgcacagcagcacagcacagtagctggccactgtgattgacatttatcccaaacactagggtgctggcttctgtacctttgaaaataagatcttgagcatttcctaggaatccataaaggagaaagttaaaggtcttgggtggacagaaagaccttggacacccctcctttcataggtgaaatgtgcttgacaaacctggaatttccctttcttggcttcccaaaaaataccattatcagcaagctgattaattagtgtggcagtcaaccaggaagatggcatagcctgacagcctgaagttcagtgtcccaggcccaggtggcacagggagaaagccatttctacaagttgtccctttgatctctacattctcatgaccgcacacgtacacagcaaagtaaataaatgcacaaaatacagtttgcctgaatactacattgtataagcaggagggggtgggggaggaaggaagataaagacacctgagataaaaccctcagcaattagccatgtttttaagtatttggaagaaaatgaagcattttgtgtctatcagagcaagttaaagaatgttagtaaaacctgtattgtacacggtactcaggatgcctttttttttttttatcaattgacttcaattttctgataataccaaacactaatagtcagaatgtttgactgacaaccacagtaaattcccaaatatgatatacttgaaaacccattcttgccttttgaaattgctgtcacttttggttacaaatgctgtgacagcctgtgattatagtgacaaggacttttaggaattttctgtagaatgcatagcacgttagcaagtttgtgtgttaaagagctataatagtaggttttataaaattacagaaactgtcttcatggacttaaaatatgatggagatgaaaaatataatatcttgtactctgtcctggatagtgtaaagaaaagaaaagtgatttgcattcttgggcttttatttctctactttgttgtttgctgctatggcttgtgtttttatatttgctgagaaatgggtctaccaaaaaagaaagtctggcaattcctgttttgtttttattagaggtagtgctgcttgtatatgtgagagcccacatgggacagcactgaaagtagactgttgaacaagggtatgctttgggtgggactggagccccgatgtccagctgctcactagataactggctacacatactacagaatagtgtgtgcagtgactgagcactgtagcccagcatgcatgtgcacagtgaccacattctacaggttagtgtgtgtgtgtatgtgtgcagtgaccatacacgatagcccagcatgcatgtgagcagtgaccacatgctagaggtcaacgtgtctgtatgcccttatagttaggcaagggctgctacagtctactggaaaccctacttcccatccttatcctgccagtgcatgtggaactacatgtttgtatgcatgtgaacatgtgaaacatcaaatggtatacaaagggattatatagttcattatgtagtagttatactttattttaagactagaaaaactcctttgaaagatcttgacagtgatagatttttagtgagaagtaaagatacctctttcaaatacacctgcatttatttcttagtatgacagtttctcagttatgaaagtcagtaaatctaaggcagcaaaataaagtggacttagtcctagaccttcagcttatttaaatattaactccagcacacttctcatactctgcaagtatgaaaccatctattgtgttgctgttgactgaattcctgttcactcctgggagagggttctgctgttttttcctatatctttgaccgtggaaatgtatgttacagtggagctttctgaatctagaccacagccaccacaatattcagacccagttagcactgcaaatataccatttgacacgttttataaaataggcgtttctgcatttagatcatgttataactttaggtgtaaatatacttgtattgagagggttaaaatttgtatacctttgatttgaacaatcctatagacttttaggttgtacctcctgacagcaaatatgatgttttaatcaccgtggggagccatgaacaagtccttcctttggcagagctatcagggagagtgaaggcattgcatttctttggcattaaaaacctgcattgagctattgcagatcactcaggatatatctagcagagaggatatatctagcagagaggatatatctagcagagaggatatatctagcagagaggatatatctagcagagaggatatatctagcagagaggatatatctagcagagcaccgggaaaacaagcttcttgtgaggacaaagagcagctcaggggctggagtgaaatagccacttgaatccacatgtgtgaaggaagattgcatcgtaaagagtcagaaacagaatcccgtgtatgaaatgaggagctgagccctcctctatcctcttgctccccttggattgtgtgtcttgtcctcagaaccatctccgaaagctgttatcgaagctctacaaatagaggctcaggcaggtagacagcccctggggagccagaggctcactcagatccaccaccctgccctttctacgtaacctctgtcttctgccattggatccaccagtgcagaagcagcactttgtgtctttaatactctcagcagattagtggcttgtgcaaaaacataggactctagagacagacacttgtacctggattcttactgtggaaatggggcttgactaattcacaactgttgacttctagttttcacatgaccaaactttttaatatctagattgatcctttgatttaatgactaaagttacaacagtgggccactccttcatatgaaagattagtctatggagctggatgttgaggatgaggctcacacccagttctttctctgccccacagttggttccagtgctggggcacctcactacagctcactgctctcataagcccgagagcagctctgcaccttctgcacacgggtgccaggccatgggcgggctcctcacatgggtgggctcctcacatgggcgggctcctcacatgggcatgctcctcacatgggcgggctcctcacatgggcatgctcctcacatgggcgggctcctcacatgggcatgctcctcacatgggcatgctcctcacatgggcatgctcctcacatgggcatgctcctcacatgggcatgctcctcacatgggcatgctcctcacagctgacgtgttttccagagtccacagctcagtagcctgctacccagcagtgcttccagcccaagcgtcaggtttcaatcttacaatcttactgaaataatcttttctttaaactggcctccttgagattttgaaaattgaacagttcctatttatgcaatattatgttcagagtggtagtttacagtgtgaataaaaactctcatttgcatggagagagtgaatcttttttgttgttactttcacttttccagttaagactgctttctaatgaaaggcttgatgaggggatgagagaggggtgtgtgtgagtgtgtgtgtgtgttggtgtgttaatgttgtgtgtgtgtgtagttagttgagacagagtagttttaatgtgtcagttcgtgttaattctgtctcctttgaaggctgaagttcaggatgtcagggttatgaggaactggctgactcgtgcgctaatgctgcagactgttctgtgacatgcgctgttgatgtgatccatggttcctgtaacacatcacgtaaactgctgaggagaggctggggacttgcgtcccccttgcctatttctaagtcttgaaagctgtttttctaaacagcttttaataataaggcagtttattgatactaagttccactgaattttatttatatgtatataaaagtaaaccatgaactcattagtattttcattgctggtaatactttgttttctaaagagtagagttttcctatgaaatccaccatagtgatcagtaggaccacattttgatacaggaaaagtcctggtatagaaaacagcactatagaggcagaagttattattcacacactcacagtagggccaccttgcccctgaggatacaagtcagtatgggaatgtacaccaaaacagggagacctgtacttccaacagaaatttgctttctccattacaacaaaagctaattgtattatgtgatatttaggctcctttgtctgttatgccaatactgataaagtttctgactatctttaaaaaaaaaaaaaaaacaggcagtatgtgtctttagagtatagttgaatagatagtttacttaaaaagaaaaaaaaaaaaaaaacagcccaggcttctttcatgtaatgtttcagtttgacaattttaaaaagtacattgtgggatatttatagtatttttcgatctatttttgtcagtagactaggagtgctaactgatttagggcacaggggttaaaaacaggaaatgtggtgtacgaagtaggttgtctccagactttccaatttcttgaagtattacctaccggggagtgccgggtttcaaaacaacactagcagagaactttgagtttgtccatagagaagcaatgtctgttgtgccaggaagtggttcacgggaaggaaggtctgcattcttggtatggcttcacatggtacggcatgctttctgtaactccttttgagactccagacaggcagaggagtgaaaggcttggcttcgtccacctttacattttgcttaaaatgctacttgatttttttttcaatgaaaagttttgtcaaattgctgtttaaaagttttcaatgaactgttgagttgggacatgttgtagcaccaggcaacccatggttaaaatgcatggagaagcaagacctctgtttcctgtggccttttgaatgacagcttggcagaatctaccaagactgaaaaccctccaacgcagcagttccacctctaggttatcctattaaaatacatgagctaggtgatacatccctgtagtcccagcactcgggatgcgaggagggggattattgcaaattctggaccagcaggtctacaaagtacatctacatgtgtactatatgagctcaaacctatgacatttctggaaaagacagaatggtaggggtttgcggggagagaaagcaagcagcttcaaggttaatggagaaggagacatccatgagagaggcagcagtgacgtttcaggcacaaagactgtcacatcactgtagtggtgagcatattccactaagccgacagaatgtgcatctccagcagtggccctgttgtgggccctggcctctgttgctagggccatcagtgtatcagctgtaccctctagtgacgcgggtgtgtgtgagcggggcaggcagtgggaaagctgtacttgcctgggaggaatctgtcctgagtaggagcaggattgcatgggaggctgtgtatttcacttgacattactaaaggcccggcttgccctgaaaagcaggttgatttggtttgtttgttttgtttacatttgtttcttaaagaatgtgatataattaagttttaagaagataattgtaatctcttttttaaaacaaacaaacaaacaaacatattcctaggcaaaagtctgaaagaacataccagattgtcaggtgtcattctcaggggaaagtggtcaagacaacattcattgaatgtttagttgttattaaatgagcccatacttccatgtttatttctttccagcagacatttaattttgaaaattttaaaatattttaaaaagtaaggagaaaggcctgttcattaagacctgctcgttttttagcatattctttcctgtgggtgtgtcctcaggagctgttcatattagtaataaagagaatcaaatctggctgtgtaacacctggagcgtccccagacattgaggagagctcaaagctcaaatgaattaccttgtctccagccagccttaaacactttttgttaaagttcactggggggaggaagcattctaatgaaatgggcacacagaaacaccagtgtccattcaacaagggatggggtcattgtcaccgtggcgccattctcaggcacagcagccttgcctttgccaacccaggctttactgtttgcctggttaattttctatcatacagctattttcttgtttaagaataatttactttgccactttttcttatatgtaaggacagccgggccatttattatattaagcctgggtgttgcttatcggctgtaagctctgtgagaaaggtctctgttttcctcaggacctggaacggtgcttgatacagaacactaacatcagggtctcactgtgtatgtttattaatagtgtgcttatccctacaactttgtgactttcctgctcaaaaaagaagaagctgacaaaacgaccaagaaacttctgttttaacgttgtgtatacaaacactgttttccttgtgggagacttaggtcctacagcctcactaaccggaagcccaccatgctagcagcagcctacagggcctcgatcagaggagaggcgaactctgttctccttggggaatttccacactaggcttctagattaattgctcagtgatcgtctgggttcatactgtgtgggtggggacactttgttggtcacatatcatgacacattctaatttcatattcagagcagagaaggtcgatagtattctgaatgctcagaaactgcctctcattccctcacttaagtaacatggaaagttgtgggggtttatctaagtagggctcttcaaaacaacactcatgactacatcataagaacctgacacttccctgcaacttcaagcagcaagtcagttttcctcttaattactctccctccacccccaccccccacactgactaccctttcctaatcaggtctacactctacatggttactgccattggagtacaaactaaacccaggttctctaacacacaggctatcccaatgtgttcttacctacctgagaattgccatagtatctagcacattgtgggcactgagcaaaccagtgctgactgtctggggcaagctgtcccaagaagagcaaagctgtgtggaaatgcattggtcgagcctcagcagcactatcctgtcctactttctttaactgtattgttaaatagatcctgctgcttaatatcaggaagactgcccttcctgtcctgtgtcctaagaaaagtaagaggtgccctgccagagggcacatcctcataacaggcttgcttgtttctagtaaacagcctgctgaagggtgagactatttgactgtggatcttataagatgtacacgtggttcagttttcctttaattacttatccattcaccattctcttagcagttcatgtggatggtccagctctaaaaaatctagtggtcaaaccagacattgcagtctctcgaagtcatgctaatatgtgataaaaactgccattgtttttacccaaagcaaaatataactgacaaattccactagagcaccaccttcacacttagtgtaaacctgtacagcaggagttctgtcagaggcaaagcccctgtaagacctcagcatagccacattggatgtcatggcaagcttcctgttgccaccatgcattccaaacaacttttcagcagttaatcaatccctgagttgcttgctcaaaagaacctcatctgtagctggatagcagtcacagtgaattagtttgcctgtgtatacctggagtttcagaaaacacagctatagttagtgcattttatacccagtgtgcctgttagccagctgtttgtttttatctaaagctgtttcctctgcatgtgtgtccttcttgagacttaacacttcttccagcaaagcctcgtttctcttgggactacagactgtgcctgttctgtgcacttctcacagcacgtcggtgttcacacagggcaggcaggtgggcactgtcgaagaatgagagaataaacagcgcatctataatggcattgttagcaaagaactcactacaatcactgcctttcagggatggcagtgacttgagaggcaaactgaggtgtctgaggtcatgcagctggtgattggcaagccagaatttgtaccatagttgtgtcctttgtcacctcagtgaacataaaaaaaacaattagcgactgtcaatgttaataatattaaaatagaataaaatgtggcaagagaaaccaacatttgccaccagagtagactacagtatggctcctcccttatagtcatctaccctgtagaagtagcctcctcaccagaaatcaaattctggtcctgcccccaggcaccaaagccagggactttgaaatccatcctacagtacttcctaccatctacctctagagcccaaccctttgttgtaggcatctatctgcacagcttccccgggatcagcttctgctgcctgcctttcctttccgttctcacttctcattgatggaagagatggcaggctcagccattgtccctgaggccacacatgaggcccactctcctattcctaaactccatctgcccacagtcttaggaattaggtctccattcttctaccacagtttccacagtgccaatgccagtgtcccagatgcttggtccagtctgtgaaagggcacagagctgcacagagttctgcgtgtcttccattagctgtcaatcactgctaggttccttgtgatgctgaacacgggaaactgtttcagacctttttttagggaagagtgacagaaaaagtatgtttgtgttgatgctttcaatactcttcattggctgttggttgaatctgtgggcatggagtccctgcatgtgaaagcccaaccatgtatttcctttccctagtcagcaaaaagcacatttgccagctgcttgcccccacatgaaggatgaggcagagcggccatttccaaacataactgatacccaggctagcactttgccttaacttgttctgcctttgcttcagtactagagtttaaccaactgagagcttcaacagatgaagagagccagtaacacacttacagattattttacactggttttctttgcctcataaaaccctttcatataactgtcctgtatgaatttcttatatgtggctataaacacaaaccaactgcagtaaattgtaatcaaacttttagtaactgtggtcttctttctgggatcatcagcgtgttccacttaaaagggcccgatgtatgtaggtatgtacctagtagtttacctcataagagaattttaggaaatctgtattagcaaatgaatgaacatttgtagccacttcctttgatgaaatatgctagttcactcggcagtaaactcaacaggaggaagaccccaagagcaggcacaagagccctgtgtagccctggaactctagccctagtccctgtgcctgggctctaggattgctggcgtgctccgccctgagcatcttggttgtggagttggtttccactgtatgtatgcagtgctctgcaagagcaacactttgctttagcaagatccagctcaggctgtttgctctgtgcaggtcagcattagcctgtcgtttctgcctccaccgcctgacacactgcttaggcagaagagctgttctgtccatctctcccccagcatgccccatagcccctgaagcactggtttgttgttctgtgaacacttatttgtgggttttttctattcataaaggtaaaactccaagaactataaaactctctatcccaaggttaaggctgcttctgctattcatgcaaatcctgcagtaagctaacaggggaaacctgtagtttttcagagtgtctctcgaaatgttcttttggactaagtatttcttactggcgttcttacttactatttgctatcacagctgtgtctttagaattgtgctgactaacccagggctgtctctgctatggggtactttgttggtgatgcttggtgtaatgttcttgccagatgtcacagggtgagttgcattcatagtatgtggtcactgggcatgtgcctgcctaccttgagagaaagtttaatttttggcttagtagtcagtactggagctcccctgtgcatgcgcagtcatcgttgctgacagctgcactgcagtggcactgacagagcctggcttcacatggcggaggctaaggtttaaccctggctccttagagcatcgctgctctcatgctgggcttgggtttagtaattgtgcatgttaggagtatagagatgagcatgcacgagctgctgtccctcagtacgcagtcatgtgccccactctaacaccctagtcatgcccctcagtacgcagtcatgtgccctgcactaacaccctagtgatgctcaaggcccagccctacattcccagctgctgcaggggacatcagtaccatggcttttctttaactggagagctgctgtgttctgcaggtttgtacatttcacttttttaggtcccttttcagccctgcttcctaccctcggagttacacctgtagtcctagcacttcctgccctcagagttacacctgtaatcctagcactcagaaagaggaatcagagggatcatgaatccagagacatccttggctgcatagtgagttcaggatcagcttggactgcgaaagattctgcttcaaaacaaccgggcaggggaaaagattgtagttaatggtctctgcctatccaagctatgagtaacattctaacattctttagcctttgtagttaattctagaagatagtctataacattccactccaaaggaaagcagtcattttggagttataggaaaactatactgtgcttttgcgcttttgttataccacattggtgatgacttcgtaaagagcatggagaactgtaggacatgcacacgtgatcaccgttagtcctcactgcagtcagaggtgcaaaatctacactcactcgacaagtggaaagaaaggccttctccccagaggtcacagctaggaggtagttggttcagaaagctatgataacactctgcacccataagggtgctgctgttaactcaagctgtgctcattaattctggacccacagtctgatatcttttttatgtccagtctttaacttgttttatagaatcaggtacatggatgggcacatatggagtacacacctgtgtatcctgctctatcactgtttaccttacctgccttgaggcagagtctgtcactgaacctgaagttaggctgacatccaggaatgatcctcctgttcccccttctagccccaacccgccgtctcccacagaactggggttaaaggcacaaacagccatgactagcccggcactttgcgtaggtgtttgttttcattcatggtctttatgccttgcatagcaagcactctaacccactgggtgttctccaagaccttaaggttttctactttgaaagtcagtcatgggctggagatgcggctcagcagtttagggcacttactgctcttgcagtggaccttgttttggtccccagcatccatgccacttggcttacaactacctgtaactccagttccggtggatctgatgtcctctagcctcagcaggctcctgcacatgcatgctacacgtaaacacacacatgcacatgtgtgtgcacacatacacagagaaattaattaaagtgatgccttagaatcaaaatgtcattctgtataatgctatgatgtctaacatgagtcttacaggtttcagcactctcctttggtcctctgtgctttatctgatacacatgtgaaacataaggatgttttaaagtcttgattttgagaccaactgatagtaaattcagaacaaacagtgataggaatgaaaaggggtgaaagaccagttctcgttggagctgttttggtttttacctctctagaaatagtcctttcaccattttgatctctaaaggaaatggacagtaatggtgttattttcagtttcacctcagaccactttggaagtcacattctgatgctgctggggatttcattgagtgtctttccctttcctcatcttgatttcaggtgtcagaaactatttaaaagaagcattggtgaatataattgctgtgcatgcagaggtaagctgtcattaactgttcctacgaaagtagataattgagggggaagaaggaaagaagcaaattggattattattcacaggagggggatctcttttaccccttcggaatatatcttgggcatataagtaaagtagagcacagcttttgtgtgtttgtgtgtctctatttgtgtatgcatatgtctgcatgtgtgtctttttgcatgtgtctatatgcatgtatgtgtatgcctatgtgtgttggtgtgcaggtgtgtctctgtgcaattgcttgttgtgtctgtgtgtatgcatctgtgtgtttgtgtacatgggtatgagtgtgtgtgtgtgtgtgtcgctttggtatgtgtgatgttactgcccatggttcccacacctgtcccacacagttgtcatctgaggtttcattcttcctggacatcctaggagtgggagtcattctgaggcacactggaaaacaagctgccacctagtgtgccacagcgacctgcattgtcatacaatgatgttacagtccagtacacacattgccagcactctcaaggtggctcatagaagaatgggagccataaagtaaagcaaggccaacagggttaccactgctgctcaggtgctcctccgctgagctctagcttcatgtctaaggtttggaaaccatcatggtgtttggaaaaatacagataaggacagcaaaagcagaagggcggacagcagagaaagcagaggtcatgtctcctccttacatttgcacatgttagcagaggagtttgtgagctcctctctagaaagattttatgtgatttaactctggcaggtggtctcatagatccctgattttatttaaaaatatgagctaactcttgtgtcagtttcttttgagatgaaagcataagtgaattcattggtgggtaggagcatcctgtctgcagagagcagaggaactgcagagatcaaggtgtaagggtcaggctgggcgtgtccagaagatcggctgacagccattatcaacagctgtgatatcattgaagtagcagcctctcaggtccccttttattttagcccagtaacccaaagtagatctcaccaggactaccgtttgtgataaaatcttaaattgccaaaatatttgttgaatactcagattgtttgggacaattgttgacgcaaatgtttaattgacactagcacctcaaagtgggaacaggcaaagctaaaaagaaaacattctttaatttgtgaattagcaggataaaatactctactaaacctctagatacaactttgtcatatgttaaaatttgaaatgggtctaccacggtggctcagcagatagaggacctgctgccaagcttgataaactgagtttgattctcaaagcccatgcagtgggagagagaaccaattcccaaaagatgtcccttgacctccacatacatgcccaggtacactcacacacacacacacagaacgagagcaagatcgagagagagagagagagagagagagagagagagagagagagagagagagatattaatatacaatttaaataaataaaatttaacaatactgttgtttgtcaaaaaaaagaaatgtctttatagcacacagtaaaactggaatgctaatccagtacagaatagtgaaactcttaagtatttatatgagtttctcactgttttacccaagctggactcaaactcctgggctgacgcacttctctgctcatcggtttgagtagtcaagatagcaggtgcacaccactacaccagtaccctcctccatttaatctttctttaactgtggcacatatatacccagagggttcacacacacacacttttagaaattttgtttcatataaagaagatgtcttaaaaagacaaaaatttctttcttttttttttttttcttataaaggacaacatttaattggggctggcttacaggtcctgaggttcagtccattatcatcaaggtgggagcatggcagcatccatatctatttggggctgtaggagccaaaagatctatatcttgttccaaaggcaaacaggaggatactgctgtcttccaggcagttaagaggttctcaaagctcaccccccacagtgacacacttccacacctcctaatggtgacactgtatgggccaagcatattcaaaccaccacaattatattttatattccaacattttaattttgtttttttgagacttggtctctctatgcaaccctatcctgaatattgttacatagaccaagctagccttgaactcacagagatacactgttctgcctcctgagtgatgggattaaaggtgtgtgtcacaacagacagtttttaatttttaatgttccatctctattctgatattctttttgttttctcattaggaccatagttacttttaactctccaaatacatttgcagctgttctgaggtcttcaaagtgcaccttgtaggtgctagggattggttgctcctgactcctgtggttctttactatcctattgctaaggcctactgcagacttggtctgcatgtgcttcagactaacctctgataatagctacaaaagagacaacattttgaaagtggagctctagcaagtccaaggaatgtgggaaatctctaggcttccactggttgacataagtaacccttaaaactctccactctgtcaaaacacacagaaaacactcaagctcaagatagtcattgaatgactgagcaactgcctagagctaaaacctgaaaactgctcagaggaagaaagcagccccgagtagctctgtgtttataacttcactcccatagttcacgacaatgaacatcaacaaatcatcacatgtgaagacaaaattttcaaaacaatttttagtcgacatctgcaatgccttttagaaacgaagcttatttgtcattcatcagtaaatacaactaaagtatacatctggggcctggacagatggctcaggagggaagagcacttgttgctcttgcagaagacatagatttggtccccagtaccacatgctgactcatgaccacactaattccaggggatctgaggccgtcttgtgatttccacaggcaccagactgcatctggcacacatacatatgtgtaggcaaaacacttattcatgcacaataaaataaatcttaaaaatgaaggtttacatataaatgcgtatcttgttttttttattactttgttattgacatacacaagccagaaaaggtatatataatgtactgtctcttcttgtctaaacctcccatcaggtattcactatttccaaggaactggtgccacgggtcttggccagagtggtagaagcagtctctgaagagctgagccggctgatgcagtgcgtctcatccttcagcagaaatggagcactgcaggtaccaaaatcatccaacgtcatgaagaaattgttttaaatagggaactgagtgttagctaccagctttataggcacgtgttacaaactgtcctgtggaccatggccatcgtcctagctgtgcaaccctgtctccttctctgagctgtgatctcactttcctgatgatgtgttgctacatctcatcgagaaagttgtatgttacatactacatatctgtgcctccagggcaagctccccagtgctactcctgctaggccactcaatgctgccatcggcaggaggcagggtcagctttcctgctctcatgccctctcagccagctcacctgcccaagcctccagggccagattcaccgtgctgcccaggctaggtgcagggccagctctccagactgctgtagccagtgaggaggcagggctgggtctcctactctcatgacccaagggccagttctcctgattgccacaggtgatgaggtgggagagtgttgcccctgcacccacacaacctcacagtagtcgagtgttggggacacctatccctctcttttgccctttgtgttgccttatggagcctgctcgaccagggccagctttattgtactttctgagctgcttgagatatagggcctagtctcccagtgctgttccctgctgcggggttggtggtggaattggggttgaggctacaggtctccagagtactgctgctagtgaagagcaaggccagttctgcacgctcccagttctgcacactcccagttctgcatgctcccagttctgcatgctcccaattctgcatgctcccagtggctgccccagccagggtcatgtgtctagggataatatgagccacagacactgacaccaaccccagtggctttgtagccatggacccagacatggccccaggtggctgggctggctactcacaatatgttgctcatctccaccctggagtctccagttccatctctcttcataatgctcaagctgctccacttctcttttgagagcctgtctgtccaccacatcctcacacattgtgtggctcctctgcaggctgaccatgcagctggcaggctcctgagtggtatcctcctgcaggctggtgtccacagcctgcctgccctgcattgggaagggcagtctataggcagcatggccgtcatggtggtcaccaggtctctgtgttttatctcccatgccgtgctgcctgtatttcatttgatttgatgttcatatgttctgggaataagacagctttggccaccatgccaggtatcaagttaggatgttgtctttcttttacattaatttttagttatattaagggaggtttgggcttcatctttccgtatgtggatccagttgtgctgtttctgttcactgagtggatactttccccactgaacagtttgtagcccttgttgagatcagttggctctcattctgtattattgagctccgggtctgtcatgtctggtgccaccctaacgtgagagtgttggaaatgtgagacttccaaatgcattgttgttttctggcaccattttaacgtctctgggaactttgcgtttccatatgaactttaagattaacttatcaattttctttgcttttttaagcttattcacacattaaacagagactggattgacttcataaagcactgagaggagacagtgtatctaaaagggtatagtaggaagcgagcccagccactcaggccagggtttcaggtccgtccttctcactaccaaactaaaaggcaaataccagtcaggtagtaaccctcatgtctgggtggccagcccctgcccacacactcacacttgacagcagcgttaaaggagacactgctatttttggcccgttctttgagaagctgctgttgttctggcctgcaggaagcacgtggggctgtctcctcaggtctactgtcatttgctgcctgacaattgtaactcttgcctttttctcatctttaggccagacttgaaatctgtgctctgagggacactgtagccatttacctgacctcggaaagcaggtaagacacgaagtcttcctctgagattcttctttgtgatcagaattgccttacttgtgcattgtgcctcttgtcagaaaacttacaaacaaaatgctcataaatttgtgttgaaatagagttgctatttcatcagaattttttactaaaaagctcaagcctattgtaagacagtgactctcaaggccacctctttagagcacattataaatgtaattgtttcattcattacttacaaacctttgtctcataaataatatggccaagtatgacatacttttttatttaaaaaaaaaaaggctaagaaaattaaatttttatcagatttgaagaacagtttaagtgttgtaaatatcagagtaagaggaagcctgtggtttcttcacaaagttcctgtagtggaaagttgatggtaacttttagctgttttgaatgaaagtcgggatttcctactattgagacatcagtaggtcagatgcacagagttgcctgcatgcagagctgtttgccacagtcactgcattgcccaggaagcctgagctgtgccatgagcacagggacctgcaggagaccgctcatttccagtgtttgataacatggctgtgccatctccttacagtcaccaaaacaactgaaaactttcattatttttttaacaaataaaattagcttcctcctggtgtaccacaagccatttctagatgattcctatgatcgttgtttaaaaacacattttcccaaccactcttttttttttttttttttttttgtggaaaatgatagagacaataggaagtacccagtccatatcgcctaatatgagtgtccgtttatccccttaaacttaacctttgtgaactaggttccttgtttataaaaccaagatggtacagattgactatcctgtatcagaatacttgtaaacaaaagtatgttcaactttcaagtgtgtgtgtgtttgtgtgtgtgatggaaagagttatgtttgtttgcttggttggttggttggttggttggttggttggttggttggttggtttttggttttttaagacagggtttctctgtgtagccctggctgtcctggaactcactctgtagaccaggctgtcctcaaactcacaaatctgcctgcttctgcctcccaagtgctgggattaaatgtgtgcaccaccactgcctgacagaaagagttatcttgaagatggaactcttctaaacaaggagtgtagttatgtttcattacacctatacatatgactaaaaggtaactcaatagtttcttaatcattgagtgtttgagggcctggagaggtggctcagtggttgagattactggcagctctgcctgaaggcctgggtttaaggcccactacttatttggtgctttacaatctgcaaatcagtcccagcggacccagctctctctgctcccttccctctacacccatcagtcatgcaaacacccatgggcatgaaataaaatgatcaagacagaggagagcctgctgacccggaaaaggcaacgtagatgcccacacacactatccccgagaacactctgcctcgggctagggagaatggagattcccagaggcatttttgtgactctgcgggacttttcattcttttaacatgcccttagtttaagaaacattgttctgacattcacatcctgatcaactgaagagtatcattttaatacaaggtaagagataccctccccacctcccacccccaaccccctgatcatcagtgattacatttctttcttcatatccactagttcaataaaggacttgaagctggaaactgttcttaggaagagtcattattatcaaataagttctccattgtgatcctcattcctctcagtaactcttgtgatattttctacctggaaaaactgaacatactaaataggtagtttttcaattcattcaatttacctttctcatataaagatagtgttcaaaagtatatgtaaatatcttcctttcctgtccacattaattctgataagaactagatcctgtcccccacgtccactgtgaggagacatggctgtaaaacaggtcttgtccttgtggatgctgtgactgtcctgagtattattctgcacaccatctgtctctgcttactctcctcccatttgcaccattgctttacctatagcttgtttgtttttttttttttaatgaaaaggaagtttcctttgctcccctcccctgcctcttgagcatacacacacacacacacacacacctgtgtgcatggtcacatcaccgagcctgggtcagtctctggcgtgccctcagaaagccctgcccctctgcccacttgcttctactttttcttcttctgttgtttttcacttttactttttctcacacatctccacttacttcactggcctttgtcagtttctttacatttacaatgtgcttaggaatgcctacagtaactcctgtgaattccactcagagtgcagactgtgagctcctgtgcttttgtgtttcaggtctagttttaaacaggccctggaggccctgcctcagcttgcaagtggtgcggacaaaaagtaagttctgggtgttctcctcaacccaccagccgagctgagccagctctagcagccagagacccaccgaaagtacttagagtggctagtataaggagaacctaggctaccctgggatgtggtgtgctgggtcccctaggccaagggacagaatgaattctgtcttgtaggtctaacttaaacactgatggattttatagttttaagtgacaagcacacgggatatgagaaaggcaactcaactgcagcactggcttctgtaatgatgagagcaggatgcgtccatccccgttcctaccacccccacttccgcgcactggcttacatacactttggcttctataaagcatggagaattagactagttgcatacaaggcacagaacagctatgtcattaccacattaatgagctcagcatgcatttaaactttacttttcatataacaggaaattgtggcctgaggggaagtctgggccaggtatcttttgtaaatgccagtctagcttcagcttaggcagtggagaccctgtgtctctttctctgtgaccattcctagttaaagtctacctgactcacagtgctagactcggtggccaagcccagcggaatgctgtagagagaaggtacctggaccaactgtgcgcataaagagtgactaggcttgggagagaggggagcaggccggctttcctgctgtgctaccccagtgcagacccttatgtgggtgtctcagagtcaggcaagcagctgaagagtgctttgcatcactgagtgccttgcttccttccctgctttgtttttgccttggaagtcatccgttttcttgaaataaaagataaaaggtaaaaatagtcagcactgctcttagtacatggaacatgtttcaaaaggcatttcagcatcaaaaccaaccaataatcgactgtttgagctgacgtgctgttgtttcagttctgatatagtatatatcatatagtatagtgccagtactcgggagcaggcagatacctaccgtggaagtctgatgacctacactgtccccagaacctttatctgtagaaagacaggaaagaatcccctcctttaagttgtcctccaacctgcatgtgtgtttctgtgcccatccctgccatatatcctgcagacattctcttcactcaaaataataataaatgtagacgtttatttaaagttctagagcaacctgggctacagagtgagacctccacatatatgctgtggcatgcaggccaatactcacccccctacacacacacacacatatacacatacactaataataataaaatcaaatgaacaatttaatgagtagggtgagagatgaccctgtcttctgggaccatttccactgtgtgtagaaatcacactgttcggtaattgcggctccaagcccctgccacgagtatctgcgttcagttccccagcagtcgtagaactggaaaacaaaaagatgtttagtttgtcttgattgtttgaataatgttaaaagagtagatctaagtgttattctgttctaggaaggactctagagaaggagtgtaaagagaatgaagataaatacagacttgtttagattaataaataatatattctttgatcagcctctttactttttgttgagatatttctattgctgattagaattccataggcactggctttttttgtctttcttctaaacacagtgtggcagtcagacctgagccaccagctccctgaatatgtgctgagttgctaagctgttgtgatggctaatcttgactgtcaaattgacatcctggagaaaaggaacttctgtcaaggaattgcctccatccctgtggcctgttgcatgtctgaggggcattttcttgaatgctaattggtataaaaagaaccagtccactgtgcactgtactatacctaggcaggtagcctggccagtgtaaggaaggtggcttgctgtgagcctgatggcaagccagcagacaacactgctctgtgattgctgctccaagttcctgccctgagtgtcaaccctgggctctccagatgatacatggactatgactgtaatccaagtaaatctctccaagttgcttttggtcatggtgttgtatcacagcaacagggaaacaaactaggatggccacctgatcttagagttactatcactgatgaaacaccatgactgtgagcaacttgggagagaagggtttgtcttatgcttttacatcactaatcatcattgaaattagggcaggaatcacacagggcaggaacctggaggcaagagctgatgcagaggccatgcaggagttctgcttactggatgctcctcatggtttgctccatctgctttcttatacaacctctcggaccgccagccgagagatggcaccatctacaataaggtgggccctcttccatcagtcgttaattagaaaatgctctataagcttacctacttatggaagcattttttcaactgaggccccctcttctctgatgactggttcatgccatgctgatgtacagctcactagcacagctcactagcacagcccgtcactgtcaggatgtaaaaccctctcctccctccaggtcactggaagagctgctcaacaagttcaagagcagcatgcacttgcagctcacctgcttccaagctgcgtctccagcagtcatgaaaacataggctctgcaagaagagcatcagacatggcggtggagactgtcctcgtgctgtgcagcagagattacacgtcaagcactgcatttaacgtctcttttccccagcatggtggtgcagaaagatgcccatggatatttaatttcaatctatttaaactaccatagtttaaacatccaaataaacagtttttgttattgctagctttggtcctgaaaggctgtgtagcatactcttcaaaatgctgtgagtctggggatttctccatcatggtccagagcggcccatggtgtgtgtgtgtgcccttctcagtgcccctcttctaggcctactgttggcagtttccagcccaggtgagacatttgagaagagatttgaagtcacagtttttagagctttgtcctaaactttaaaataaccatttcatacaagtggttctaagctccccaccctgtttctgtaaagaaaaatatacagtctacacataaaaatgttaatatttggataaatttgtgatccacaagtcctcgtatgaactctgaatttcatagtctgactttcatttctcccagtgctaaacactgaagcttgtggttctcactcagccttaagctgatggatcactgcagtggtgtggggagggttcacaaggacctgtatgtggaggccctgtcacacccacaaggcctggggaaggcttgtggtcttcaatgcagcctaaagatgaagccaggctcctcggcaaggcagcactccctccccctctgccacttcccacgcggtgaaatgtcttgctccatagctggaaagaggctgctctggcatgggctgtgttttgtaaagatttgaggtgccccaagtgaccaggcactgagctgtgactcagtggtgagtggcttgcgcagtagagtcaggtcattgtgacctgcaggcagctttcacctcactccatccttccgtcagcctctgttgcacttcactcttcagaccgatctgtggataatgtaggctcctcttctagagttgacaaaactaattccagagcacagcatatgtaccctgtggattatttaaggtaaatgagtgtatgtttatttatcacagtgactggaagtagaaattgtaatcctttgttgcaaaataagtatgtaccgcattgtctcctccctgtgtgctgttattatatctgacataaacaaactaaattccaaagcagaagtacagaaccatttgttattttaaacacctaataaatacagtgcacaaagccagtagttgtccttctctgtaagacccctatctttatttcaccatttttattagctctgtaattgcttatattcctgattttaaaatccacaataaatagtggagttctctcttttatgttgtgtttgtgtcttcattgttaaacaccatgtatcaagtgtcttgttagtttcagtaggagtgtgccatggacactacttcattgcagacagtgctagggcaccaaataggcaggccaacagagagatgagttgcttctgagacgttaaggctgggaggcacctagagacccatgcttgcactcacaaccctggtttccctttaaggctgggaggcgcctagagacccttgcttgcactcacaaccctggtttcctggcgctgaacttcaccacaacccacttcttcctcccaggtcaacacagtttctgtcatccttcccctggggccacaactcagggagagcacatgagcacgagggttgatgaactccagcatcacaggacatggaaacacttagggtggagagaatggagggcggtgccataaaatcccagatcaaaatgaggggtttcagagacaacttccaacaagtcatggggggcttcttggaggaaggggctttcgaaagcttgagttagaggtgagtggtaagattggtggtaaagtagagacagagcaagaccgtgagtcagaaggaagttgagagccagagcagatctgacacaggacacagaggacgtgaggaagaatagaagtgctccagggcttccttcctagggcaacttctggctctagcaaggccatgcctgtgtggctcagtcagcatggcttcatgaaagttaacacattagtctcacctttagaactaaaggactactagaaataatttgcttttttttttctaagactttctgtatcaatgtaccatgaaactgccatgttctagaaatgaatgggcattgcaggttgcaaaacaagccccactggcacagacagctgcagctccccgactcccatctctgtaggcattgcatgcagttcttaaagacaatgcatggaccgtgtgacattacacttgtgctgtgagtgctaggtagaggtgtggacttctattttgaatgtgtgctgtagagtactttactattatgttaagagttctataatttacttcaattaaactgctttaaaataaagattaggagagtatgggtttttagctctgtccttttgattttctctttccttggtgtctgttatattgcctccttctacatctctggttttgttcatttggttaggagtttgtcagtcttgtttatcttgtcaaagaacaaaatctttatttcattaactatttgtgttgatatttattttttttatttcattaatttgagccctgattttttgatacctcttccctaatattattttatatgtagtgtttgttcttgttttccctgggctttcaagttcatcattagactatttgaactcttctctctgtctctgtctctgtctctctctgtctctgtctctctctctctctctatctctctctctctctctctctctcactctctatttctctctgtctgtttgttttaatgtaggcatttagtgctctaaaccttcctctggccatcattgtggctcatagattttggtatattgtatttttattttcattcaattctaggaattcttaaatgtccttgatttctttttgcctcagttatcccaatagtgtgttgctcagtttccgtgagttttgtacttagtttctgttgcttttgagatctggctttaatccattataggcaaatagaaggcagaacataattttaattttcccatgtttatatgtggtcaatttcagagaaagtcacataggctgttaagaagaatatactgtagtgtttgcatagaataatctacagatgccttttaggcccatttgatttataatgtcatttaacttcagtgttttcctgtttagtttttgtccagatgccctcagccccactgccactgtgtgggagttcctttgtaattttagatctaatagtattcttttatgaaattgcttgcacatgtgttgtgtgtgtgtcctcgtatgctttctatggctgtgataaacaacatggctgaaagcaacttggagagggaaaggtttggtctcattttgcaggtcgcagtccttcactggggaaagtcaagacaggaacctaggggcaggaactgaagcagaagcaggcaaggattgtgcttactaaggcttactccccttggcttgctcagcctgttatccacccagtaccacctgctcaggagtgacaccttgtgtcgtgaacctggcattcccacgtcaatcattaatcaagaaaatgctcccacagacatccccacaggacagtctgatggatggaggcagctcctctgttgaggttcactcttcctagctatgtctaggtttgtataaagtgtggggtttacatgaactaaccagcacagtgagtatatgtttagaactgaaatatacttttgatggatagaaaattaagtggcctttctttgtcttttctgactagtttgctttgaagtttattttacctatattagagtaactgtacttggcttatgtcctcattcttgccacatagaatgcctttttccatcctttttaccctcaggtaaaatcttaataaaaagcaaagattcactctactaaaataaataatacaacgtattaaaacaattagatttcaaatatgtatttttatacttgatgaaattattcacatctgtcaactgaaaattaaacactttcattaaacgtttatcagtagtattgtaatgattttcacacagatttatgaactggcctgaaagtctaaaggtgatactaaatattggaggctgcgcctcagcttaagcagttagactgagtctcactttgttttggctgcatttgaggaccattatgcttcccgtatacttacttccattagccaaccactgtaagttaggatgtgtgtcactcactgtttctgcttgatgagattgtaaatctataccagtaaatatgctgtgagcaggattcaagcctttaaaggacctgttttcactttggagataaagccagtagaaaggtaacatgtctttttttgcccctagtcaggaccagtcctcaagtggggagagaatgcccatgtgtgcaagcacacatggaggccagaggttggcatcagtaatcttcccccatcactgcctgcctgatttttgatatttgggtagaatagttagccagcaaatgcaggatgcctgtctgactccacagtgctggggttataaacctgagcccgcacagtggcttttccctggggactgggcacctgaactgaagctttcacgcttgtgcagctggctgttagtgacagccacctctccagtcccactccttatttttttaaccatgctaattttgtgattaatcactgtcaatattatcacagctattattgctatctttacttttttaaaacagcattcctgactcatctacctatataccttctagatcagtggttctcagccttcctaatgctgtgactctttaatacagttcctcatgtcacggtgaccctcaaccataaaattgtgtagttgctacttcatagctgtaattttgctactgtaatgaatcgtagcgaaaatatttgatacgcaaccaccaaaggagttgtgacccaaaggttgacaactgctgctctaggtagataggaattgctgaacaactactgactttttactgtcccaaaaggacatctgaagctctccaggaggtaagaagatagaaaaaggaaaaatggggtcccaagggatggattacagtagtaagagactgttgccaaagccagagagcatagatagcaaaagagtaaatcctgagaaatgaaaactataaggaaccaggatgtggctctgttggtagaggttttgccagcatgcatgaagccctgggttccatatccagctctgtgtaaaccaggtgttgtggtgcaactccagcagtcgggagttggggtcgaaatgatagatatttaaggtcctctttttctatatagtgagtgaggtcaaggacactctggactacataagaccctgcccaacaaaacagagacaaaccagaagaatgtactgtgtagatcacattcctgacaatgtaggtgatcttaggagtgctgctatttccttgagtagagaacaccttgcatccccaccacatacacataaacacacacctgccccaccacccacaccttggaggatgaagtagtcatctgttaggctctttcctcagtttcctcttctgggtatctgcccatacttgtgttcgcgccatgatgctcaagtctactggacctctacagacgtgaccgggccagatgccccgtggcggtgggtagtttttgtactgtctgtgttctagacacttgacctgcctcaaaggcctctgtgtactaccacagccagggtttcctgccttctctccatgccccactcccaggccagggacatacggttccagcactacagctggtgttgagaaaccctttggggaatagttgtgcattgtaattgatgaaatcatgttggcaggtgtgtccgttttgtaattttagctaacgacataacaagtcagatctgtatcctcctccctactccccttagatccccagaggaatccagtttgtttgtttgtttattgcctgtccttaacattttggtaatgacctttgtatcgcttgctaacagttttaaattgctctttctttagtaccttcagtttgagccactgtggccttcctacagtgggctataagaatttagttatctcctctccgtataacttccttcttgctccagtgctttggctttgcctagctctctgttcactgtctccgtcattaggcctgcactggacagagtgacagagcgcagtgacagagcggtcactttctcagaaactaacccatccccaatgcccctgccacagtcatcagcctgaattcactcctgcctgctcctcttctgtggtggctcagacgctttatgccgttgtggttcactccctcacctggtctggtcacctcctacagaaggagcacattggaagtaacaatgttgaggttttcatatctgaagaaaatctacattgttcccttctatggaagtagagttctagactggacatcatttttccttagtgttcagaagactgcccagttgtcctcgccctgcttgcagaatctctcctttgcttagtttctggaattcatgattccatgctggaccgttgttcttttattcctactagggagtagaatgtcgcaaattctgtgatttttttttttttctggaattgtttctataaatcttcagcagtcctggacggttggttaattcagttggttgtttttctgagtccttacatttacaactcttccttcttgttgtgttgattctgctttctgcgacatttttaacttgctttttgtcctcagactattctcttaggaccccacatacttactttcctggagatattcatagtcctctcttcaaggatcttgttttgtttctgttttcacccatctgcattgcagtaggtgctgtggatacataatggtatttgcgagtagggttctctaaagctgactgaggcggtgatactgtatggtggacagggccagtcaacttgcatgtcagtcttactgggatggacactcagtagggaatcttcagcatttctgtggggctgatcagattccaagggaaagatcttaagaatctcatgtgaggcaccccatgggagccaagtgaggaaggaatctctgaggtcattattgacaggcagtagcctgttcttcatggcatttctaaggtctctgcatctaatcagggaaagttaaaagtaaagtcctgaccctggcaggaggggagggtaaaggccaagatgtttgcccagctgtgtgggcaagagggagccccagggcaccaggctgtttattaaatgcccacagactaatcactgggttttgacccaaacctaatcctcccttgtggattccatactaggaattttgcagtggggatttcaagttttgtatatcttgcttgaaatcctgccagtgtgcaacctaacttgtctggatgctgactcagctcccagacacatgtgaccgttggaagctccccatccccatacctggtcctgtcatttgcctttggtgacactgttcctacattctatcttgtcatttgccttcggtgacactgagactcacatagttccagtctgtctgtagctgaaggttcaggttaaatttgattgtgacaacagcgttcctgtgtacactgcttggctttgtcctgagataggaatgaatattaatatggattcaatctctattcaaagtcaccaacagtatgaaatcagggtcagtgtgcaggaaatcgtctttgaactttacttagaaacaaggattagaactcgttgacaaagtagtctacttaacgatacaagaaattcaagacagggaaacatcctggtggccattgctggaaatgaaagcaaacaaccatggttcttcaagaagggaacacaggaagctgggcagtggtggtgcacgcctttaatcccagcacttgggaggcagaggcaggcagatttctgagtttgaggccagcctggtctacagagtgagttccagtacagccagggctatacagagaaaccctgtctcagaaaaccaaaaggagaaggagaaggagaaggagaagaagggaagagggagggagaagggagannnnnnnnnnnnnnnnnnnnnnnnnnnnnnnnnnnnnnnaaggaaggaaagaaggaaggaaggaaggaaggaaggaagggaaggaaggaaggaaggaaaaaccacagggataatttagagtatgaaagagggagcggctagatagatgctacacagtagaagatacttccaagatccgtcacctggtggtggtggtgtgaggacagagcttgacaatttcaaacaagaaattcttcacccataagtaaagcatggtaaatgctacctaagaagctggagagatggctcaacagctggagcactcttccagaagaccagggttcaattctcagcatccactttgcaactcacgactgactgtgactccaatccaaggggatcaggccaccctcttctggcctcatagtcactgtatacatgtggttcatagtcaaacgttctgacacacactccacacacaaaaataaaatttctaagcagtgttgatagtacattgtttatatttcaggtgtgtgatgatgtgtgactattagttttaagtcatttctaaaagtaagtaaattaataactaaagcagactagtgcccagagataggcctccaggaattccatcacatgacctgagacaatggaacaaaggtgatacagtgaagaagtctttaaaacaaatgaagcaactgagcatccaactgcaaaaaaagtgaatacagacacagctttctcagtcctcacaaaactggattcaaaaatggattatacatctaaatgtaaacaggaaaactagaaaactcctggaaaataatggaaacttgatgacattgggatcataactttttaagggcacaaggtacttaaacctgcatgacattttgtgggtagctggataaataaacggtccatccagacagtgcaagaacattcacacatatatcaagctttgaaaagacagccccaaatgtatatattgacaagccaccatgagaaggctctgtactgtgtgcttctaaccagtgccattctagaaaggaggcatgatgaagctctcaagcaaactgatattttccaggattagatgggagggagggggtagacagagcacagggtgtttaaggcagtggaactaactcttatactcacacagtgaaccatatcaccctcgaacatttctcaaagcctgtaggaagtgcatatctacctagtctaaatcctctgctgctgagtgggtgataatgagatgtcagtaggggatcgttatagcaaacatgctatatgacagagggtctgagaggccagtgtctatgggaactctgtatttaaagtgtgaacctaaaacatctctgaaaaataaaatactggaaaagaaagatacatagtagagagccctctgcatctcctggctccacactcagattcaacccactgcagactgaaggtattcacaaagaaacctccaagaggtttcaaaagcaaaactggaattggatgtgcaccaagccctatgctaagtgtacacaggaggagtgtatcagttccctgatgtcctgtccctgcctctgctgcccatctccctgcagctcttctgtgggcttcatccaatctggtcttcctggtactaggccatgatgctcacttctgtgcaaggcatgtacagactcttcttgtcctcactccctaagtaatacagatgacgactacttacatggcattgacacaggattaggtctacaagcactctatactgtgtcattttatataagagactcaaacacttgtacattaggatatccatggaggccctggagcaaataccacaaggggtcctgagggacagctgtgcatatgtatgtctttagtctttaaatgtcttgagtttgcttcaaaaacacagacgggtgaagacatcatatagattataggtgagggagcgttgaatagagtaggggaggttaagagtgagtggtccagagccagttttgtggagccttgagttacagcttacaatatttcactctgagtaactctgacttttcaattattctaaagtacaatcatttaaacacgggcaggtaatgagcctcaaatccttgcttagttggaaaagatgactgcagagccgctgggtattggctaccagcaagaagctaaggggtgtggaaccgtgctcagtcatcaagcagatgtgggccagcagcttacgatggttagtcttgattgtcaggttggcagggttaagtatctccttggagacacctgtggacactctacgggggtgatactagaaaggtttagcagaggagaaagactcaccttgaatgtgggcgttccactcctatgggcacaagaaacagaagaggagaagaaacgcaagcatttgtctctgttccatacctgtggacacggatgaccggccactgcattcagctagtgtcactccttcctgacatgaggggctgtgtcccttcttaaactggagccaaaataaacctgtctttcctgaagtcactttttactatgtatttggtcacagcaacaaggaaagtgactagtgcaggggtatttttaagggtgaacgctcattgatcaatgactcagatctgggctgagcagatgaaacatttgttcactgtattattgtcgggaacctatacaatcaagtttcagaaaagatagctcttgttactagacatagttttgtatagagataagtgattgctagaactagtgtattcactcattcattcattcattcaacaaccctgaagtcaataagggtctcatatatgtcagccaagtgctccatcactgtgttctgttaccaagccaggattggcattttaatgaatattacttgagtcagagtacaactcaataacagttcagaaagaactgcagagtaattctctttactggtaaaaccccatacccttgacactctgaggtgatggccataaactctgactgtagcacagtctacccaaagtcacagaaacaaagagagcacccacactgggaactcacaatccagatttgcagtgaggtccacgcttgcatggctttagcctacaaccactgcagtggacccagtgctgaaggggccagggtcccagaaaactgaatccagaaaacagcagctactagagtaaagtgggaaaaggttttcagaaaacacaaaagatcccccaaagtccactgacatctcaggacacctgaaagaaggcctgcacttgacagatgagagctgtga

SEQ ID NO: 372 - DNA, 3902 bp, Mus musculus
cattatggcaggtgtgcattgaggagcaacaccagttctctcatgttccagggagcaggaagaaatggaacatgtttgaaagcatggcccgtggcctaagggctaggcccaccttctgaagattccgagaggcaaacaagggtcttctgaaggtcctcggtaggagtctttacgttactggttgcttctataactggatcacgagtttgctgcacaaagtaccatgtctcgatcccggcagcccccacttgtaacaggcatctctccaaatgaaggaataccttggaccaaagtcacaattagaggggagaacctgggtactggtcccactgacctcataggcttgacaatttgtggacataattgcctcctcacggcagaatggatgtctgcgagtaaaattgtctgtcgagtgggacaagccaaaaatgacaaaggagacattattgtcacaactaagtcagggggtaaaggaacctcaactgtctcttttaagctactcaagcctgaaaaaataggcattttagatcagtctgcagtgtgggtggatgaaatgaattattatgatatgcggactgacaggaacaaagggattcctcccttgtctctccgtcctgcgaatcctcttggcattgaaattgagaaatgtaaacttcctcagaagaacttagaagtgttattccatggcatgagtgctgattttacaagtgagaatttttcagcagcctggtatctcatagagaatcactccaccaccagttttgagcagctcaagatggcggtcaccaacctcaaaaggcaggccaacaagaagagtgagggtagtctggcatatgtgaagggcggcctcagtaccttctttgaagctcaagatgctctctcagctatccatcaaaaactagaagcagatggaactgaaaaagtagaaggatccatgacacagaaattggagaatgtcctcaatagagcaagtaacaccgctgacacattgttccaagaagtattaggtcggaaagacaaggcagattccactaggaacgccctcaacgtacttcagcgatttaaatttctcttcaaccttcctctcaatattaaacggaatattcaaaagggggattatgatgtagttattaatgattatgaaaaagccaaatcgctctttgggaaaacggaggtgcaagttttcaagaaatgtcacccaggcccgcacagccccatgctcgacctagacaacgatgtgcgcccctcggtgttgggccacctcagtcagacagcgtcactgaagagggggagcagctttcagtctggccgagatgacacatggaggtataagactccccacagagtggcatttgttgaaaaattaaccaagcttgtgttaagtcagctgcctaacttctggaaactctggatttcatatgttaatggaagtcttttcagtgagaaaatgattcaagaagtaatgcactccctggtgaagctgatccggggagccctgcttccactcagcctccgagaaggggatgggaggcagctaacatatgaatcactgaccgccctggagattcccaatgacatgttacagattatccaggacctaattttggatctccgaatacgttgcataatggtgacattgcagcatacggccgaagagataaagagattagctgaaaaagaagactgggttgttgataatgaaggactgacttccctaccatgtcagtttgaacagagcattgttcactccctgcagtccttgaagggtgttgtcgattgcaaacctggagaagccagcgtctttcaacagcctaaaacgcaggaggaggtttgccagttatgcatcaatatcatgcaggtttttatatactgcctggaacaactgagcaccaagcctgatgcagacatagatactactcatctttctgttgatgtttcttctcctgatttgtttggaagcatccatgaagacttcagtttgacttcagttagcatggcatcgctgaaagaactggatcaacgactctttgaaaattacattgagctaaaagcagatcccattgttggatccttagaacctgggatctacgcaggctactttgattggaaggactgcctgcctccggcaggtgtcagaaactatttaaaagaagcattggtgaatataattgctgtgcatgcagaggtattcactatttccaaggaactggtgccacgggtcttggccagagtggtagaagcagtctctgaagagctgagccggctgatgcagtgcgtctcatccttcagcagaaatggagcactgcaggccagacttgaaatctgtgctctgagggacactgtagccatttacctgacctcggaaagcaggtctagttttaaacaggccctggaggccctgcctcagcttgcaagtggtgcggacaaaaagtcactggaagagctgctcaacaagttcaagagcagcatgcacttgcagctcacctgcttccaagctgcgtctccagcagtcatgaaaacataggctctgcaagaagagcatcagacatggcggtggagactgtcctcgtgctgtgcagcagagattacacgtcaagcactgcatttaacgtctcttttccccagcatggtggtgcagaaagatgcccatggatatttaatttcaatctatttaaactaccatagtttaaacatccaaataaacagtttttgttattgctagctttggtcctgaaaggctgtgtagcatactcttcaaaatgctgtgagtctggggatttctccatcatggtccagagcggcccatggtgtgtgtgtgtgcccttctcagtgcccctcttctaggcctactgttggcagtttccagcccaggtgagacatttgagaagagatttgaagtcacagtttttagagctttgtcctaaactttaaaataaccatttcatacaagtggttctaagctccccaccctgtttctgtaaagaaaaatatacagtctacacataaaaatgttaatatttggataaatttgtgatccacaagtcctcgtatgaactctgaatttcatagtctgactttcatttctcccagtgctaaacactgaagcttgtggttctcactcagccttaagctgatggatcactgcagtggtgtggggagggttcacaaggacctgtatgtggaggccctgtcacacccacaaggcctggggaaggcttgtggtcttcaatgcagcctaaagatgaagccaggctcctcggcaaggcagcactccctccccctctgccacttcccacgcggtgaaatgtcttgctccatagctggaaagaggctgctctggcatgggctgtgttttgtaaagatttgaggtgccccaagtgaccaggcactgagctgtgactcagtggtgagtggcttgcgcagtagagtcaggtcattgtgacctgcaggcagctttcacctcactccatccttccgtcagcctctgttgcacttcactcttcagaccgatctgtggataatgtaggctcctcttctagagttgacaaaactaattccagagcacagcatatgtaccctgtggattatttaaggtaaatgagtgtatgtttatttatcacagtgactggaagtagaaattgtaatcctttgttgcaaaataagtatgtaccgcattgtctcctccctgtgtgctgttattatatctgacataaacaaactaaattccaaagcagaagtacagaaccatttgttattttaaacacctaataaatacagtgcacaaagccagtagttgtccttctctgtaagacccctatctttatttcaccatttttattagctctgtaattgcttatattcctgattttaaaatccacaataaatagtggagttctctcttt

SEQ ID NO: 373 - protein, 772 aa, Mus musculus
LDHEFAAQSTMSRSRQPPLVTGISPNEGIPWTKVTIRGENLGTGPTDLIGLTICGHNCLLTAEWMSASKIVCRVGQAKNDKGDIIVTTKSGGKGTSTVSFKLLKPEKIGILDQSAVWVDEMNYYDMRTDRNKGIPPLSLRPANPLGIEIEKCKLPQKNLEVLFHGMSADFTSENFSAAWYLIENHSTTSFEQLKMAVTNLKRQANKKSEGSLAYVKGGLSTFFEAQDALSAIHQKLEADGTEKVEGSMTQKLENVLNRNTADTLFQEVLGRKDKADSTRNALNVLQRFKFLFNLPLNIKRNIQKGDYDVVINDYEKAKSLFGKTEVQVFKKCHPGPHSPMLDLDNDVRPSVLGHLSQTASLKRGSSFQSGRDDTWRYKTPHRVAFVEKLTKLVLSQLPNFWKLWISYVNGSLFSEKMIQEVMHSLVKLIRGALLPLSLREGDGRQLTYESLTALEIPNDMLQIIQDLILDLRIRCIMVTLQHTAEEIKRLAEKEDWVVDNEGLTSLPCQFEQSIVHSLQSLKGVVDCKPGEASVFQQPKTQEEVCQLCINIMQVFIYCLEQLSTKPDADIDTTHLSVDVSSPDLFGSIHEDFSLTSVSMASLKELDQRLFENYIELKADPIVGSLEPGIYAGYFDWKDCLPPAGVRNYLKEALVNIIAVHAEVFTISKELVPRVLARVVEAVSEELSRLMQCVSSFSRNGALQARLEICALRDTVAIYLTSESRSSFKQALEALPQLASGADKKSLEELLNKFKSSMHLQLTCFQADAVMKT

SEQ ID NO: 374 - DNA, 225587 bp, Homo sapiens
  misc_feature (1)...(225587): n = A,T,C or G
ggaggctgaggcaggcagatcacgaggtcaggaaatcaagaccatcctggctaacatggtgaaaccccatctctactaaaaatacaaaaaattagccaggcttggtggtggacacctgtagtcccagctacttgggaggctgaggcaggagaatagcttgaatccgggaggcagaggttgcagtgagccgagattgcaccactgcactctggcctgggcgacagagccagactctcccacagaaaaaaaaaaaagaaagaaaaaaagaaaaaaaaagaaagaaaaagaaaagtgcagtcatgggatttttgagcttaaagggatttttgagattctcctatccaactatcttacttttcaaatgagacaactggaactctcaagaggtcaaacaatcagggtcagtatcaggcaggatccagaatgtaaggtttggaattttcaatgtaatttttttttcaaaccaacagtcctatagtcaactcttgatttttcaggggctgtggatattttcatttcttcatttttagtttctcactgctaaacatttttattattttcttcaccaggtgtgaaaaaataaattcaaactcaaattaactggctatgttctatgttctcatctttgttacaagggctcagtcaggaagaacaaaggttcaggctgttggctaaagtgtgtcctgaaaattatcttcaatcctgcatgtactcctcgtcctttagtaccacagagagttcaaagatgagctcacaggaggcaactacctgcagggggcaggacatccagggacctccactggagtgtggccaggacacaactggtgggcactccggtgcatgccatcaccttcagaaattatagtgtgtgcctgagaggggaacgcagctcagttggcatcttaggggaaacctaccaaacacaaagggtgagaaatctgctgttaaggagtgaaaaatattttactgggtttgtgcaaaaccaagggagcaatgaaaaactcagataaaattcatgtcatgttagatcaaaagaaatgaggtataaaggacaggctttataccgcgtttcatatgcaaggcgatcctgatgctcctgggcagtgggaagccttcataaatgagtgtcagcaaggctcagatcctgcagcaaaggccagaggccagcaccgtgtctccctccgacgtgcagctgcagctagtgcttctgctccgggtggggtgatatgcctggacagcggaggtgcagagtggcaagccagcggctgctgccctaagactcagtccacactgcacaccatcacatcagtgggtaaaactgggaagatggtgccatttcccatgtctttcctattactgctgacatcactgacaaaatgcaaattggccttgttcccactgaataaagaggaccttcaaatggagaattccaaaagacaagacaaaacaaacaaaccaccccaaaacaaaaaatcaaccacccactcccagctagcaatttaagttaaaatgctatcatgcggtccgttagaaatccttcttttagaacataaagagatctaaatcctttttcacagaaaatcacataattaggttattcctgccctctgcagcacagggcagggctggcagggccgggagagaacccaggtcctcactaagcacagacattttcacattctgactgagttgttccctctctccaggtactgggctctcatatctctggcagtgtgtgcctctcctcaatttctcctttccttctggaccacctacagacacagcccactgccagagacgcccagatataaacacaggtgcaaaacacatctgcattattgtgctggatggcagcacggccatatggttggagtaacactattgtaataccatatccctgctgtagaaccagctttatttacaattttcttattaaaatatgcaaatagcaagtaaatagaaaaccacagagctctgttttgctgtaaaattgattggagacgtttgactattttaaggacttttgatatacagagctctgaatataaaaagctctgaagccaacataaaagaagatggttaagtccacttaaaggcatttgctaggagcacaccatagtacgattaaggttaaaacaaaaggatgtaaggggcttccttaactaataggtccaatccaggaattgctaaaacagagttgaaacttgcagtcctgcagaatttcaaattgtcctgtaatcctaaaacacagaaggctccagcaaagcatggcaatgctgggtggtatttggtgaaacatctcaatcgtccatttattgtcaagatgtgtacatatcaaattttgctgataattttgtgtctttaagtggccactcagcatattttgaactagacaactggacacaggcatctcctccaactctgttgctatcacaatgtactgtattcttatttttgtttttgaggcaacgcgtatttgttgagcatctattatgtgtgaggcatggatgagcattacagcatccctcctcttaagtttacattctagtgaggggagagaaacatttttagaaaacaaatagataatactgtatttacaggttgtggtgagtgctgttactgaatgggcagcctgatgtattgaataactgtgctaggaagctctgtggtatctacaacagtgaataaggcaggaatctgcaagcatggagttgagagcctgtgaataacagaagaccaaataatcattagtcttcagtaaaaaggatgtctaagatacagcaaattacagtagttttgagggttaggttctgtactaattatggcttaccacacactgatgtgccacacactacagaacacaaaaggtgttgatttaacattaaaaaaatctaagaacagggaattgtgtctctcctagtacttctaaagactgtttgcaaagggatttcatgcttcagagttattctttctctccaggtcaaacaaaacctgagacagaattgaaaacacaaagctatgcaacgatattcaatcgctctaacagctaccactgcaattttaggtttaatgattttatttgctgccaacttctgcatatactgcactaatgtttgctagctggctttggaattaggaccagaaatgtaagaaaaaagaaagaaaacaccaccagtactctttatgttaacaaaagagtctctttcctattctgagtgtttttgtttcaggaatacagtgttatttatttttttaatccaggaaaatctgtgtgttctcaaggcccatacatcctggcttaatggcaggatcacctaacctgggaaacggcaagtcaccgagacccagagggtttggtttcactgtaaagggggcatgccgctgccagggatttctcactttatttttttcaaatgctgccgccaagcctcagattcacatttcctagcttcccccttgctctttataattgatgacgctggggacagtcaagtgattgcatactggctgcacttcaacacatcctctgataaaaaggagaggaaaatgaagtcatgctagattccacatcacttttttgttccaggatgtacttccctaaaaagtgtgcaattcagcacatagatatttgaggctgggtgtggtggctcatgccatgggaggactgcttgagcacaggagttcgggactagcctgggcagcacagcgagatcccatttctacaaaaaacagcaacaaaaattacgcaggcatggtggcacgcatctgtagtcctagttactctggaggctgaggaggagcatcccttaagcccagtagttcaaggctacagtgagctaggatctcacaattgcaacccagcctgggtgacagagtgagaccctgtctctaataacaaatatatatatctttgaattgtaataagtataggttgttttagtctgtgataataacaaccttgactggattcccccagaagctgatccagggctagcatttcacttgggaggtgacagcaggaaagagcaggaggggagtggggaggccaataaaggtgtgctatggggcacttccccgagggagactggagcagctccctgggactctgccatgcaatggggcacgtgcaaccagccaagctacccccgccagggcatttacacaccaactctttgcctgccattggccgaggccttcttctgaattaactctctagggcttccagcttgctctgctccaaaaagaaatccctcaagcacaaagagagatgcaggtgttcccagaaagcagccttcagttgggggaatctggatgggcactgatggcctctgttaccatcctgcctggtatggcggatccacggctacagatctctgtcctggccctgattcctcatgatggtgtccagtcatactttactgggggaaaaaacccacctcaggagggtcaataggttgggctataatgcccactgctgcagttagttctaaggctacagtgattttcatcatcttcttccttaatcacccggctcggttctcttcacctgcagctagcacttctgtggcccaggctgcttcctcaacgaggtgacccagaccttcttccctgtgaggtctgagcccttggttatcattccttgtcaggccagggttgctgcattgccagtttactggtatcaccagccaaggaaaagatgcccagtgagtcccctgcattccagaaataatcctccctcccatttcctactcataaccaggaccaaattttgttgcctgggatccatgaggatcccaaataaggagaggcttttagatttagtgaaccctgtgtcacccaggagagcatcttcggcacatcccaggggccaggaccctggctactggggatgctgtaccatacactgatattaggctctgaatatatactgcatcccacagcacagcttccaactctgctggagcgttcgctgtgcctttgtggggccatgctgatgtcctatcagggtggcagtctggggtgtgcgatctatggtggaaccagtggagcttgcggtcacgtcccctctgtctgcctctttcgctcttacaagggtgcttggtccaaggtggtattatgggaaatcctgtgataaggcaagacattctgtaagcaattgggtagtcatgcctggaaggctctacaagcaaggaagacaaacccaaacccaaacccagaatatgcatctgggcctatggaaatcaacttgccaccgagagacggcagccaccataccatgggctgcccattggcctctacggctggagagggcagaggcattgtctagatctgcctttttctgtgggtccctgtagcctccaaccctgtgaatggccattccattcacaggcccattgtgcagagactgcctgacctgccctagctgaatcatcccatttgctctgtgctctgctgcggatgctgtctgccgggcaggcattcgtgtaagacacatagatgggccaaatactgtttgtgtgaggagcatgtgtgagttcttgagctgagaggctgtgatatccacagcatggttgtgcagctgcttcctggccaccctcctctccatccagctcttatgtttctccagcaggtctcctacctttgggaatttctgcaccaaaagcaggcacatactcttggtcacatatagtcctgagggcagcccaactccgccaagaactccacactgatgctcagctccactctgacagcagcaagcacaggctcgtgggtgcctcgagccaacaggtactaacccagattaaaacagctgagtgaattcctcataagctccaaaaggcatctaacccagattaaaacagctgagtgaattcctcataagctccaagaggcgtctaacccagattaaaacagctgagtgaattcctcataagctccaagaggtgtcttacccaattgctgggggctttcttttcttccttttcttttttttgacagcgtctcactccgtagcctaggctggagtgcagtggcacaatctcggctcactgcaacctccgcctccagggttcaagcgattctcctgtctcagcctcccaagtagctgggactacaggcacgtgcaaccacgcccggctaattttttgtatttttagtagagacggcgtttcaccatgttagccaggatggtctcaacctcctggcctcatgatccacccgccttggcctcccaaagtgctgggattacaagcatgagccaccgcgcccggccagggggctttctctatagtgcggggagactttagggtgaccatatagcgtctaaaaggaacacttttgacagtaaaaagggcactcaataattaagccatcctaacagacacaaatcagtcatcccacgcaaagtggaacatgtggtcaccttagttatctgccttctttgccagttcaagtggccaattccaggataaccagaaaaacccatctaaatatcctgtcacaccagcttaaaccccatgatcctgtctgatgttatttctctgcatagaacccgaactcctctgttccctgctccatcttctgtgtcaaactccaatctcagctacaactaattttctaactccctgcctgcactagagcagccaaaacaacacaagcaggccgactggttccatttgagacttaagaccacacatcccaagtgggcattctgccctccctggcaatctggctacatatccttaacaattcgccttacaatgtctaagttaacaatctcaccccttctcagtcctccctcgtccccaccccctgctcacagatgatcttgttggttcctttgttaacatagaagcaaccagaagagtattttctcactttctcctcaccatgtctaccaacccacagctatagcttcacattccgctcactctcctactacacagctcaactctggtggctcctaagaacaacctctgccctcgtgcaacaggtcctaccctctcttacctttctcaaagacttgctctgcagttgctccctctctcctgcatcagcggttccctctttacatgttttgttaatagctcccatcttaaaacagactttttccttgataccatgcctctctagcaactaccgcccatctctgctccctttgtcacacaactcctcagaggggttgtcaaagtagccagatgaaaatacagaacatccagttaaatgtgaatttcagatagtaacaatttagtatacgtatgtcccgtgcaatattggggccgtacttttactaacaaatactaaaactgtgtctggaattggtaagttcttggtctcactgacttcaagaatgaagccgcggacccttgcggtatgtgttacagttcctaaaggcggcgtatctggagtttgctccttctgatgttcagatgtgttcggagtttcttccttctggtagggtcgtgatctcgctggttcaggagtgaagctagagaccttcgcggcgagagttacagctcatagaggcagtgtggacccaaagtataaacagcagccagatttaccccaaagagcaaaaaaataaaacttccacagtgtggaaagaaaccggagcaaactaccactgccagctcgggcaggctgcgtttattctcttatctggtccccacccacatcctgctgatgattggtccattttacagagagccgattggtccattttacagagagctgatcggtccattttgacagggtgctgattggtgcgtttacaatccctgagctggacacaaaagttctccacctccccacgagattagctagacacagattttggacacaaaggttctccaagtccccaccagagtagctagatacagagtgtcgattggtgcattcacaaaccctgagctagacacagggtgcggactggtgtgtttacaaaccttgagctagatacagtgtgccgattggtgtatttataatccctgggctagacataaaggttctccaagtccccaccagactcaggaacccagctggcttcacccagtggatcccgaccggggccgcaggtggagccgcctgccagtcccgagccatgcgcccacactcctcagcccttgggtggtcgatgggactgggggccgtgaagcagggggcagcgctcgtcggggaggctcgggcgcacggaagcccatggcggggggggttggctcaggcactgcaggctgcaggtccccagccctgccccgcgggaaggcagctaaggcccggggagaaattgagcacagcagctgctggcccaggtgctaagcccctcactgcccagggccggcgggttggctggccgctccgagtgccggcccgctgagcccacgcccacccagaactcgcgctggcccgcaagtgccgcacgcagcccgggttcccaccagcgcctctccctccacacctccccacaagctgagggagccggctccggccttggccagcctagaaaggggctcccacagtgcagcggtgggctgaagggctcctcaagcacagccagagtgggtgccaaggccgaggaggtgcccagagcgagcgagggctgtgagggctgccagcacgctgtcacctctcaaaacaatgttttagtagaagtatatcccatgcaacattagtttagtgataaatatatctatactacaaattacttgttgtttatctgaaattaaactttactgggtatttgtatttttattgctaaatctgccaacctaggttgttgaaacttacttttttccacttcacttaatattcttttcacagtccactctgacgagatgtagcttccccacactcctttgaaactgcttttgtcaaggatgccaatgactggcatatgccaaactcaattgtctctggagtcttggcctcacagtacttctgaacattggctatcaattcctccttcctgaaactatttagcttccagaatccgctacccccactttcctgattgtccttcctccctggccatagcccctgaacccgagcttcccccaacctagagcatcccctgaccctaagtatccccccaaccctgagaaccccctgaccccgagtatcccccgacctcgagaactccccgaccccgagcatccccccaacccccagcatcccacgaccccgggcatctcccccgatcctgcgcatcccctgacctggtatggcgccctgacccagtgcagccctcaaacccctgcagccccctgaccccatgcatcctcctgacctagggctgcccctgactcaatgttgcccccggaccccagtgcctcctcctgacctgaggcacgccccccaacctggtacagtcccctgattccagtgcatccttctgacccagtgctgcctcctaacctggtgcatcctccttacccagtgtcgccccctggggatgcacactccagtgcatcctcctgacctgatgcttcctctggtctcggtgcagcccccctgacctggtgcagccctctgattccatgcattctcttgaccttgtgcatccccctgttccggaggggtcctctgacccgatgcagggcccatcgttgtgaactgtggcccacaaacgcactatcatcccacagtctccctgagatgacccgagggcacggggatggatggtgcacccggcctgccccttgagcttgtatccttctttccctccctcaccgcttcccgccaccgcaaagacgcccagcaaaaacctcctactcgtgtccattcaggcagctgggtccctcggaacccaaggcattccagcgtccaccgcccacggcccctgctgacctccagcacccgcgccggtctcctcccctcctctaccctcccctgaaggctccgcccatcgaggactcggcgctcgactgccaggcggatctacacgctcggcgctcgcggcgggcggaagtgaggtgccggcggctggcggccgcggagtcttcggcgagacctaccgggccctgtctgtgccggccgtgagctgcggcaggacggctggaggtatgtgtgggaggctggagggcctggccgaaggccagcgggacatggacgtcagctgcacggaggtggccgcctgcggcgtccgtccaggcctcagcggtgaagggacagccgcgcccactggcgccgtcggtcacctgcggggccccgcgaccccccgcggttcccagccccgcagcccccatccccgccgtcagccgcctgctgggctccccgcccacccccgccagttcgcacccccgcggtccccacctgcgccggtgaggggcgtgggctgcagagggctgactccaggccccgcccgctggagctggcccccgactgcgccgcttcgcccttgcgcagttgccactccgtgagatttgagaatttctccggaaaagtgaacgcgaggcgggtgttacctgtctgcctaggcgtgcatcccgctctggctgtcctgagcgcttaaaaggcgcctgccgctgttgtcagcgtttgcgtgcacgtacttgatcctcgcgcgggtgtatgtacgctgccgtgtgacccattttacggataggggagcggcggctcagagtgcttgagcaaagagcctgaggtcctgttgtagctgccattgagaccttgcgcgccggctccaggtccgcacaccagcagcctggaagcctggtgatgcgtaaccctgtatcccaagattgttaagaaaacactttagtaattccgagaaatagttcttgaaagaactcgtctttgaatggaagtaagttatttttaatctgccaaaggtcaacatactaataagtctgagaaattttaagtctgatgcctttatgaatctgtgagtaaacttacaaggaacacttaaaaaatattttttctaagttagccacactttaattaaatctttttgtgtgcactatgcaatattgaaaagttacttctgagcttatgtggatctgtcttctaatgcataataatgttttgtttatgaatgttagtatgtactggcccatgctttgtgtaactgactcctttaatgacaaatcaactgaaagccagaatcttctcaaagatgatttttttgtgctaaaagttggcgattcccagagtagtaatagaaagagggtgatgtgtgcttagtacttacatgttcacttgtttgtctaagtagaaacttaataaattaaagcagagaagcagagttcccccagtgtgacttggaccaactcttggaagttttagaaagtgatctttttttcttgtcaagtatttaatttcctgtattgaatgccattttgaactacagttgacccttgaacaacactggggttaggggtgcccacgcagtcaaaaatttccatgtaacttttgactttcccaggactttactaatagcctactgttgaccagaagccttactgatacataaacagttgacttacatgtattttgtatgttatacgtattatatactgtattcttaaagtaagctgagagaggaaaatgttaaaatcacaacaaatgtatttactcttctttaaatgaaagtggagaatcatgaaggttattatccccatagtctgcatgagtagattgtggaggaggaagaagaggagggattttctcaggaatggcagagatggaagagatggaggaagtgaaaggggagtgggagatgcaggcacactcagtgcaacttttgttgaaaaaatccgtgtataagtggatctgtctcattcaaacccatgttgcttaagggtcaactgtattacttttctaaaagatggttattaacttgctaagttcttgggagcccattatgtaagaatcatatgggaaatgaagttggtactgaaaaaatagtcttctagcaaagaacttttaatatttctagtgtcaagcagcagcaagattaggccatacaggaagtgctggttacagaggtgtcctctcagttacttttccactcattctccagtttacgcatcttaatccagcctgggttcctagtccagcgtctgccacatagtaggtgcttaaatgtttattgaatggatgaattttaggtcactgttgagaggattttgaaactgggaaataacattcattgatcactctgctaagcggtgtactaggatgttgattgtactcagatcctggggaatatgttcttggaccttctggactgcctgctgaaatcacatggtgatagtgtggacttctaatcatatgctttagagtatgtttatattagtcaaaaattattattgatatgaatacacaaacttaaaagtaattgtaatgaaattatgaatcttttttgtatttttaaagacagagtctcaccctgttgcctaggctgaagtacagtggcgagatctctgctcagtgcaagctctgcctcccgggttcacgccattctgccgcctcagcctcccgagtagctgggactacaggcgcccgtcaccacgcccgactaactttttgtatttttagtagagacggggtttcaccgtcgcgatcctcgtgacggtggacctcgtgatccacccacctcggcctcccagagtgctgggattacaggcgtgaacccctgcgccgggccgggaaattatgaatcttaaagcgatgggtgacacacgcatcggcatccttcaatctcagtttgtttattgattgaaagggggtcttgttctgtcacccaggctagagtgcagtggcacagtcacaacacactgcagccttgagcgccatgattccagaaatccttctacctcagcctcccaagtagctgggactataggtgcgtgccaccgggttcggctcattttaaaaattatttgtggaggtgaggtcttcctatgttgcccaggctggtcttgaactcctgaactcaagtgatccgctggcctcagcttcccagtgctgggactataggtgtgacccactgtgcctggctgatctcaatttgaaaatcacagagtcaaaaggtatttttggcttaggcgtcaaagcaactatacactggtccttggtctaatctggtctgcttcatagtactggctgagttgcttagatgctttggactgtttccttttttgtgtattcagagaatacatgcagttagattatctctgaaatccttcctgccttgaaattttccaactcagtgaatcctataaccacctagcacttgtcttatagcacttgtgttgtgttagggacaatattattaatggtgtttacatacaccagtaaaagactaagctcattctggatcgggattagttttaattatttttgtatcttccagtcttactgtatgcctgacacatatattaaaaatcaaataatattagcctggattcataaggggtatttttgccctctcaattaaagaatagctaagaactaaactctgtagtattgagtgtaagtccagcagaagctcagaggtaggaaggatccattggggctagagtaattgggaagctttgatgataagagcttgatgaaggaaggcgtgtgaacacctgggctgcataccaggagcaaaggcccaggggctggtaagtgagtgcattttggattatgggtggagtgccttgactgacaggcagaagagtttggaactgatttgttagacagttcttttttgttgtttgtttttcctggaaagttttattaggccagctcaaaagcttcctgaacatcctttaccttaattcccttggtagcatttcagattaaaaatacatcatccagtttgctttatttttgtttttgggtttatcagtttttctatgtaatattttccacagtaaatcttggtgccaataatggaacgaacactggacacaggactggggaagactggatttcagcttaggagaaggtgagctgctcagggtggatccagagagcttcaagactagtgcccggcacatcttaagcactcagtgacaagtgcagcgttgaaggcttttttccctttactgcttgctaacagtgccactttgcacaaggctgccccttcgtttcatttgtaagcatggatgaatttttaaaggccttttctcattttaaaggtttgtgattttggagggcatatgatttaactttcattgtattataattttagcaaaagacaaaacgagacaaaaggccatgtttggctttagtttaattttaatgaaaaccccatgtgaatgataatgatgtatgtctcagcaggaatcagaagtcatgccagatagctcaaatgaagaaaggtgcagaggggattagggaatatacaaggagtggtgaggagcaaagggaagctaacagtaaccagaaaggacagaaggagaaagtagggctgtctggaggaggatccgactgttgccagagaagtagtgctgggggctggaagagtaacaccgaactgcctcagtgttggaactggtccacttctgaaatccaaagtgcaggcctcccactgtttgcttatagtccctcaactttctcagtctcactcacccccactgcatctatcaggcgcttctgtgatcttcagtcactgtcatgccagtgtgctcagttgtatcgttgttgttctgtagcatctgcctggcagcttctcagccttgggcagtctcaactctctgcctcctgtaatgcttgacctgagttgctggggccagctgggaaaatcacagtatccagatctgtgcccctataaatccatggtcaccagctcagctgggccatcaaggaatcttccagaattttcctcatcagtacccgcttcttatctctgcagaatgtacttttcagcattttcacgcttttcgaacctttcatcctttcacatcatttacacacactcttagcaagcggtcttgccacctacatcataaatgaaagagatgtaagtggagaatcgcaggggcttcctgccaaaaactgttcctcctccccagtcacagtggaagaggttgtatttatgctaagaccaatctcctacctgggctgtggatcccatctaccccgcctttgtgaggacttcactcaggtgttcatgtcttactaaagccttccttctgttggcctttatacatgcttagagacagacaagaataaagtaaaacagaaaaaactagaatcctcccttgatttcacattgcccttttaaaattcctctctttttcactttcctgccacatttcttaaaatagttgtttgtagccaacttctcacccatcccagtgctgtctggtttcagctacgatcactctactgaaggccaaagtcattcttgagcttctggtcacaaaatcttgttcctgtcatttcttcagggtaatgcctgggacatagcaagtgtataataaacatttatttgactgaataaatccaaggatgtttccttttcacagccctagtttttctgtttttctggggtataggagtccaatactgtcatcttttgaggatctgggtgactagtcattgtatcgcaaatcatcttgacggactaggtaaagatacaaataaatattatttgaggataagttcagtggctcaatgcctgtaatcccagcactttgagaggccgaggtggaaggatagcttgagcccaggagtttgagaccagcctgggcaacatagtgaggccccttttctacaaaagttacaaaaaagttagccgagtatggtggtacatgtctgtggtcccagttactcaggaggctgaagtgggaggatcacttgagcctggatcacctgaggctgcagtgagctatgattgcaccactgcactccagcagcctgggtgactgagtgagaccctgtctcaaaaaaaaaaaaaaaaaaaaaaagaatattatttgataatgacttcttcaatcttgttcaggtgatctgtctttctgggaaaataaaaccctgacatctttttttctgaaaaactatacttcctaaaatactaagacttactgtttttatctatgcatatagatctaataagagtagtagggcattgggtactactggcaatagatttgtgaataaataatgctatgctcttgtatgaaactcttttgttttcctattaagtagtgtatcttctttgaagtttttgtcttcatttatttgttgggggtggatggagggggatgaatttgcactggcctggttcatttttgacatgtcatcaatgtccagtggcatcggttggaagtccagtcacctttagacctgcagcctttccctgtgcaacatagtgacagtccttgtcctctaggaggagacatggcatgctaaggcagagggctttatggttcctgggggaataaagcagacctctaagtaacttttccaattaagatagaatccagtgcttgttttatgagaacagctgagtaatccggtatgtatataacagatctcttttatgggggctctgagagctaagttgtcaggcattccctatatacttgtctggcttccagtattccttcctagtcatctcatgcacattctcgtccccttaatctctcacctccaaacattatagagggagggaaggcctttattcccattcccaaaataaataaataaaaatcaagtgtcatttatcagttatatggtttaaattattggattattttcccaaaagaattaaaatataaacaaatatgctttcatttgaaaccatagatagtagttcatgtatttttttgtttgtagaggtagagaaggaaaagaagtataaaaagaggtccaggaggccgggcgcggcggctcacacctgtaatcccagcactttgggaggccgaggagggcgaatcatgaggtcaggagtttgagaccatcctggccaatatgatgaaaccccgtctctactaaaaatacaaaaaaattagctgggcatggtggcgcatgcctgtaatcccagctacttgggaggctgaggcaggagaatcgcttgaaccaaggagtcggaggttgcagtgagccccactgcacttcagcctagtgacagagtaaaactccgtctcaaaaaaaaaaaaaagaggtccaggaaagcaggatacattaatacattacttcttacctgttcagtccaacctggcgacagagcaagactccgtctcaaaaaaaaaaaaaaaaaaaaaaaagaggtccaggaaagcaggatacattacttcttacctgttcagtcctccccttctgcaaatggcccttctgagacccagcgagtcttctgcccttatcaggccgtaactctatacaatttggcccctatgagttctttcagatctgtgcatgcttgtatttttgttaactatgatttggggatggagcaggaggagcaagaggattaatttggaaaactggattacagagttcatgaccctgtctctgagacttgtcccactgtgtgctgttatatggtagaatttgtggcagtgctaatgtaacttgcacttgatctcactcaggaagtgtggagtctgtgtttatagagaactggggaagaaaatcaccattttcccgaaccctttccccaatatctctgggcaatccctttgggtccagcccaacccagcccagcagggacaagtctgtcttaggttaggttgggcctgactctagaaagatttggtgaattctctactttgattatattttatggtgccctgagagttggctgagcctaattttactgttgaaactcactaggcagctctgcaacaggattcttctggggtcctctggacccaaagtggttctggacagctaaggctactgagattctgcttgatttgttccctggtgatgccagtgctgccaggttgaggcatatatggggaagggtggacgtttgggagggttgtgtgtgtgtgtgtgtgtgtgtgttttcaaatgattgtggggaaaatcacctttctatagtctgatctgttagcgaaatagtgttttcacatcatgaggccttccgtggcctgttgagtagaggttatcctagtcttcagtgagtcagaacttctgtatttttctggttcctggccttctctagctgagaagaacatctgggagcatgacaaggtgagaccgtgatcactcattttgttcagatttcttgtctgctgttgaaatcagcgaaactcttcattactaaatagtaaaaagtactgcttttatgattctaaaactactttcagttgtggtttcatttctgatttttttctttatattattactgctaactttttctgtgtatttttagtctgaagttctgtgaaaaatgacaacttactgtctttttttctagtagtaaatattttggaaaattaaaattgtgccacagttttaatttgagaaattaaatatgggaaaattatagaattaaaattttctgacttctgttgcagaaaacactttaaatccatccctgtgtgcttcattaaaggaaaagaggcagatggtttaaaattaatatagtatatctataaggaaaatgtatttacttaagtgtacagtataaattgtaagaaaatgtggccttttgtcttgattttagtgaaatgcttttgtaatagtaattttctcttttgacctgtgatggataggaggttaattgatgttaaatggatgctttgttaatccttcatcagctactaaattggtatgggggagtacaggtcaagactacacaaggccatgaccagcttgttttctcagggaggtttatggattccacccctcccccttctccaaaccacacatcactctctccagctgcacatagggaagactctcctgtctcccctccccctcttcctgcggtcctgtctccccctccctaacctcatccttctccctctctgggctgctgcagagtgacagcttgtagatgttgcgtgcgagggagttcagctggcgctgtgtggtccgagtgtgtggtctcccgctcagccgagaggctgctaacagggtggatgagagagagagcaacactgtttactttaatttatttcggatgccggaattgtgcccagagtttctcctgagcttgattccatagctagcagcttcaatccttcgcagctgcggtgcgttctgaactctgggctgtcctttcctgacaggcactttccatagcatctgcctgcttaatccctcacggctcagaaatgttaacggcactgttgagtgctgtgattattttgctttcactatgtcaagatttatggccttcgagaagcttcttttgagatagagctagagaaggaaagcagaatttgtaagatcagtgacaaagttgatgtatttttggaaattggaaaagctattatacaaaatttgggtcaaattaatccaactttgctcatataaaagaacctgggagttagcgacatcctgtcatgtttaacagttttaatgaaattaaccaatttaagctgacggttttcttgaccttttctgaaactctgcattgattttggcatgcctgtttaccatagttattatatttgtcagcggtgatattggtttatttcatcctaaagatttgacaagtcgagacaaatgaaactttgtttttatgtagtagtataaatttaggagaatatctttttatccaatcctttcattatgaatagcttagtaatattttcttgattttgttcctctctcattcctgaacattattgttgagatggtcaagtattttgttatttgaataaacatatgtagactcttgatatcacttgggattttgcattgtttagcttctttattttcatgtcttcctggcagtcttgctggaatggagttggtggtgttgatgtttgtcaaggattagaaagtctaggccactcacatcttcccgcaaggtcagtctgtttagcttggagttgttctgctgctttatttgctactcttcaccctgggtttcaatacctgagctctgtttccatcactgcgagggtaaagctttctcctaccctcctggtaccttttcactcctcgccctggtgtacctttgcctcaactgatctggaatcagacttcaggaatttagtcatgttgggcactttttaaaaaatgataccatcctgtatttctttttgtgttcagttttttggggttctgtgtttatggtgctaatgatgttaaactaatgctcagaggaattctgaagcacagttattcacaaagttgtacaaccatcaccattatctaagtccagaacagtttcatcacacccggagaaaaccctgaatccattatcaatcctttcccactttctgcatccatggatttacttattctgaactttcatataagtggaatcatatatgtggccttttatgtcaattatgacataatatatgcataatattgttagtcattactgtatgacttttacctaggaagtgaaaattctttggagagagagagagaggaaaaaatactgataaatgatggttatagttaagtaatcatgtgtggaaatgaacttgtattttagaaactcggggccgggcgcggtggctcacacctgtaatcccagcactttgagaggccaaggcgggcagatcacgaggtcaggagatctagaccatcctggctaacacagagaaaccctgtctctactaaaaatacaaaaaaattagccgggcgtggtagtggttgcctgtagtcccagctattcgggaggctgaggcaggagaatggcatgaacccggaaggcagagcttgcagtgaccccagatcctgccactgcactccagcatgggtgacagagcgagactccgtctcaaaaaaaaaaaaaaaaaagaaactgggaaatatttaataggaactgcggaatggtcaaggcttgtgttggatagaagtgccctatgtgtgactggctgttagtcaccagcacttttctgcagtgctgtgtcatgcaggttcctgttcccagcccttctggagtttcaccaatgccggtgctaattggttgtttaaaattcgatgtagaactctaaatgaataaatcctgactgaacagattccctccatttctaccttagcttttactgggcaaaatcctccaggagttagcagtgagcaggaaaaggaccagggttttgctctctggtaactaaagggggaattatcctccagagcagttgattctcttgcaagggcagagaagcaaagtatctgtagaaccacagtaccttgacagcactttaaaaaccctatttccaagtgcatttctgtgaaaacaaggttatctttaagaaaaagattactacctttatttgcacttttcattagaactgaaaagttagaattgttttatatattctcagtactatcccattctcttttatggctggattttttaaatggaaaaatcaagcttaaatgagttttggcctagtttttataggactaaaggatagttgaaaaacaagtttctctggtaactttcattataaatatcttagtaatattttaaaatttattaggggcaaaattcattttggtttaaacatttaaaatacttctttggtggggggagaaaggagacacagcattaaagatctgcacctacaaattagaatttctggttttcgtgtaattctgtgtggaagcagtaatagaatatcaaacttttcacctcttggacctttcagttaaaggtcagatttgaactggacctcttgtcacccagaggtgaccgatagaaaaggagttgttctgcttagatgtttggttaatttggatttatctgattgttttccttagcatgaattgtattgaagatcaggaggagctgtcacaggttgattgtgaccttttaggatgtaattagggcactcaggttttatagtggttttggcagttgctcttgtgaccagatttattggtttaaaagacagtgcatggcacacagtacagaatcaaggaatggcatctgtcctgtgaaacaaatctagctgacacccctctcagaagccgcatcttatagcttcttatggcaggaatttcacacagccttttgaggtctctgctgctgttgttgaggagatgaaagaagagcccgtgcatccccagatctggtcagcccggccaccgtttcactgagtgtctggcactggactagacactagagtgaagaaagaatatgatgacaagcccaggcaagcccactgaagattgctggcagagagcttggcacagtaactttttttcatccctttttctttaatgtaaaggatactatcatttgttataatcactttcttaagatagttaatttacaggagaaatgagcaccacccccagcccaaaaaaatgcatgtaactcagagctgccaagaggaagcctcatgtggtcagcgttcttaaggagaccctctgctgcctggatctccagccagcagctgccctgcagggctctggaagtgggctattctgtgtggtctaaggcctacctacgtttctaaaacatgtatatacatgcttattgccacagggaaggcaatgtaaaaatatttaaaggcacaatttccctggcccctccacccttctccaatctcattctcaggataattgacccctggtgtgcatccttctagccctttctctgtattcatataagcataggcccttgtttgtataaaggtagcttttgttcttcttttttaaatggaaacattgattgggtcctgattctaacacatcaactgcaaaataacttttagaccatatgaaaaaattgacctggggctgggtgcaatgtcatttgtagaggtacaaactaagtcatttatggatgaaatgatacaatgctttaaagagctccctcaacaaacaacatgaaagtatgttgaaggggagaggcagctaaaacaagacacagaatgttgaagctgggtgatgggaacttggaggttccttatgctagtctctcttatgtatgtttaagatttccataataaataaaaaaaaaaatagtcatccggagtatagcatagagcaagggtctggttttgaatcccacctctttcacttaatagctgtgatttttgacaagctattgaatctctgataatcctacccttgttaataaaccatttggcattttagaatacttccttctaggaactttttctgtacatctgtctgttcatacctatctgcctatttatttattcgtatgtctttctatttcgctaatttgttgtaagtattctcttggtttcgcatgtttttcataatgtttcactggctgcatagtttccttgactgaacctttacattttactggatgttttggtggatgtttccgttttttccccgtcttgctgtaatacatttttgcagttatgggaatcttcatgcctaatagcaatccccatggtttgaattattttagtcattgttcacttttcaagaatacattttgagtcaaactgtggaagcatgtctaaggctttgacacgtggccgaattatttttcagagtattggaacagttgtgctgctgccagcgatccgtgggagctgtgtacagattcagccgacaactatgagccttcgagatcatcttaaatatcttgtgttgttaataggccagcggtggaacctcttttagttgatgtttctctgaggttgggttttgtctttatgttccttggttggttgcatctcctctcttgtgaactgtaagcttataccttctcaatttttttttgaagctcttggtgttttctggattgatttttgtgagctgtttatataataaagttatttgtattttgacattttgaatatatttgcagacttcctgtttggctttcaaatttcttatcttttatttattaacttatagaagatgtatatttctttatggctaggaacttagtgtgttcaccgttgtgatttttctgtcaagtccaaatgttgtccttccaccccaacagctgtaatatacacttactttatgttcttctagtttttttaatatacatataattaaaattatatgtatatttgactttttacatcaccaggaattctttaactctatagatgtttgaagttatgtaagcaagaacattatgcttttggagtgtaactgaaacatttctgggattggagttaatatgctaaaaattaagaggcaagaaaataaagcagtagtttgtttagaataaaattcagcttaatctttggctgtcctgactacggcccatcatcagtgtttggaattttcccaccgtgttatgtagtgcagtgctgtggctttaaagaagcacttccccctgttgccctggagccccatgccctggttctgggaggtaatcacgattgtgtactgttactatattgtgtcagccctctctgcctgctgctttcatctttcttaagttatgcagcacaaatcttagaatgtttctctattttttctaattaaaatactttctatcctaaaacaattgaggaccattctcctagaaggttgctcacccagtctctggcgtgtcagcgcagctaatgacgcacctggcccacgaattcacttacagttggtttttgatgcatgaatggtagcaatactaggttacttttattttggcctttaaagtttgcagagatctttggtacacatgattccatttaatccttacaggattcctgtgacattagttattattcctattttaagatgagaaaactgatagaaattaaagggacctgaataaatcatatagttaggatttgaatttctgccttctgactcttggttaagtgtcttttctccctctccatggctgaacaagttgatttgtctggcaaaagtgtgctgttaatgacaccagtgttctttaccccatattggtcaatccactttgcactgattaaaaactgttggtcatgtccttcgtgccagttagcatctctcattgcgtgctcacggtcacactgaagaactggtcagggagggaggcactttggggaaaacagttcttttgggggacccttttcatatgtgagtgacaacgtgaagagtgtgtgtgtgtgtgtgtgtgtgtgtgtgtgtgtgagagagattataagcacagcccctgatgcaaactgcctaggtgtgattcctgctgtgatagttattggttgtggagtattggacaaagtatttaatgagccatcctcataggagagttctgaggattaaaagttattgcatggcaagaacatagaaaagtacttggataaggctgggcgcagtggctcatgcctgtaatcccagcactttgggaggccgaggcaagcggatcacaaggtcaggaattttagaccagcccgaccaacatggtgaaaccccatctctactaaaaatacaaaaattagtcaggcatggtggtgcacgcctgttatcccagctactcaggaggctgaggcaggagaatcgcttgaacccaggaggcagactccatctcaaaaaaaaattaagtacctggataaaataagtcatcaatgtttgcttaatatctaagatatattatctgttgattgatggctagttgtgtcctaatgtaattggtattgtttctgattttatattgaaaaatattttaaataaaggcaagagccatgtttattcctacatataccacctcaaatgctaactgtgcactaaacacaaaaacttcaacccactaatgaaggggtcaaaatccctataaagtgtaatatgggaaaccacagagtcgccaggggaacctgtcctttccgtaatgttgaagagtatggggaaccgcagagtcttcagaagaacctgtcctttctgtaatgctgaagagtatggggaaccgcagtcgccagaggaacctgtcctttccgtaatgttgaagagtatggggaaccgcagagtctcccgaggaacctgtcctttccgtaatgttgaagagtatgggaaaccgcagtctccagaggaaactgtcctttccgtaatgttgaagagtatggggaacctcagagtctccagaggaacctgtcctttctgtaatgttgaagaggtttaaagcaatgggttgatggggcgcccatttcttttagaatggagaacacgtctcttcatgtactcctgcatgtctgcgcactatcactgaccttccttgatcatttgaataaatgaaaaagaaaagcaaaaaacaatgctattaccatggccagttccccctaaagtacttaaaggagttgagaatttctaaatgttttttgctttctttcctccacccccagcctgagagtctcttttttggtgaagagcgagaattagtattgagtcacagtggctcagaaaggttgaaaagggaagacttttaaaatgtaggttttattatcaacaagcaggataagattgttgttgaaaattgtgttactcacagttccaagagggtgggcaagccgcaccacacaggaagcactgggggtaggtcaggaggcagagggagccagggaaagcatgggccagaccctttgttatggttttcccgggaaggaatggctaggcagggtaggcaagctgagcaagtttaggattggatcatctgaataattttttggagggctctgggctgtaggagtggtccctagttggctggcacctggggtatgtagggctgggggcagtgtccctgattggaggagcctaattgaagggtattcagaccaggcaagtagtttgtgacctctaggaattagccagttctcagaggggcagtcccttccctggtccacaggctccaaaatgtcaaagcatcataaagcactgacaacaaacaaacaaacaaacaaacaaacaaacatggttaatacaagggccaggactttttgtaccacagctttaggatttagtagcagagaggagaaaagatcagtacagtagtgtttcttattgccaaggagaagaggcataaatttgacctagaaaagagtatgagaaaaagcctttacaatagcttactcatttctcccagcaatttttgaaattattgtgttttgcacattttctttgtttccaacatagcttaccctcattattactgcaaggctttgagaagtgttcacagttcatatttagtacaaggtaatttttttttaacagggtacatgaacttttttgaggaaacatgatccaaatgctagctagctgaaagagtaaatagtcacttccaaggctaaacaaattctgtctttatttttttttatagaattattgagggaaaggaagtaatcatgtcagcagtcttcatcattcatttggaaccaacacttgttctgtaattatcatggcaataaaaaactcattttggccttatgtattttggtataatgattcaaatttggctaattgcatgagaattatgatcaagttggtatttttgcttaatttctagctcagagtttgttagttttgttattctttgaaccaagcatcgtaatataaaatttgattgaaagtgttggtagttctcaatttctcatttttggattattaggggtttggagagttttcagtcataactcgcttaattgcagttcgctttattgtgccttgtagatactgcatttcacagataatactttttttaaaaaaagcaaaatgaaggtttgtggtaaccctgtattaagcaagtgtctcagcatcatttttccaacagcatgtgctcacttcatgtctctgcgtcacattttggtatttcttgcaatatttcatactttttaattattatatttttaagttcatttgtgtttcatattgggaaggcaaatacagatgagagagatccctgccaaaatagtaaaaagttatatattttttgagttttgaagtgtaaatctgctttgtttggaggtttcctctaggcagaacccctccttgccgatggcatctagtaaatgaggccttggtgcattatgctgtacttctgaaaacatagatctcaaaatctgtactgttagaaacgttttcgctcctcctcaccctaaggaatctgttattccaagaaatagaaatcttttctgtttccagatagtttaaaaattgcactttatatttctgaataaataaaatatatgactatacactgctgcagtttcatagcttaacttctgttaagccaaatactgttgaggcttaagtggtactaatttaatggaacactaaccagtgcaaataaaagacaattgtattgttatcttttttcttagataaatgtgaattttttttttttttttttttttggctatggagtctcacttttgtcacccaggctggagtgcaatggcgcgatcttgcctctgcaacccagattcaagtgattctcctgcctcagcctcatgagtagccggtatcccaggtgcccgccaccacgcccagctaatttttttgtatttttagtagagatggggtttcaccatgttggccagggtggtctcaaactactgacctcaagtgatctgcccgccttggcctcccaaagtgctgggattacagggctgagccaccgcgcccagtcatgaattttaaaacagagtctacaaacttaatgaaatttaccttatcgtttagatcacatacactaaagctctgagtaaattgtaaaatgtactttaattttataagaatgcaacttacttatgtaaatattgaaaacaaagctcttgcagtttctggtcagagatgtaggagcttggaagtcaccactcgaatcctcacaataaggaaaaagctaaacagactgaaaatcagcaacttcccttatatccctcagaaaattgaggccacaggataaggaaaaagctaaacaaactgaaaatcaacaactttccttatatccctcagaaaattgaggccacagggtaaaccactgtcccctaaatgggagagacaacaggcagatacagagcatcccaacttcttagtgcagaagcctaggaatggaagtttctgtgggaaaccagtattgagttgctttaaccaatacagcatatccagctttgaacaaaaaattacacggcagaaatgaaagacaaaaaccacattttgaagaaacagagcaagcattagaaccagattcaggtatggtggaggatgttagaatgatcaaaccagcaatttaaaacaactatgattatatgctaagggtcctaatgggaaaagtggggaacatgcagcagataagtaatgtgcacagagagatggaaactttaagaaggaatgaaaaagaaatggtagaaataacactaacagaagagaagagtgccattgatgagcacatcagtaggccagacatagctgaggaaagaatcagtgaactggaagaaacatcaatagagtcttcagaaactataatagagaaaaaaggtggaagaaaatggaatggaacagccaagaattgtgggacagttacacaaagtataatgtatgtatagtgggaaccaagaaggggaaggaaaaaaataacagaagaaatatttgccgtaataatggctgagagttttttgtaattaatgatagtcccagatctggaaagctcagagaacagtaggcaagcaagtaccaaaaaataaataaataaataaaaaataaaaaatctacacttagcatattgtattcaaactgtagaaaaatataaaaaatactgaaggatactgaaggaagctggggttggggatgagatggacaccttacataagggagacaagaatggaaattacatcagactttttttcagcaaccatgcaaacaagtaaggaaaaaagacccacctacatagaattccgtatccagtgaaattatccttcaaacgtgaaggagaaataaactttttccagacgaaattgaggggatttattgccattagatttgccttaactattaaaagaagttaaaatgttaaaagttgttctttagggagaagcaaaatgatataggtcaaatacttggatctgaaaaattcaaggatgaattttagagaaggaataaatgcagtggcttctgggttccctcccctcaggtcctggcatctggcaccatgcccagcacctacaccccacattcatgctgaatgatacggatgtggaatgtaatgaattgttggcttaaaaaacaaatagtttttctttttttgttttttttttttgttgttgttgttgttttgagacagtctcactctgtcacccaggctcggctcactgcaatctccacctcccaggttcaagtgatcctcctgcctcagcctcccaggtagctgggactacaggagtgcatcaccaagcctggctagtttttgtacttttagtagagacgggattttgccatgttggccagactggtctctaactcctgacctcaagtgatttgcctgccttagcctcgcgaagtgttgggattacaggcgtgagccaccatgcccagccttaatttttttttttttttttttttttgagatggagtctcatgatgttacccaggctggtcttgaactcctgggcttaggtggtccttctgcctcagcctcctaagtagctgggactacaggtgtgcaccactgtgcctggctgaaaaagacttactttcttgacctacagttgcaacttctacatttaaagctaccccaatggactcatggaagagaggaatttattccagagacttggcaaaactctaaataagaaatgaaaatatgtctttctctcagctctatagatgttaataattaccttattgtgtcttatgcaacagaacattttcttatgtgatgcgagttgtggcatcatttttgagaccaatcattcagagattaaagagaaaggaattgaatattttcagtgtagacactatgagtttttaaaagtcaaaaattattacagattttcagactggaaatgaaaggtcactgaagcattctgtggatttaatttgccatattgaaaagtattgatcactttaacctatgtgaacagaaagctgtttgaagtcctccttcccttttttttttttaaattaaaaaaagtaaagagttcttcagaccaaaaatgagaaaaccacagtggattatcctcagctgtgattggtccatttcttgctgtgacctcagtaggagtcattattgtaaaatgccaaacacttattttcgtccctggctctgcctaaatttttggcccaaggcagaatccaacagatagtactgccaccagaaggggatcctgcacagggacatacagccaaagaacctgcttgtgtggatgctgaactgaacctcacgtttgcagactttggctttagcaacgagctcacctttggcagcagggtagataacttctgtgtcagtgcttcttacactgtcctggaactcttctaggcaacgtacgcaaaagtacgatggctctgagatggatgttggcagcctgggagtcattctctgtgcagtggtcggtgatcatcaggtttctgtcttacaatggacagaactatagcagagcttccaaagtaggtatatatcacattccctttacatgtctatggagtatgaacacctaaataaattcctgctcccaaaccccagtaagagaggcactgcagaggaaatcatgagggacccatggataaatgtgggctatgaagaggaactaaaactacatccagccactccctgactccagggatccctggcacactgagttaatgctgtccttgggctacatgtaagggaaattctggactcattgatgggctacaggacacctcagctggagggccacaccatcactgtgaagtcctttccttagctgatcccaccaactgttgccatccttctccatccttccaggtacagcctagggtctctgccagcccaaagcagcgagcctgctcttcccacattttctttttcctctaatagaaaatcagtggcttgaggaggatcaggagtcaggttgaaaggccagcagaacagtcaaagtgcctgccagtcttctgcctcaccttgagatgaagactggcccagcaaagcctccagcatggccttgtggcctccccctccacccacagcaccagcagcagtggtggaaccccagacagaatcaactgttcctagggtgtgtcctccaaaggagaactcccttcatactgtgcagctttggttaggaccggcagaatttgccagaatgtataacctcagccattccctctcgcaacattcagggctggcagggggccacaggaggttccttatcttcatccacagacacctgtgtttcaggttggctgggaagatctggcatgtagctggaatgtggggagttcaagctgtgctcgctgcatttcacatggagcaggaagatcctgagctccatggagtccaaggacatggtgcaggagatcagccgggtgtgggatgcagacagttgcaggtggtaatacttgtcctcgaggagcaaacataccagttggaggttcattcataagcgtttattccgcaccttcatgtgcctagcaccaagtaagtaaaaaagaaatacagtcagctctccatatccatgggttctgcatggacagattcaaccaatcacagatggaaaatattcagaaaaaaacaatgcagcaataaaaaaacaacaaaaacaatacagtttgataacttacattgtattatgtattataagtaatctagagatgattagtaatctagagtatgctggtggatgtgtgtgggttatatgcaaatactatgcaattttatgtagggaacctgagcatccccagattttggtatccacagaatgccttaggaccaattactggtagatcccaagagaccatagtatctctacttttactggctgaatggtagagataagtatacagggggtacgattaatccaacctggggctgagggaggttaggttgttggaagtgaggtgagggaaggtgtagcttcccacagaaagtgatgactgaatgggtgaatggtggaagttagttggctaagaagcaggtgggatgggtgttgagggacctaacgctgagtgtgacagaacgcagatttcagcagtgagcacagggctgtgcaggcaatgagaacagcacttctttcacctggaaggataggacagaagaattaagttctggaatgctggaggccaacagagggagaaagcatgcgtcacccagaagacagtgtgggagacaatgaggggactgtaggagagacatgatggaggcacagcatggctgagtatcttcctgggcatgacttaaagcattaatgcctaaaaattttccaaaattaataataggcaactatccatagatcctgggagcccagagaacacggagcaagacaaataccaaaaaatctacactcagacatatcctattccagttgcagaaaatcaaaaaccaatagaaactcttgaaagaagcacctttctataggggagcatagatcagagttatatgagatgtctcttcagaaaccatgcaaggaagaatagagtggagtgaaataaagtgctgaaagaaaaaaacccagtgtattagggctttccagagaaacagaatcaacaggatatggacggatggatggatggatggatggatggatggatggatggatggatgggaggggatttattaggggaactggcttacatgactatggaggctgagaagtcccatgacaggcgtcggcaagccacagaatcagagaagccagtagcatggctcagtctaagtttgaaggcctcaaccaggggagcccgcagtgtatctctcagtctgaggccaaaggcctcagaacctggggggcaggggtcactggtataagcctgggaatccaaagctcagaagaccgtggcattctggtgattcaagagcaggaaaagatgggtgtcccagttccaaaaaggagagaatttgccttttctctgcctttttctttgatcaagaccctcagcggctttgtggtgcctgctcacaatgggtgacaacagagctttcttacttggtccactgattcaaatgccagttacttccccaaacaccctcacagacacacccagaaataatgctttaccagctcagctgtctgggtatctcttcttccagtcatcacacttaccactgtcaaatcctgtatacaaatgaaattacccttcagaagcgaatgagaaatactttctcagataaacaaaagttgaggaaatttgttaccagtaaaccttccttgtaagaaacactaaaagatattcatcaaaaaacaacaaagtgataatgatgtagattagaaactcagatatacatgaagaaaggaggagcattatagatgaatgaaggtaaaatacagtttttagtttttcttattaattgatctgacagacaactgtttgttctgaagaataacagcaacaaaacttacggtgattatagcttatagataattaaaatgaatgacaccagtgttgtaagggatgagaagaagaaagtgggaatactttgttataaggtacttccactatccatgaatgggaaagtgttatttgagagtgaacttggtttagttgtaaatgcatattgcaaactctaagatagccactgaaaaaaaaattaaaaaaaaaagaacataattgccatgctaagagaagagggaaaatgggacttttaaggcagtgaaagtattcagtatgatactgtaatgttggatacatgtaatgataagttatacatttgtcaaaactcatagaatgtaccacacaaagagccccagtgtaaactatggaacttacttaatagtatatcagtattggctcctcagttgtaacggctgtgccacactaatgcaagatgttaataacagaggaaacaggagggagtggtagtgaaggggtatatggaaactctaattttgatttaatttttctgtaaacttaataaaactgctcagaaaaaaaagttgtaaagtgccaaaacaaaacagtaaagcaccaagtttcccaattctaaataataatgttaatttaatagacctaaattttctggaaattttctggaagggatgctgaccagtttttgaaattcctgttgtaaacataagtaacatttgaatcatttgctcaattttgcatcagtatgactgccgtggtgaagatgcctttacatattttccaatggttttgacttttcctcctagtttttgatatattccagtcaatatgaggaaaataccagtgctggaaacaagagaagtgtcttctacatctgaaaattaaggagttacagctaaaaatgtttcatgtgagaatggagaaaggatgctgacttgccatcacctaacggattggcacactctttttgtgaagggcagtgtagtagtttttggccatgaggtctcagttgctattactcagctctactcttctagtgagaaagcagccttagatgacatggaatcaaatgaatgtggctgtgttctgataaaactttattcacaagaataggtagcagaccacatttctcttgatgactataattttttgactcttatttttatttttattttctgtaagttattggggtacaggtggtatttggttacatgactaagttcttagtggtgacttgtgagattctggtgcacccatcacccaagcagtgtacactgcaccacatcctgtagtcttttattcctcaaccccctccccctcttccccccaagtacccaaagtccattgtatcattctcatgcctttgcatcctcatagcttagatcccacatatcagtgagaacacacgatgtttggttttccattcctgatttacttctcttagaataatagtctccaatctcatccacgtcactgcaaatgctattaattcattcctttttatggctgcatagtattccattgtatatatataccacagtttctttatcagctcattgattgatgggcatttgggttttccacgattttgcaattgtgaattgtgctgctataaacgtatgtgcaagaatcttttttgaatattcagttatttccttctgggtagatacccagtagtgggattgctcgatcaaatggtagttctacttttagttctttaaggaatctccacactgttttccatagcagctgtactagtttgcattcccaccagcagtgtagaagtgttccctgttcaccgcatctacaccaacatgtactggtttttgatttttcgattatggccattcttgtaggagtaagatgctattgcattgtggttttgattggcatttccctgatcattagtgatgctgagcatttttttcatatgtttgttggccatttgtatatcttcttttgagagttgcctattcatgtccttagcccattttttgatgtgattgttttttttcttacagatttgtttgacttcattgtagattctgggtattagtcctttgtcagatgtatagattgtgaagattttctccccctctgtgtgttgtctgtttactctgctgtttcttttgccatgcaaaagctctttagtttagttaggtcccagctatttatctttgtttttactgtctttgcttttgggttcttggcatgaaatccttgcctaagccaatgtctagaaggggttttccaacattatcttctagaatttttatagtttcaggtcttaggtttaagtccttaatccaccttgagttgatttttgtataaggtgagagacgaggatccagttttattctcctacatgtggctagccagttatactagcaccatttgttgaaatgggtgtcctttccccactttatggttttgtttgctttgtcaaggatcagttggctgtaagtatttggctttatttctgggttctctattcttttccactggtctgtgtgtctgtttttataccagtaccacactgttttggtgactatggccttatagtatagtttgaaatcaggtagtgtgatgcctccagatttgttgtttttgcttagtcttgctttggctatgcgggctcttttttggtttcatatgaattttagaattgctttttctaattttgtgtagagtgatggtggtaggattgcatggaatttgtagattgcttttgacagtatggtcattttcacaatattgattctactcatccatgagcatgggatgtgttttcatttttttgtgtcatctacaatttctttcagcagggttttgtagttttctctgtagaggtcctccgaaagacctgtttttggttaggtatattcctaagtattttattttattttatttttgcagctatagtaaaaggggttgagttcttgatttgattctccacttggttgctttcgctatagagaagagctactgatttgtgtacattaatcttgtatctggaaactttgctgaattcttttatcagttctaggagctttctggtggagtccttagagttttcaaggtaaacgataatatcttcagcaaacagtgacagattgacttcctctttaccgatttggatgcctttctttctcttgtctgattgctctggctaggacttgcagtactatgttgaagaggagtggtgagagtgggcatccttgtcttgttcccgttctcagagggaatgctttcaacttttccccattcagtattatgttggctgtgggtttgtcatacatggcttttattacattaaggtatgtctcttgtatgtcagttttgctgagagttttaattataaagggaagttggattttgtcaaatgctttttctgtgtctattgagatgatcatgtgatttttgtttttaattctgtttatgtggtgtatcatatttattgacttgtgtatgttaaactacccctgcatccctggtatgaaactcccttgatcatggtggattatctttttgatatgtcactggattcagttagctagtattttgttaaggattttagcatctatgttcatcaaggatattggtctgtagttttcttttttgttatgtcctttcctggttttgatattagggtgatgctggtttcatagaatgaattagggagggttccttctttatcttgtggaatagtgtcaaaaggattggtaccaattctttgagtgtttggtggaattctgctgtgaatccctctggtcctggacttttctttggtggtaatttcttaattaccatttcaatcttgctgcttgttattggtctgttcggggtgtctatttcttcctgatttaagctaggagggttatatttatccaggaatttatccatctcttctaggtttctaatttatgtgtgtaaaggtgttcatattagccttgagggatcttttgtatttcagtggtgtcagttgtaatatctcctgttgcatttcttagtgcgatcatttggcttttctctcttcttttgttggttaatcgtgctcatggtctgtcaattttatttatcttttcaaagaaccaggatttgtttttttttttgagacaaagtcttgctctgccacccaggctggagtgcagtggtgtgatctcggctcactgcagcctccaccttccaggttcaagcagttctcctgcctcagccttgtagaaccagctttttgtttcatttatcttttgtattttgttggtgttttttcaatttcatttaattctgctctgatcatggttatttccttttttccgctgggtttgggtttgggtttggtttgttcttgtttctctagttccttgaggtgtgaccttagagcatctgtttgtgctctttcagactttttgatacaggtgcttggggctatgaactttcctcatggcaccacctttgctgaatcccagaggttttgataggttgtgtcattattgtcattcagtttgaagaattttttaattcccatcttgattttgtttttgacccaatgctcatttgggagcaggttatttaatttccatgtatttgcatggttttgaaggttctgtttggagttgatttccagttttattttactgtggtctgagagagtgcttgatataatttcaattttcttaaatttattgaggctcattttatggcctgtcatatagtctatcttggagaaagttccatgtgctgttgaatagaatgtatattctgcagttgttggatgaaatgttttgtatatatctgttaagtccatttgttccaaggtatcatttaaatccgttgtttctttgttgactttctgtcttgatgaccagtctagtgctgtcagtggagtattgaagtcccccactattattgtgtttctgtttgtctcattgcttagatctattagtaattgttttataaatttgggagctccagttttagtgcatatatgtttaggattgtgatattttcctgttgaataaggccttttaccattacataatgtccctctttgtctgttttaactgctgttgctttaaagtttgttttgtctgatataagaatagctacccctgctctcttttggtgtccatttgcatgaaatgcctttttccacccctttactttaactttatgtgagtccttatgtgttagctgagtctcctgaaggcagcagattgttggttggtgagttcttatccattctgtggttctgtatcttttaagtggagcatttaggccatttactttcagcgttagcattgaaatgtgaggtaccattgctttcatcatgctctttttggcctgtgtactttttttttgtttgtttttgctttgtaacgtgtatttttgttataggtcctgtgtgatttatgctttaaagaggttctgttttgttgtgtttccaggatttgtttcaagagttagagctccttttagcagttcttgtagtggtggcttggtaatggtgaattctctcagaattggtttgaaaacaactgtatctttccttcatatatgatgcataggttcaatggatacaaaattctttgttgataattggtttgaggaggctgaagatagggcctcaaccccttctagcttatagggtttctgctgagaaatctgctgttaatctgataggttttcctttatagactacctggtgcttctatctcacagctcttagtcttagctctttccttagtctgaactgtgtataacctgatgacagtgtgcctaggtgatgatctttttgcaatgaatttcccaggtgttctttgtgcttcttgtatttggatgtctgggtctctagcagggctggggaagttttccatgattattccccatgttttccaagcttttagaattctcttcttcctcaggaacaccgattattaggtttggtcatttaacataaccccagactccttggaggctttgttcatattttcttattcttttttatttgtcattgttggattggttaatttgtagaccttcgagctctgaatttcttccttctacttgttcatttccattgctgaggctttccagagtattttgcatttctaaaagtgtgtccaaagtttcctgaatttttgattgttttttctttaagctatctatttccttgaatatttctccctttactttttgtattgtttatttgatttccttgcattgggctccgcctttccctgatccctccttgattagcttaataactaacctcctgaatttttttttcaggtaaatcagggattccttcatggtttagatccatagctggtgaactagtgtgattttttcaggggtgttgaagagccttgttttgtcatattaccggggttggttttctggttccttctcatttgggtagccttgtcagagggaaggtctagggctgaaagctgttgttcagattcttttgtcccacaaagtgttcccttgatgtagtgctctccccatcttcctgtggatgtggcttcctgtgagccagactgcaagattgttgtctctcttctgggtctagcacccagcgagtctacccagctctgtgctggtactgggggttgcctgcacagagtcctgtgatgtgaaccatctatggtctctcagccgtgaatgtgaatatcagcgcctgttccagtggaggtggcggagggtgcaatggactccctgagggagggtccttagctttggtggtttaatgctctagtttggtgctagttggccttttgccaggaggtggtgctttccagaaagcatcagctgtagtagtgtggagagggactggcagtgggcggggccctagaactcccaagattatatgtcctttgtcttccactaccaggttgggtagggaaggaccatcgggttgggggggatgggtgggtcttgggggatgggggtggagttctgtacctagggggattatggctgtctctgctgagtcatgcaggttgtcagggaagtgggggaaagtctgcagtcacaggcctcacccagctcccacgcaaaactgaagggccagtctcacaaccaccgtgccccccgtgtcccccccccaacagccctgagtggcaagacggcttgaaaatctgccccaggctacctgcctcccagctgcgaactaaaaaggctgggttctgtccccgcctgtggagtctgcacaccagatttgcgtcctctcccaagttctggccaggaggcttctcagtcccttgaaattgttacaaagttcagttagagatttccttctccctgtggagttgtaccccctgctcctcaggccaccttccagatggatccctgtggtgccaggcaggaatggcctgcaaggggacacagtgagctcccagggcttttctgctgcctctacccctgtgtttcgctcacccctccagattgactcagctccaggtaaagtcggaaacttctcccgcaaacagaccttcagcttctccagtgggagtgtgtgttcgggagaggaagggctccttttcccacttccacagttggggcactcacagtatttggagtgtctcccaggtcctgcaagagcagtttacttccttcagagggtctgagattgctggtttgttcttgcagtctatctggggctaaaattcacaatgcgagccttcgcatgctgctctgtctggacctgtgatctaaaattccatggagggcagttagggaaaacacctaaaaagactcttgggggcgctaatgacagtttgggaaacactgctctagaggattcgtcattagttacaaataagacaaagatgctttctggcaccactgttattcagcagtgttttgaaaattacagcaaacgcaatgtcagttaaataaatgacataaactttgaagagtaaaagccataattacagtacatgaagatagtaagattttctacattagagacataaaaggtcaattgaaaaatgatttcaggagagctcagtgacttgactgacttcaagatactgtatattatgtgaactccctaagaacagaactgaataattcattgacagtcataaaaaatggtttgaataagtgggaggatttaatgtaaatattttaaatatcttggctgggcgcagtggctcacgcctataatcccagcactttgagaggccaaggtgggcagattacctgagatcaggagttcgagaccagcctggccaacatggtgaaacctcgtctttactaaaaatacaaaaattagctgggcatggtggcaggcgcctgtaatcccagctactcgggaggctgaggcaagagaatcgcttgaacctgagaggtagaggtcgcagtgagccgagatcacgccattgcactctagcctgggcgacaaaagcaagacttcgtctaaaaaaaaaaaaatatatatatatatatatatataaaatatatatatatattttaaatatcctgaaattatcttgaaatttatacatttcatacattcatttaaaaatttgtgttgaacaccagttgcatggcaaatactgttctaaatgctgggtgtacagcagtgtatggaacagataagaactcctctaacttacatcattgtggttagagctagacggcaaacaaagaagtctaagtatgtactatatcaggctggtgataattcccatcagaattccaggaagattatttttagactctgacaaaatattttagaattcatctggagcagtatctgtgagagaatgagagaagttctgaaagattgtcctattcgatattgaaatataatacagaaattaaatcactggtacaggttcaagatagggcagtgggagaaaatatagagagggccaggaaacattcaagcaaaaatgagaatttttgtctaaaacaaaattgacatttcaggttagtggagaagtggattgtttagtgaattatgtgtatcagctaggcattcggtactccaaaaaagatttcaactgagtcaaacaactaagtcataaaaacagataacattaaagtaccagaaacaggactttgaaagcatgaccctagaagtagtagagaaaaggtcaataggtttgacatgaaaatactcagtatttcccaagggcaaagaataccaaaaacagtgtgaaaagtcacatgataaactggggaagatatttacagtacatgtaatggacagagggttaatgttcttgctagatatcttaaaatcaagaaaaataaactcagtaaaaagatgcaaagggcataagatggaattcacacacagtgcaagttgaatttttttttttttttttgcctgccagagtgctacaggtaaaacagattgctactacccagtgttgctggtgggctagagtgttcatgtagctttctgcaggccagtctgagaatatttattaggattttaaaagtgcattcattgaccagcacttcacttctgaatttaatgcaaggaaatagttgggtaaatgggcaaaactattttgtacaaaaatattcattgtgttcataatagcaaaaaattggaaatcatccaaatgtcatttgtgttataactccatacactggaaaagtgagcagccatgaagatggtgtagatttgtttcaccagcatggaaaggtgcctgttacatatttaagtgtgaagatgaggttgtaaaatgtatgcctggtatgctatgatttcataagacacgtggaactatatcttcttatatgccgattgatgaagatggaatcagtgtatataccaaagagattaaaagtggttctttatctgagtgatgattttgtcttcattgtgtttagaatactaagaagtttcagcagtggaatgcctactcttcttataaccggagtggaaacggaagcattttgtgagagggctggagggaaggtgagaacgggcgttgggaggcccttccgtggctccaggcctagggctgcggaacccacaacagaacccgcaaccgcaaccgggaacccgagtgcctgcctagctggggggccggagggagggcggggagggcagcgccacggaccccagcggaccggaagggcttgtggcacgcggaatccccctcagaggcccccagctgccttccctgtggcatcatgaagtttcgcgccaagatcaccggcaaaggctgtctagagctgttcattcacgtcagcggcaccgtcgcgaggctagcgaaggtctgcgtgctccgcgtgcgccctgacagcctgtgcttcggccccgcgggttccggcggcctccacgaggccaggctgtggtgcgaggtgcggcagggggccttccagcagtttcgcatggaaggtgtctcggaagatctcgatgagatccacctggagctgacggcggagcacctgtcccgggcggcgagaagcgcagcgggcgcgtcctccctgaagctgcagctgacccacaagcgccgcccctccctcacggtggcggtggagctggtctcgtccctgggccgcgctcgcagcgtggtgcacgatctgcccgtgcgggtgcttcccaggagagtgtggcgggactgcctgccgcccagcctgcgcgcctccgacgcgagcatccgcctgccgcgctggaggacgctgaggagcatcgtggagaggatggcgaacgtgggcagtcacgtgctggtggaagcaaacctcagtggcaggatgaccctgagtatagagacggaggtggtgtccattcaaagttattttaaaaatcttggaaaccctccccagtcggctgtgggtgtgcctgaaaacagagacctggagagcatggtgcaagtgcgggtggacaatcggaagcttctgcagtttttggagggacagcaaatacatcctacgacggccctgtgcaatatttgggacaatactcttcttcagcttgttttggttcaagaatatgtctctcttcagtatttcattcctgccttgtaaaaattcagccagcttagattttttttttaaggttttgatcttttcaaaactaaaacagaccctgagttaattgggttgaaaatttggaccttcactgacttatgcagggcgtatattttgttgagcccttcctcctttgcaaaatttatattaaagcattggtaaaacagttgggtagttcatgttttgtttattgggtttgtcaggtttttttcctgcttaagattctatcaaagttattcttcaactctttttttcgggggggaaaaacagggttgtaatgaaataagtatttttgaatcctgaaacaattgcatcagtattttattataaaatgctgctgtgtaaagcgggaaagttctccttttaaaatatgtatgaatgttttccgagggcatttcttatgtagagagctaaatatatctgcaagataaaaggtatttagcatgtgtgtgcattacatattctttgttaagccgtgttctgtataggatatgtcaaagaatatatcagtgtacatggtttttagatttattatctacatagtttgaattgcttattaggttcatttttcacatgtatcatattcacattagaaatcaaggaaatataggcatgtctcagagatactccaagtttggttccagaccactgcaaaaagcaaatattgcaataaagacagatgagttttttggattttcagtacatataaaagttatgtttgcattatactgtagtctgttgagagtacaatagtactatgtctaaaaaatgtacacatcttaattttaaaatacttcattggtaaaaaatgctgctgctcatctgagccctcagcaagtcataatctttttgctggtgggaggtctttacctccctcttgatagctgctgactgattccagtggtggttgttgaaggctcaggtagctgtggcaatttcttaaaataaagtagttaacttgctggatcgattgactttcatgaaagatttctctttagcatgggatgctttgggtattttatccacagtagaacttctttcaaaacagtcctctcagaccctgccactggtttatcaaccaagtttatacactgtactaaatcttttgttgttgtttcaacagttttcacagcatcttcaggatgctgtgattccatccaggagtagattctatctcaaaaaagtcactttctttgcttatgtataagaagcaactcttcatctgtttgttttatcttaagagtgtagcaattccttaaggctctactttttttttttttttttttttttttttttttttttttgagacagggtcttactctgtcacccagactggaatgcagtggtacaatcatggctcactgcagcttcaaacttctgagctcaaacgatcctcctgccacagcctcccctgtagctgggactacaggctcatgccaccatgcccagctaactttttaatttttcttttgtagagagggagtctcactatgttgaccaggctggttttgaacttctgtcctcaagcaatcctcccgccttagccttccatagtgctgggattacaggcatgagccaccatgcccagcctctacttctaattttagttctcctgctacttccaccatacttgcggtgacatcctccaccaaagtcttgaactccttaaagtcatccgtgctggttggaatcaacttcttttttattcctgttaatgttgatatttttacctcttcccatgaatcatcagtgttcttaatgccatctagaatgatgaatcctttccagaaagttttccattcactttgccaagatccattagagaatcagtatccatggcagctataaacgtacaaaatttatttctgaaataataagacttgcaagatgaaattactccttgatccatgaactgcggaatggatattgtgttagcagtcatgaaaacattcatctccttttgtatcttcaccagaactcttgagtgaccaggtgcattgttaatgaacagtgatattctgaaagaaatcttgttttctgaggattaggtttcaacagtgggcttaaattattcactaaaccagatgctgtaaacagatgtgctgtcatgtaggctctgttgttctattgatagaacacaggcagagtagatttatcataattcttaagggccctaggattttcagaatggtaagtgagcattggcttcaactgaaaattaccagctacattagcccctaacaacagagtcaacctgtccttgaagctttgaagccaggtattgacttctcctctctagctatgaaagtcctagatggcatcttcttccaattgaaggctatttgtcttcaatgaaaatgtgtcgttgagtgtagccaccttcatcagtgatcttataatagctagatcttctggataacttgctgcagcttctgcataagtactcattgcatcaccttgcatttttatgttctggaaatagcttctttccgtaaaccttatgaaccatcctctaactacagccttttcttctgcagcttcctcacttctctaagccttcatagcattgaagagagttagggctttacactgggttaggttttggcttaagggaatgttgtggctggtttatcttcaatctagatcactcacactttctccatatcagcaataaagctgttttagtttgttatcattcgtgtgttcactagagtagcaattttaatttccatcaataatttttcctttgcattcacagcttggccaattgtttgccacaagaaggcctggctttagactgtcaggtcattagacatggcttccttactaagcttaattatttctagcttttgatttacagtgagagacttgaaactcttgctttcacttgagcacttagaggccgttgtaggattatgaattggcctactttcaatattgtcgcatctcagggaatagggaggcttgaggagagggagagagaatgctggttggtggaacagtcacacacacatttatcaattaagttccctgtctcatatgagcatggtttgtggtgccccggaacagttacaatagtatcatcaaagaacactcatcacagatcaccatgacagatgtaatgataatgaataagtttgagataatgcaagaattaccaaaatgtgacacagagacatggagtgagcacatgcttttagaagaatggcactgataggcttgcttgatgcagggttgtcacaaaccttcaatttgtaaaaagtgcagtatctgagtagtacagtaaagtgaagcacaataaaaggaggtaaactgtagtcaagttcatgttaaccaaaatgttgctttaagggtaatttttggataaatcaggtttccattcatcctcttcccttccccacccccagccccgccagtattccagtactttacttagaaaataattcttaatgtttcattgttttgagaaaaacgaagagaggttataaaaggatggtatagtgatgaacagtctcagggagaggagtagcttatattcttttatattaaattttagtttagtttttttggtggcttatgcagtaagataagccattaacttggcaacctttatgtttacatagtaaattcccatgactacatttttatcagtaatgaagagtttcctactagatttggtgataaaacacttaaacttgttaatttattttgttttggtgatttctaaattccacctgtggtagtgtggaaagaacacacaaacattggacccaggcgagtcgcttgaaccctctggcttactaagatgtgtttccgttgggctagattctgatttaatgctattaaagttataacatgggaagtttaaacagttgttttcaaaagtatttctgaagtagtctttaaaaattattaataaccactttggaggtatagtgtatgctctttgaaactatttacttcatatcttctgagttacgtacaaaaatatgtgaattattttgtttggtgagtattttcagagctgtttgtgaagttttttttttttttttgagatggaatctcactctgtcgcccaggctggagtgcagtggcgtaatcttggctcactgcaaccttcgcctcccgggttcaagcgattctcctgcctcagtctcctgagtagctgggattacaggcgcgcaccaccgcacccggctagtttttgtatttttagtagaggtggggtttcactatgttcatcagactggtctcgaattcctgaccttatgatctgcccgcctcggcctcccaaagtgctggggttacaggcgtgagccactgtgcccggcctgtgaagatttttaatcaagccattttttggttcatttaaaaaatcttctgccctcatgagcacttctgtagactttattttttatttttttattatttatttatttatttatttatttttctgagacggagtcttgctctgttgcccaggttggagtgcagtggcacaatcttggcttaccctaacctcggcctccgggttcaagtgattctcatacctcagcttcccgagtagctgggattacaggtgcccaccatcacacccagataatttttgtatttttattagagatggggtttcaccatgttggccaggctggtttcaaactcctgacctcaagttatctgcccgcctcagcctcccaaagtgttgggattacaagcatcagccactacacctggccttttgtagactttaaatgcaagataaaaatggagaacacggccgggcgcggtggctcacgcctgtaatcccagcactttgggaggccgaggcaggaggatcacaaggtcaggagatcaagaccatcctggctaacatagtgaaaccccgtctctattaaaaatacaaaaaaaaattagctgggcatggtggcgggcgcctgtagtctcagctatttgggaggctgaggcaggagaatggcgtgaacctgcgaggcagagcttgcagtgagccgagatcacacgctactgccctccagcctgggcaacagagcgagattctgcctcaaaaaaaaaaaaaaagaacacatgccttactacagtgaggaagttataagatctgcaggttttgattttgacataacaaattgcttatcgtgtttgtttcaggcatctcttccaaattttttcctttttagaaaaattaaatgaaaattttcaagctataataaaagatattttttactagtttcatactctctcctcttctttcctccagttgtctgtctctagttctgttgctttgtcttgatgtacttaataataccaacagaaatgaaaaatctaatagtttgttttagaacataaataattttacagtttagtctttcatgaattattatggtttacttttaataattcattaacagggagtatctatcaaaagttttatagcctagttttgtaatgtagcttttgaaaatggaaaagataatttattcttctacttaggttattccctaatctgcagagatacgttgcctataatattaaacatcaatagaccatctaaatataatgttttaactaatattgtgtaattatacagtaaaaacgttttacaatacagaaattttaaaatgaatagcaagctattattaaagtttttagtttaattgtgaaaaactagagagtgcccgtttctatagtcatgcattagttgctgaatttaaaagctttgtaaaggactctcctaggaacaagagctcagagatgccttagagctgatctcatccaatcatcttgtttatagataagaaacgtttcacagtgcgtaaaagtgaacaagcgtttttatttcctaatgccagaactcagtttagaacccagtctccagactgttcataaatgtttcaatagacttacagcttggatatacttttgttcattacaataaatctagagtaccatatgattgttttacttaatctataaagataaaatttaaatttaaaaaatctcaaaccttttggaggggcattgtcattttgtccttgtttgaagatgtcctttgctcttgcaggcaggaaggaatttatttgccacacaaaatgataattcaatgaaaataaagtcttacattaaaaaaagtcaaagtctcaagtttacaaattatttaagcatcttccattgtttctcatagggagactactgagaagcaagaaaacactatgccttttatgtttcactgtatctgtagaaaataaatcattggaaaatgtattaaagtgctttcttatatccagaatttattgtcccactagataccatttgctgaaagctaaactggcttattcatatgacagacttgtactttttaaacattttactgctaaaaagaaattactcttgcgtgtatatttattcagtgaataggttgccattatcaaaagaaatcagacaagtgtctctttccacggttaatttccataaggaccctcctagttctggttatccccattcgggtccaggcatttgagaaatacttggtgaattaacatgagtctggaaacacatcagaattatgatttttttttaagcaaaccagtaattctctttggtaatggatagtacgtaagtgtgtagtgtggttcttaggctaggagccagtaagtaataatttgtagcccatcttatatacctgtgtatatatgtgaagttcccagtaagtactcccattcccccaacgtttattatttgcccatttgcattatttagtactttgtatattattagttttcttgtaccagaatctgacctaataaaagttcctgattctcatctgtattaactttccttacatgagtaataatagctgttatacctctttatccctatgctttccaaagataaaattagtttgtggccgggcacagtggtgcgggcctgtagttccagctactctggaggctgaggaaggaggatcactggaagccagaaattggaggcagtaatgcaccctgatcgcacctgtgaatttccacggccctccagcatgggaaacacaacgaggctccgtctcttacaaagaaaagagttagggcccagtgcagtggctcatgcctgtaatcccagcacgttgggaggcggaagcgggcagattgcttgagcctaggagttcaagagcaagaccctgtctctattaaaaaaaaaatataacaaaaattaggcaggcatggtggtgcatgcctgtggtcccagctacttgtaaggctgaggtggaaggattgcttgagcccaggagttcgaggctgcagtgagccgtggtcacgctactgctctccagcctggttgacagagtgataccttgtctcaaaaaaaaaaaaaaaaaaaaaaagagtttttaaaagtttgtggtatgtgcttttaggataggcttattcactttattccttagtgctttcttaattgtcttaaatggctatgaagttaaaagactatatattgctttagttaaacaaatgaggtttatgacaggcaaagtcagacttttgttgacctccgtttagtgtatttatataagaaagagcttatgacacatttttgatgtcattgttttatggcaattggaatatttgtgaggaaaatttgtagacaatgacaactgtagactagagcgttcctttaaactcaagggagtctggcatggatcgtcaaactgaaaatgttcagaagctgaattctgtttccttaaagccttagactctttcctgagagtgataagaaattatttcttttattagagattttaaacataagagcattacttattgataagaacatatcaacaaacataagaacatactatcttgtagtatgtttttaactgaaggcaggttgagaagagacatctcttcctatagttcattcacaaattactgagtgtatattatgtcgcaggcactgttggatgtgctacggatactgcagtgtgaaaagcagatatgttcttatatttgtaaattaaatgacaggtcttcctggcataatggtctgttctggtttggatatatgtaggtaattcttcatggtaaggaaatacgattgttgcaaatgaaccagtgtaatgcctgttggcttttcagttgtctgctttgtgcgtctggaagacacctgcctgtactcttcagtcataaataagaaagtagatcagactttttgattcatggctatccatggtggcccagacattaccttttatgaccagacattacttttagttggacagattttgagggtaacatagttaagattaagagccctgtgtaaatgacctcaaaatggatttgaaatagtgggagtaaattggaattgccctgtcctagttttttagttttgcgttctttgagaccagaggtattctaattgcagttatgtttcacaccagagtgagccagagccccagtcactggagacacaatgaaggttattagaatgtgagcggtcacattcacaaatgacctcacaggacatatggtggtacagaaggaagaggatactagactcttacagatccggtcaccaggaatctggtctgtttgacaactcatcaggtgtgtgctcttgaaaaagacactcagcatctctaggttacagtgtcttcaggtgaagagactagataccagttgtgtcagctctcctttggctctgattctgtgaaataccacccctgctgataatcaaaaccgctgaggatctctgacagtctgatgtttgtactaatcatcttttcagtaacattaatgtcaacggtaattattttcattaagttttaatactactgtttttctggaaacaaggagagcagcatatttctacttaaaaatttggttctttatgtgatctagaccagaatctgaaagtactcacttttaaccacatgcttatttaatttgtgctgtaatactgaggacataccttaatagtgtcaagaaaataattgaatcaccactcagtggagcctaattttccatgccaattgaagaaagtattttcctctcacaaattggtttgtaagcattaattaatgtggtgggttaattatccacatttttcttaatatttgctctccctgcagtgttttggtatctttggagcaacatgatgtctgtttattgaagcagttgttgaagaactttgtgttgaaatatgcctttgctgtcctataatttttattaatatgctaccatactaaatctcatgtttatcagtttataatagttttctagcacattgtcaaaacaagctttccacacttttgtctgcgtttagaagcatgtttaaagaggtagcaatagtgtattccagtaaaataataattctgaaacatacaattttatataaacgtaactattaaattacctagtatctttatgtaatatcagtttattcattgcttatttgtgcattttgctgatgtcaaatgtgaaaataaatatctttcaattttcaggaacaatgagcctaatatgttgtgtagcttagcaggctaatgttaatgggatgtgtttgtgtttaatttcaaaatattaccaaagcattatatttgataactttttattttgctataacttcaaacttacagaaaactttccagaatagtaaaagtaactcctataaaccccttacttacttccttcattttggtgactagtaactccaggaagccctttaaccacgcccaccagttgtttcctttttccccaatttctgtatcattctgtccatctgtctgtctatgtttttgtgaaccatttgaaagtgggatgaggcatcattccttgactcctaaatacttcagtatgtagttattaagaataaggacattctcttatattataatacagttaccaaaatcaggaaataaaatattggtaccatactgtctaatccaaagttgaaacagacaaacatgaggagcctttcttgatatgaatcactgagaaggatctgtgaagtccctgtgaaagatacataacccaaatcaaatcaacagggatgatcagacagagccaaattgataggcattccataaaataacctgtactctttgaaaatgtcaaggtcaagaaaatactaatttttggttctcagattgtctggtttggacagtgggcactgcttcagtctggctctgtggccttttgacatacacttccttagtggtacagcagaatctttcaggcttaccttgtccttgccctgcctcagccctgcatcagccatttctccaaggtcactggttcctttcattgaaaaatggtatttgggagttagatatgctcatcgctactgttgtattattgcttctagcctctctcaatgtacaaagctagaaaatacacacttgcacacacacataaatctaccagtacacttctttgtcacataccatattaaaaactgagttcatatatctgcctttatgaagagtctcctcaaatcttttgctcaaaaaaaaaagggttgcttcctttgttatcagattgcaaaagttctttatgtgttgtttgtataaagtcctttgtcatttgtatctattgtgaatatttccttctaggcagtagttgcctatttattttctcttgataagcagaagattttaatttggatgaagtcagaaaatttagtgtttttcattgtacttgtgtttgtcatattgaacacaagtctttacctacgcccaggtaatggagataatctcctatgttatcttctttatagtttataattttagtttttatgtttatgagccattttgaaataatttttgtaagtgatgtgaggttgcagttaacattcctttttttttttttatgtagctatccagttttttcaacaccattaaaatatttttcccattgaattactttggtgccttgtcaaaactcatataatcatatgtgtttgtttctggattctagtctatttcattcgtccattagtttatcctaatgtcaacaacactgtcttgattactgtagatttctaataagtcttgaagtcatgaactgtgttacaacttttttcttcctcctaagattggtttggctcttgctagatcttcgaatatctactggaattttagaatgaccttgacaatatctctatataagcttgcatgaatttataatcagtttggggagaattgatactttaacaacattgagtcttctgatccatggtcatgatatagatcttcacttatttaggtctttgttttgtctctgcagtatattgtagtttttaatgtagaagtcttgtacatttcttttattaagtgtatttttaggtatttggttttataatggcattttcaaaatttaaaaaattttattttctaatcatttcctactaaaatatgtaaataactgatttttatatattgaccatgaatactaagtctttgctaaattcggctattagtgctattagttgcttagtagatttcttaggattttttatataagcaatcatgtcatctgcaaatagatgtttacttcttcctttgccatctttctgctttttatttctttaattcgccctattgcactgctagaacttctagaacagtgttgaataggcaaggaaagagaggtatcttttctatgttactgttcgaaaggggggaaagcattctgtatttcaccattaagtaggatgttaggtgatcctccccactcaaatagttctttattagattgaggagatgctctgtagtcttagtttgttgagagtttttaatcatgaatagtttttaatcatgagttttatcaaaggcttctttgacatctatttagggtaacatacggtttttcctttacttttaatatggtaattcacagtgattgatgtctgaaaaactggccttgcttggttggaataaaccctacttgatcatgatgtattcctcttttgctttttgaaataattcatataggcttgatatttcttcttccttaaatgttttatggaatccatctgtgaaggcatctaggtttgagttttctttgtaggaaagttttgataatgaatttaatttatttaatctttatgaagatattgagattttctatttcatcttgtttagtttgggtaacttgtctttcaaggaattcatttcatctaagttgtaaaatttatcagcataaagctgttcattgtctttattgctatttaaatgtctttagtatctatggttattccctctttcattactgaaattgataatttttgtttcatttctagagagtttttttgaaacatcaattcattaattgttggtgaagaacttttggctttaatttttttcaaattctttttacttatgttattggtttccactgtttatttttttcctatttctgtcattctgcttccttttcctgccctccttcccctttactttgagtttatttagcccttatttttctagttttttttttaaaaggtggaaacatagattcttaattttaaatattttttctctaagattttaagttactgctttggtggcattccacaaattttgataaatgtttcttatcattcatttcaaaatattttgtttccctcttaatttctactttgaatgttgggttatttagaagtgtattaatttccaaatacctggatacttttctggatattgtgtttctattgctaacgaagattcctttgtaatcttcggaatttcggtctttggaattgcctgtgacttactttatggcccagcatatcgtctatcttggtgaacattccatgagcacctgaaaaggagttttataaatgtcaggtcaggatgaccaacagtgctgttcatatcttctatgttttttgtttgttttttaatatctagttattaatattgaaagggaatattaaaacctcaaactatgattgtgtatttatctctccctatcaatcagtttttgtttaatgggttttgaagctcttgtattaggtgtatacagttttgattgttatgtctttctgatgaatttgtcctttcatcattataaactctcctaccaaattgctttgtggtatcacttccccttcagattgaagaacttctttcagcatttcttgtcatacagatttgtttgcaatgaacttttttttttttacttgaaaaatgccttttacaactttaatttcagactttttttcttccagtactttaaagaactatatatctttagataaatctatttctataactatattgatctataatcatgttcactgactgtttcttcaaatatcttctacctactgtgcagcctaatcagtgtatttttcatttcagacagtatacctttcagttctagaattcgcattgcatttctttttaaaaaataattttataattttaattcctctatgtagaacaaccatctgtttattcattatgattacatatattttaataacatttgttatagactcttttaagttcttatctactaattcttctgtctggttcatcttggggtccatttcggttatctgcttatttgcttataaagagataggaaaaaatccaagtgtttttcctactttctatgttcacacagccactaactcagtacacactcctgataccaggtgtgtgtgaagttttccccacacaccaagcaagcagctctccagcggacaccagctagatgtcctctaattcagttcagtcctgacatgagcatgtcagatcccacagcttgagaagtggggatataaaattgattaaagatgtgttttcaaagaagaaacaaataaaatatctaaaatttaacacagtgaatattaacattatgtagtagaagtttaatagaaggagggatcagggagactaaaataacatttgagcatgacttgaaatattggtaaagatttaataaacttggaaatttctctttggtgcaaagaggttgaattacatgaatacaagcatgtggcaggttcgtaagaggtgaatgggctcatgtggggaatgtcagaggagaggagtggtggagatgaagtaggcagtgtggacgggtctagctgtgacaggctttgaacgggatgtggaggaggttgtgggctgtgcagaccacaaaacagtggatttcatagaagattattttaaaggtagggataatattgattagctccatattttagagaactaactggcatttgctgagggtggattgcagtggagagaaaatggggcagagttaccagttatacgtctgttgcagcattgaggggagaagacgaaggtcttaagtgggagagcaacaggaggaaacagtaggattgagaggaatagttgatttttgattcagacaaaagatactgattatttgattcagggggtgccagagggaaggagaggaactcaaggtaaccttgagttgtctcattgggtttattggatgaatgataatgtttttctggacttccttttttgttgttttgccattttatttgtattaaataagttacgtaggcatgattgattaagtcgtgttggactgaacctaatctgcagccccgcctctccacaggaggttggtttgctggtgctttgctcaaaaccctaaccctctaatcccatggtctttctggaatggccagtcctgctgttgagtcatcttggcctatactagggcgtggtttgagaggatcatgaataacaaagaccctcctattgccggaaaacaccaaggatttaagactcgctcccagaaaccagggacagaggtcaaatactctattatacaacataccccagactcattccactctctcctgccatccactgcaacatttccagattcttctaatctgccatttcttggtggtccgttttagacattagctgtcagcctcccattatgtgagagaaaagatggtcactccctggtttacctgtcttgcctgcccccaaacacacatccgccttttgtgccttatttcaattttgtttaaaccggtggtcagttactacattattatgactgtataagtcatgtgtctttggacctttttgaaaatttcaagagcttttattcttggattcatttattttcatggcatctagttcttttaggggtaaaaaatttctctcgatattaatttggtatcaaactttagaatgatttcgaagtttttttttttctgtacctgctgttagtagtttggtagggctgttataacaaagtatactagaccgagtggcttaaacaacatacatttattttctcacccttttggaagctagaagtctgagatgagggagtcagtggggttggtttcttttgagggccgtgaggaatgatctgttttaggcctctctccttggcttgtagacagcgtcttctcatgagtcttcgtatgtccttccctctgtgtgtgtctctgtccaaattcttccaataaggacaccagtcatactggattaggacccacccatgtgacctcgtttcacctttattacctctttaaaggccccctttctgaatacagccacattctggggtactggggctgggtttaacatatgaaatttggcagtggcggagtgaggtgggtgggcataattcaggccatacaacacctgcaatatgtttgttctgtgtttttttcttgtttgtctttcttccatctctgtcttacatatctttcctcattccctttggctgtccaatgttgggggtcagaaaacgataccctaaaatatggtgctttgacattctgcgctaaggaagcagcctcaagctctccccgcaccccttctgtctctcccaaagcacagaatgaggctgtttatctgaagttcccttacctacggagaaactagaccaaccaaagaagaacacatttgccttcagtttcctccctgaaatttcattaatcagagaagattaaaactcatatcatagaaaaagagactgaaaatcaaacactacacctggagcccagatgggctttgtccaaactgttgtctgttctcaggtcccatttaattctcagaattatttattaactaccatctgagcattgggcccattcattccccctaaaaattatttactacccctccaaatggccacatttcgcctatcctccctttccctttgaagaagggtctgtaagcatctggacctcaccggtttgttgggtaaccatgctcctgcgagtccatgcacattaaagaaatgtgtctgccctttgctcctgttaaccagcctcattcatctccagcgaccctttagagggcagaggggaagctttcactcatggcctgtacgcctcccacatcttagagtgagactattaaccgctgatttgattgagtttgtgtgtgggcagtttacagtgagtggctgtacaggtgatgggcggacaagcaagcggcccttccctttttgcagggaagacactcaggtgtcaggatctttgggtcttattttcctaggactcttcagtttctgcggggaataatgcttcagttgtgtggacagggtgggattggcaggaggggcttgcacacctgctcacagtggcaagggcaggaggggcttgcacacctgctcacagtggcaagggcaggaggggcttgcacacctgctcacagtggcaagggcaggaggggcttgcacacctgctcacagtggcaagggcaggaggggcttgcacacctgctcacagtggcaagggcaggaggggcttgcacacctgctcacagtggcaagggcaggaggggcttgcacacctgctcacagtggcaagggcaggagaagggaggcagcctgagtcccacggctttgctgcacaggtttaccccaaatccctggtcagcctgcccccaagtttcccacacctctgctgtgctgggggtctctgagtcctggtgctcttgcttggtttcttaaaagactaaacttctcttctccagactgtgaaggatggaggcaggggccagggaatctaactttttagtccataaagatacaggtcaccagcaagtctcactgttctgctctgagcctcaccccaccttctggggcatctgaagccctgagcacttgagttctcgggtttattagtaaaattttattatttttattattatttgagatagagtctcactctgtcacccaggctagagtgcagtggcgcaatctcggctcactgcaacctccgcctcctgggttcaagcagttctcttgcctcagcctcctgagtagctgggattacaggcgtgcaccaccacgtcggctaatttttgtatttttagtaaagacggggtttcaccacgttggtcaggctggtctcaaactcctgactcgtgatccgcccgcctcggcctccgacagtgctgggattacaggcatgagccaccgcacccggcaaacttttattatttattgcttgcctcctgtatgccaggtactgggctttccaaggattatcctgtatgttctttacaataaccttatgaaatgttttctgtttctagctccactttacatacaagaagagggagatttagaacagatttagtaaatgggagcagcagtacttgaacacaagtctacctggtctcagaaactacacttttccctcctctgttatactcacaacagctagcaaattcatgcttctgcctgtatctacgttctaggttttgtagaaatgtcagtatattgcattgatttgagcatattaaaaaagagttgctatactatataaacacaaaagtaaactgaaattcagtacacctgtgggaatgtaagtgtgtttttatttttatgagtatagttaatcagaatatctcctttaaacagccctgggggtagaacagtagaacagttcctagtatcaatttagggttcagcagaggtagtcatggagctacgtggtgacattagtttctctctgcccttgtgctgaaagtttttagaacccagggcttagcattctgttattcttatgtctttcttgcaatactaaccagagtgtccttagtaacttaatgttcagtagatgttggctgattggctaaatgacccctaaaaaattcaaaactctgtgtttaagaatactttttatattttggtactgactgtctagcattcttatattttcagccaatgcttgtctcagttggtactaatccttttttctttctcttttaacagattacttctctaacaggatcaccagtttgctccacaaagcacaatgtctcgatcacgacaacccccccttgtgaccggcatctctccaaatgaagggataccatggacgaaggtcacaatcaggggagaaaatctggggactggccccaccgacctcataggtaagggcagaggccctgcgacgcaccctgctaatcggatttttatgtggacaagggagacaagatatgtaattttcaaacagtgaaggtgatagaacaaacatctttgtgatctctacagaatgctccaaaaagacgaaagaattatctggctttctgagttttgtgtgaaaatcattattttgtcaaatcttgccttatattgtctttcaaatccttcagaaggtttcccagggctgagatttgcctctgaattttctgaagctttgatgtcttgattgtcaaaagagctgcttttatagttttgctctcattagttttccttcccttgtctgacttgtctgttgcttctcaggggctctgtgaattacaccttttctgttccttattgctcttcaaagcaagtctcagccccatctcctggtgacacgggcagcagttggctctgtcttcactccacctggcgggcatgtgtcctcatcgtgatctgtggatcctatctggagcgagccaaagtttagtttttaggggcagtttatgttttttatcttttctagcggagtttaagctcaaggtcatgaatggttaggacaccacacctccagctggtgtggtataaatatttctggatgttggcttgcatggtagccttcctccttccatgatgtggcggcctttactgatggcctgttcttgaagctctcaggtctgcgagtgcttctcagccctggcttttctgaatctctctagaactttaaacgtaaatcatttggcctactaagtttcagtctctaaagatggagcctaaacattatttttaaaaatatacacgggtattagggacagccagggtagagagttttaagtataattttatggccagttacgattacttgcctgtgaactgctcaggtgggtatacagatgcattcagaatgaggaagggaaaggcccctctctgtgctactgaatgaatattctggcttcccatttacatttcttctggactcagacattctcttgactcatttctgcactgatgacggagctgttactaaggttctgaaatcacgaattggaacttgcttttcctgcattatgactgctggttgatagattggtttttggccatccagaaaactctttaaaaagaaaaagtgaacgggagctcagcactgtgtttagtgactgagttttgcactgcctagccaattctttttgctagtgttatgtctcatttgatattgttttctctaactgtgaccggcatctctccaaatgaagggataccatggacaaaggttacagtcgggagaaaacctgggtagtttttgattgtttagtaaacatcacttcaatttattcctgcaaaagtagtcttacctaatcctatgccttggtttttgataaagctcattccagacgtttctttacctaagtgtaaaaatccccagaatgcatagaaatctactcacacaggtgggggttccgtccagaattttcgctggcagtcattgtgcattcccaaacatgacaatagtctaggtaaattttaatcttgtttgagcttcaggcaatgctattcttacttgactaagcgtgtattacttttctttttgttgctgttgttttttgttttgagacggagtctcgctctgttgccaggctagagtgcagtggcgtgatcttggctgactgcaacctccgcctcctgggttcaagcgattctcctgcctcagcctccccagtagctgggactacaggcgcatgtgccgccatacccagctaatttttgtatttttagtagagatggggttttaccatattggccaggatggtcacaatctcttgacctcgtgatccgcctgcctcggtctcccaaagtgctggcattacaggcgtgcgccgccttgcctggcctgtgtattacttttctaaaccatgctagttcagctttcaacctgccttatatattgccaagaaaccattttttaaaaaagcaaacttaacctgctaaataatttaagtgtttttaactcagatgatatctacactagccaagcaaagcactataaaaagtactttacttggaattctatgagttacttttttttttctaaaaggtgctattttatttcatgaagcagatttcttagcgtagcttagcaaacgtgcttaagaaatcaagaaataggtcttaacgatcttttttcttttcataacatttaaaatgatctacttgaatctgtgtttgaattatttgctgattattcatttttttggagtaaaaatgcacaaaagatattaaatcagaggaatcgtgaaagcagctgagacccaatgaataagctattgttctaggggcacttttgtgccaacgtggacctccatgcatatcattcaggtttgctcatgtgaacatgttttaatactttatatctgaaatttgctcttattcctcagttttaaaaataaggtagttctctagcaaggaaatttcattagggatgacttttttcctttaatgaagatactatttgtatttttacattgctacctgacgttaattgttgggttattcttcattctgaagtgggttaatatttaaaatcacaaaaatctgatattaaaatacttaaaaatattaagttgtctgttgacctggagtgataccaaaatatctactgtcaataattaagcaggttatacattgaaacagttgtttaaaaaacatatagactggtttttatatgcacagaatcacttgagcaagtgaacattgacatgttagcagtatttctctcgcgaggtggagtttggagaggctttcaatctcttaagttatttaagtttttcataacaaaaattattagaaaaaatatcaaagacatgcccattttgaaaaaaataattttgaataatgaatatatttaaaaatgtgttattataattaaaatataccaatagaaaccatagtcccgaggaaaccttttaatgccattattagaaaaacaaagttgcagacattagtgaattataggtattttagagaaacccctaaaattcattatttcaagcaatgtatctttaaagcatagttgcttttattcctttatggtttaacattcttactaaatagttctttaagttggaacaaaagatgatttgactttgtgcctccattttaaagtcagatttggcattaggtgatatatttctggtatctgaaaaaaagccgaaagaaaacattgccattgctaaaccttagtgctgaacattatagaaagttaaataatgagaaaaagtgtgaagtgtctgccgggcatggtggctcacacctgtaatcctagcactttgggaggccaaggcaggtggatcacttgaggccaggagttcgagaccagcctgaccagcatgacgaaactgtgtctctaaaaaaaatacaaaaacaaaacaacaacaaaaaaactagccgagcgtggtggtgctcaccggtagtcccagctgcttgggaggctgaggctggagaattgcttgagcgtgggagatggaggttgcattgagccaagatcacgccactgcattccagcctgggcaacagagcaagaccctgtctcaaaaaaaaaagaaaacgtcaagtgtctgtgtctgtgccacatacattctggtttcttttctccataaatattaattacattggtctctgttttgtggaaatggaaaatctaaaggaagtaagttggaaggctagctgaccagtgtggtgccatgctggtattccccctgaggtgtgtgccttactcactgcatctttcagtgcctctctgtttggttattacctaaattttgttttacatggtatgagggaggtgacatcatgagttgaccttctgggagtgtaggtttactgtaagagcagaatgtagtgtagtgacagtttcattaggaaagcactagggcaggaggaactactatgccagcagctgacacaccgatgtaaaagtgagatggtaatccagtaatgcctgagcacacttcactagattacctgactcttggttatgcttaaataaaaaacctactttagttcattctgtaatgccatgtataagtgaacactagaaaaagcacgtgaagatttgtctcaggaagatgggtgaatgtagaatgtttttagaaaatgatacatacgtttattaatacactttaaaattctatgttaataactgagacttcaaataatagcagtagtttcccttttattacctctgaaagcattttaagattctcgtaatctaagtaatctggaattcctgcaacatagttgttgtggtgttcgttttctaattctacggatgtttgaagaaactcaaatgtagcctaaaagaagtcttaaatattggagaaaaaaacaggtaagaggaaaagtcaatagagataacagtatatctgcaaataatattgggtatattcaataatgtcattattgaacaagactagatttaaaaaatgtaatctacacgattaaggtcttattgttcttgtctttgaattttgttatgcacatgcgtttattttcaggcttgaccatttgtggacataattgcctcctgacggcagaatggatgtctgcaagtaaaatagtatgtcgagtgggacaagccaaaaatgacaaaggagacattattgtcaccactaagtcaggtggcagaggaacctcaacagtctctttcaagctactcaaacctgagaaaataggtaaagtctttcatgggtttattctaaagaagaaagtaaaaatgagtttgtcttttaagctgtaaagctggtagattcgtgtaaaacctacctacttgcatatctcaacttagatttagtttatgtttattttgacaggattgggatgttggttaatatttgtgttactttcgggaaggcagtgtgctgaggtaacagtcagtgaagcctaaggatgacggtcgtatgagaactactcttctcagttcttaaaatctgttcgttcacttgatataccagttttggttccttgatcttgaatataatgacattgctttaaactcttaaacaaggtttgaggtgaaaaatcctgatttggccaaattagtaataatatatctaaataatattcccttttccttcattttatccatccttcaaggcccagatgatacatttcctagcttggctgcttttaacgcccctgttagtaatactcactcttctttgaaccacatagcactttgttttccttctttatgcgctgaccacttgctgccttccgttagcagtgttaggaacttgctgccttacgttagcagcgttaggaacttggtctgagaagtcatgctctttgaattctaacctggactctcttaccatgactgagtatgtaactttaataccttctttatccatgagcaaaagtggaatatattggctacctcataggattgggtgagttagaacataaatgtaaagtgcttagcatagtcccttacccagcaaattaataatttctgatgatctttcttgtagctatttctgtgcatgtctctttccctttttagaataagagtaatgtcagattcatctttgtggtcctgtaatgtcttgcacctggtcagcatttgataaatatttgtataatgtaggaatatcagaggcgtaattaaacccagccagtacttctctttataaagaaaataaataattttgcaaattgtttttttaatcttagagcatagaggctttctgcagcattgttctccacaaattcctagattatttttataaataaaaattcaaggaatttcagggaaaattcagagtggactttatatatgtacatgtacgtgcatgtgtacatatatacatatataacatttctatttttgtttactctttttatttagtgtcttcaaaaactaaactgaaactaaagcaggaacttgttgtacagttttctagagggacttaaacattttgataaaaatctaatatcttatgatctatttatatagcagataaagaaaacttaggcaaaagtggtaattttattattctggaatactcattccaggacctagcacatagtaggcttagtaaaggtttctttttttttttctttttgttttgagacagagtcttgctctgtcgcccatgctggagtgcaatggcgcgatctcaatcttggcttactgcaacctccgcctcccaggttcaagcaattctcctgcctcagcctctgcagtagccgggattacaggtgcgtgccaccatgcccagctaatttttgtatttttagtagagatggggtttcaccatgttggtcaggctggtctcgaactccggaccttgtgattcgcccacctcggcctcccaaagtgctgggattacaggtgtgagctactgcacccggccagtaaagctttcttgaactgaactcaagagtgcctggacttgagcagaagcccctgttgcatgctggcagaaccacgagtgctgagagaatgagtgggttcatagagggccttgcagctacaggttgcctggtattcagacagccttctcccatgaagccttctgatcctcgcctggggaggcaggcacgctttgtctgtgctccctggcacttggctctttttctgttgcagcccagggccttggaggcctagctggtaagccctgtgctaggttgaatgataacggagttcagtcccataaaggaagatgctgtttttagagcttatgttgtcttgttcacagggtccacacccagtcagttttccctgaataacctggttatttccattatacaagccatgcgttccttgaaaggtgtttgatttaatcgttagatattttattgaatttaccaaattgatttcagcctaatacggaaaaaaatccctgctgtttctaccatctaggacatttccagcactgataacagcaaaaagaatgagaaatagcaagtagcatattatttttgcataactattcatgaaaacatgccagagtttgtagaggaaaagaaaataaaagatatttcttgagagctttcaagaaccatttaaaaaacatttggttttcatttgtagtgaaatgtccttaggtagcttatggaacccagaagcagaaactcacagtattaaatataaaatcatatatgcataatggtttttcggcatttatcataaaccagaagctttccactgagctaacattttactcgaatgttttgtgcttggatatttcccagacattttccaagagtttacatgatttcagaatattctcttgaataaacagatattataggtcatattatttcatcttactgactttctgaattttttgtgcagatttaatcagctacatttaacaatgtttaattgtagtgtttattatttgtaaaatatgtttgttattgcaaaactttgtctaagcagcttaatttgtcttctctgttgagtaatgtacaatgaaaccataagctgagaggtgtaatttttgcctttttataaatttttttagtgcttataattaaactactagtcattttttaaaaatttagctgttatgtcctcaaatctcttaaagattatccaacaggcattttgtattaggtctttaagaagtcagacaataggccagacgtagaaggtgcctggggtaggcttcatcttattaagcatatgctcctcatttctgtaggcattttggatcagtctgctgtgtgggttgatgaaatgaattattatgatatgcgcactgacaggaacaaaggaattccgcccttgtccttacgtcctgctaacccgcttggcattgagattgaaaagtgagtaccatcttgctttcagtcttctttatttttcagttcctgaaaagttttatatacttacaggaaagggactcaaactccagaaacatcccaggaaacacagttgaagacacctcagttgtttggagatgggtgttatttatgaagccttgttagctatgctgcaagtaaactttgcagttagttaaaacttgtggctaaaactacttttacctcttcagttttttgattttgcattttgtgaaaaagaaaagtctttagtatgttgtctagagatggttaagtttaaataggtagatggcacctgaagtcaaaatagcatacataatctgtttttttgatttttctagaagtattttagaatagccaggtctaatctggtctttaattttgtctataatgtctactcattcttgcttaatccagacttatttaactttaatcatcagaattctgccaggtaaatgatatctttcaagatgccttataactgaatctagagtttttttctgaattcctagtacagtgttttagtaacttttataattagtgcctttctacttaaacaattcacctaatgtgttaatcgcagctaatttatcttctggccttagtgcttctgcttatggaattgtatactgagtattgctctgtaaactcttaccaaaagtgacaaattagcactgttaatactttaaccatggttttagtttagggttttctaggaatggggaaaattctccaataatctctctatatataatcttcaagcctactcttgaagatcattagtttcattttcacctgctggggtttgcccctggctgaggggaagtagcatgtttgtcttgggaaagtagcacgtgttgaaaaagtctggggcttagcagcttcacgtgagctttgactgttctaggtaacatctttgaaacatttttgcagtatgggtcattctagagccgtttaaggattccagtgcctccaaaattaagagttcaaagattgagaaggtttagaaaataatggtaacagttgggtatttatttgagcacagttttaagcatgaatagacttgcagttgatagtaagccccttatgggtgcttcaaggctctggaaagccagtctctttccaacctgcctgagaagtgtggagcaggaggccctctgagctgctcttcataaccaagagccagttttatacatgggcaaaaggaatatggagatatacaaaatatatttagtatgagacttggacaaaattatcagttagggttcattcagacgtttactatcataaacgtgatttcttcaacttctgttttggtgtttacccccacccctgttctctctacctccccacaccttctcagcctttgactctctttattattcctgttgctgctgcccacagtgtggtttggcctgaactgcgtctaacagcagtgttcctaataagtgtcaggttaattatttgatgagattggtaatggcagtgaagaataatggcactgaaagtacttagctttcttaaaatgttcttttcttctctgagaggtagtttgattttgtgtggggcaaaactctctcaatttgaacttgggctgtgccacttactagcaatatgacattgagtaagttacttagattccttttgcctcagtttcctcaggtgtacaatgcagtacctgttccttagggtcgatgcgaggaatcaggaagtgaggaggtaaacaacttggagcatagcaagtgcctcacaagtgttcatccttacaggattctttgctcttcttggatatatactattcattgttctgccacataggaaaagtttttgtttaatgacttaagattccagggtactaaagtgttttaaaattttaaaataacattatgtacatttatccaataagtacttcagtgggaataaaattaacagattttgatgttactgtacagattgttacttaagtttcagaaatatttgctcagccatgggataaagtaaaatattaaaggataatttttgaaaaagggaaaatcatgattcttatacaaatataaaataaatagatgtcagagcttttatttaactcataattaaggaaagaaccaataagatgttaaatccagcccaaaggaaagtccagaggggagacatacgcaatgagaaatgccgaaagatgcaagaccgtcactccgtctcggaggagccagtggtatcctcacctgatgtgcatttctgtggacaggaatccctggcatcgccattagccctccacaagccagctctgtctttctaatagagactcagaatagccaatgatcagagaaaggcgcggatcctgtagcatcagggaacacggggagggccctttaggccgtgaacagacatccagtcatccttctgtccgtctgaaagtgtttggcaaaagactttcaaaagaaagagaggctagatgtagagattccaggaagcaagaaaatgaaagatgaaagtaagaataggtgtagaaaccaagagaagataatgcttttggccagaaaaatgcttttccaggcttctttttttttttttttttttttggatactgtcaagaaagctgtgtttatcttactgaattctttgacctctgttagataaatcttgttttagagaaagataaaaggaaggaaaggcagactgtagaatgttgatgtgggttttattttgctgatttacttactatttttcagatgaaggctttggtagaggatggtattgtactcaggtcaggatccctactgtcttttagttctgtttattaatgtcatttggggcttttaaaaaaataattaaaaacctagagagcacctactttttgaaaatgtcagtattgaaggaataatagggttttagtattatttgtttgtggaaacatacttaaaaaagtttgcggccgggcgtggtggctcacgcctgtaatcccagcactttgagaggccgaggcgggcggatcacttgaggtcaggagtttgagaccagcctggccaacgtggtgaaaccccgtctctactaaaaatacaaaaaattagctgggcgtggtggcaggcgcatgtaatctcagctacttgggaggctgaggcaggagaatcacttgaactcaggaggtggaagttgcagtgagcagaggtcgggtcactgcacttcaacctgggtgacagagtgagagtctgtctcaaaaaaaaaaaggtttgaagaatttgtgagtgctgtggtcctagtgagttatcagattgcagtggggaggcagccttcaggagagaagtcagtttgtggtgataaattctcgacagctgacggtctagcgtgcacactgggaacgtgaggggccctgcgtgtggtgtccggttcagctgaagatggcaaagccagtgagagtaacacagtacggttgccttgtggctctttggggtgagtcagagtttaataaatattttaccggtggacccaggctgcatgcttttttctttcagcctgcaagtttaacaacgtggcatttgttggctgtctttgactgttaagacccttcatattcctaaatttttaactgatgtttttgcacacagagtgtcatgatacttataaaaatgttactaattgctcagaaaaaataacttcactttgaattgagactaggatttgcttgtaaaaagtctatatttctgctttacgatggcagttgtcacaaatatatgtggtctttgcatgacttcagttgtaatgctgacaaactatttaaaccaaaaaggaaggtaaaaacaggttcatgttaagtaagaacctttgctaggctttgtttcttgaaatcaatactcaattgcctaacaagagggtatttatgggtaatgtgtaggagacggtctgtatatgggcgcaggggcagaagtcaggagctttgtactgtttttatatgatctcaactgtttttgtgacttattacctgggaatggctgtctagaagagtcagttgttgcaccactagtgtctgttttatttctacatgggtgttatgggcgatgcaaacctgattttcttcgaatcggcctggcttcaaacagaaagaaaagaccaatttcaattttcccaccacatttagaagactgtattttaaaacaggaaaactgacggcaaattaattcttaatatgagtgcagaagaaaagagccttaggtgactttacctttagaacttgtgtaaaaatagatgggcaatgagaacgccttcaagtccagaaactgggtcagacaaaaaaaaaaaaaaaaaaaaaagaacggaaacaaacttataatacgtaatacaacagagtgtaaacaatgttggtaaaaattgaaagctacgagagatatgtgtagcatgcacacaaagaactagcaatgcccactttcactgttggcctcccccctccgtcttccatccgccaaatcaagaaagtgtgttctctttgccgcaagcgcggaataacaccgctgcagccaggcctcactgtgtgtggggtggctggggctgtctcagaaggaggcccattgatttgcatgctgcatgggtcattgctgcagagagtcctcatactggaaagcaagtgctgaagtgtgaagaacgtgcctgtttgtgtctcttcgctcagtccacaggcctgtgtcttctcctggcttggggctagctgttttttagaaggtttaaatctgaccttacactgccatctaatggaaaacatatctgttcagggtggcaggaattgtccgtgactgaaactgtgtgtttcgattcctcgatgaaaacatttcgtgagtttacacagtagggtctctgtcactttcagtcctaactctgtgctagtggatttaaaatgcaggcttggtttgaagtactcagagcgtatgttgctttttctgatgtgtctgagccgggacttcacttggaaatgtagaatccgaaatccagttattctgaacaaacgtaagagtttttactccgtgcttcattagctgtgttgatatactacctcttcctttcctgttactgttattaagggcattagcaattctcttcatttgaaagcagctcccctttcgcactctcctgcattgtcatctttacggatttgtagttgtgatcgtatttcccacctaaaaccctctggttctctgtttgacagtagaagtaccaggttcaaatctcgactgtttacatataacctctcagaggccatttcctcatctggaacatggaaatatttaactcagttattgtcatgggaatcaaataatacttaggaaattagtctgtaagatataaataagtataaataataaaaataatagcaaataacatttttgagcatttatcatgtgtcagaaactgctaggcttccacaagcattatctactctgatcttcaaaacattcctaagaggaaggtatggtgatccattcataatggaataacttctcgagattatacaggtggattgagcaaacatcgagattgaacccagagcctgtgctcttagccactgcttattactgctgcttcccgttgggaatactgagatgagccacctgtacttttgcagctgtgttacccatggagcttcatggactctggcattggtattcattttttgttttttctaactcatttatttcacatttttgaggtgtttgcataaaagatcagtatatttaggcatatattttgcaatagaatatggaatcaggatgccttcacctgcaattaagattgatttaaacaaaaataaaatctactttttcataatatacaatattcattgatggcagactccaaaggttggttgagtcagtcatgtcaccaagatgtgaggagcctgggtttgctggctgttctgttgcccttagcataaaacacatttccttagcaattgtggttgaaactggacataatgatgttctcaggcagaaagatggtgtctcttcttggtttcccttcttgaaagtatggagacctttcccagatgtgctccaacagaccttcctccgacatcactgttcaaaaacaagtttatccaatcaagagcagggggaatatgacaagcgcggttggcttatggtggttgatctctccccagttaaggggcaattggggggctgtgtttcagcagagagggtccagggtgattggtgggtcatagccaacagtgtccactagaaacaggctctgtgtgtccgggcaaggttagtcctggccttaatggtgtgatttggggaagattatttgacatctgtgttagaatttcaccatcttgaaaataatgtctgtcttgttcttgtaaggctgatttctgctataagtctcaatacatgtcttccaattaagatcagtgaaagagttttaatgtcttcagtaagaactctcagaataatcagctccgtcttaggggaggtggtattttgaccaagagatgtagtgcttttcaaattgtacctggcccagttcaggggcctgaaggaacgacgcatccgggtaggggtgctggcgggtgggtggggctcgaatctcagaatccagctccaggggcttgggcctccctgctcactccaatgcagaagccaagtctcaggctctgccacccgtgtcctcccagcggcctgtggtgcacgggatgttcatggctgaagagctgggagtgcagggccagtggggacctcaccagacccactgctttctggccaggggccccactgctagggactggctagacccatccctgctccttctgaggatgagggagggagggactcctgggggtaggagagtttcttaaaatcttaacagtccctctcctggagccctccactagacatcaggcctttatgttatgatataactgagagcagtttagatttgtaaaaataacaatttagtaatgcattgtaagtgagatgttaccagagtttaagtatcaggggaattttaaaaatggagtacagaatggaaagctctgagctgctggtttacattgttcagtaccatcagtaccaccaatttaagcattgtaactgtttaggacagagccttttctgtatgtgctgtgtacattctgttttttaaaacattttttattttggctaaacacgtggagtatgacgtagctgccagacccatggggactgtgtgttcttagccgtttctccagggcatgcagctgctgtatttttgagttttgtgtctgcattttatactttcttgcgttacttgctaccattgtgtcacagatcctttcttcacatcatcagctcttaacgctagcaactgccgttcattccctgttcgattatgggcagagaaacaccgaggcacagcgcagcaccatgggcgtgggggaggggcacagaagctgtttgacttctcagccttctttcgtttcttttttctcagctgtgtccttaggttacttggacttgatccctgctggatgaggatgtcttgtacttaaatcaggtgtgaagactgttgttagtaggaacttagttgataccagtagcgcattttgattctgttcagaccatttaactctctgaccaagtgaagtgtgagacaccacattgaatggccgtgtctagaaggaaggtcgacagaaacatggtctgcagccaccatgacttctgcccgcgatgacacgccttactaattggtcatgtcattctttctagctgagttgagacaaagcccgtgatccctcacacagtgctccaggcagatgctgcctgccggttagagcaggactgcagaaggaggcacttctgggtcacttagccggggttcagcatgtcacagcttagcctaagcctccactcagtctctatattcccccaaagctctaacttggaggcatggggtgcagataaataaagtgagaaaaacttccaaaggtgaaaggattttcttactaagtaaagtatgagaaccagcatgaagaatccaaaccaaaataaacttctaaaaactcaaagttctccacctccctcccagagactgctgaccggtgaaaaggaccagcaagtaatgaatgccacatgcatgtatcgggaggattcagactataaatcttttaactcgtgaagctagtgagaaaagatgcacgatcgactcagtctcggtggaagtggtgccacctcccaaaatctcatctgtcttcttttctgttatcatcattctaagcaaggcatcccccacccagtcaaaaaaggaacatagtgaagaaggacagtgttaccgaatgtgaatgggacgccctgtcctggctgagatgctcacgcagtaggcattagactttggagtgagtggcgtctcgctgtgcagggttgatagaggaactcctcgagatctggttttgcagctcacattccctgttcttctagggaccacagagggagaggatgtgtagagaggcaaggagggtttgtgcagagatatctgtggggagagctggggtaggccatgaagtgggaggatgcagagcatgtgaccgtcttcactgaggcctggtgagtgggacctccaggtgacagtgttccctgcagctgtgagacacagagcctgcatggacagtagaggtggctgcattttaggggtgttctccatgtccaggtgtgcaagcaccttgctagagagagtgggctccaggccattggaagttgtgcctatgggcactggtcacctgaacgtggaggggctccagcagggagtgtctgcggtaagactgagaccactggaggctgaggagtggcaataggaagcagatgcatccatgagtcatggctggaggagtcctccagagccctttagggaacccgtgaaaatgcccccaagactcaagtaggttcgaatacctggcaggcagagagcacagaccacctatggcagtaccaggcacaggccccgaaggacattccattcttgtctctctgtccatcccacccttaacctctacgagagagctgccatttttcccccaaacgagtaagcagcctattaactattgaccttggctgggaagagggaagaaaaaaatgttacctttgggtgaagttggagtgtggatcacgaactaagctgcctaatttctgaattgaggctgtgtttgtaatgaggagacagcaagactctcccagagaataccaaagtcatcggacctacccacattaaaattcttttggggtaggagtgttttccccactgcgtaactgttaaagagatactaccctatcaaatgatctgtgtctggtttataccttatgagttgggcttgtccagtgttttggggtaggggacacatcttagagggggcggcaaatcagacgaacaaagtaaaccccaagatggtggagaccaacatgcgagacagtatagtccctttgaggctgccgaagcgtcaggtttcatgcctagagtggcagaaatgagccctgagggacaagcagattcagttcatagacatgcttggatttcatcctgcaaatggggcagggggcgccagcaaaggctgccacgttgtgagcctcggtgggtacatctggcatcccagcatggaacctgatctattgtcgatacttgattaatagtcgaacgaatatataaatgaattgatccagaagtcagtcttaaacatgtaggcaagatgagggagcagcagattatgtatataccctgttgttatcacaagcttttcttaaagtcattctagacatggacgcaaatgtgagtgctttgtgattagatgtggttttattagtactttgatgatttcttagtatgtcttaaaacaactttcatctaggttttaacaaaaatcattttaacaaagtgatttaatattttagaatttcactgtattcaaattttgatttttatacattgaatggggattgatgtcatattttgataggtttaataaaactgtcaactcagccagatgtcttaatcctctttaaaccttatattcttttattgatgtaatttctgtatttcaactagtttcctatcttttctatataaaatcaaagtttaagtgatagaaaaatcagccatgatgtgggaaatatattttgtacatatatacaaacatgttctgggtaatgtatgattaatatgtattgttgtaatggttagtattcatatgtgttatactggatacttagtgataccttttccatttttgtcataataaccattgaaatatattttaaacgttttttcccctcagaagtaaattttcgcagaaggacttagaaatgctattccatggaatgagtgctgattttacaagtgagaatttctcagcagcctggtatcttatagagaatcactcaaacaccaggttagtggatatgggactgtcaactgtgaagggtttcactcagatgctaaagatggaattacacggtaactcgagttttaggtctggctctgcatacagttacatggttttaggtctgcgagctctttgactttgcgtttacccgtgaacatctcagggtgtctgtttccctgtttgtgcaatgggatgattctttagaggtctctcatttcctactgtcattttatgttcaatatatttcattattgatgcaggttattaaaaatttatggagccttagctggggacttaaactgacatgtatgaatgtgatctctccctactcaaataacataaaaattttaagttctggggtaaaacatggaacacactgccttctctgaccatagggcaaaggaagatgagttggtttatcatcatgtaaggacctggcttaaaattagcaaaaaagtagacaaggtcatatatccaatttgaaggttcccttctgtcttctaattacattttactctgtacaagagcaagtttgtagcttatttgcaagattgatttaaaataattatattcagcaaaaaatgtttggataaatcaatggtttattgcttaaaacttaaattattgataaattagtgtgttaaaatataccttaatataaatgtttcattcatttattagggtgaaaagcattactagaaaacatcaggaaaagttggcattttaatacacaggataaatttaacctgattgctttttaaagcaaatgtccaagatgaggaaaggttggcattttaatacatagggtaaatttaacctgattgctttttaaagcaaatgtccaagatgaattttttcattgtagaagatgattctgattttacattacagatgtagaatttctattattataagtcagaattgagctctgtttcttgtgtaggtctatcaagaatacgtttaaagttttatagccggattttcttagctcaaatggacataaaacttctgaaatacagaggcctgtctttagttttctctgctttagatattgagatgagatattgtggtcttcctagttatttaagttgtgaatcgacccacaggattcatgtaattttatgactaaggacagaggactggatactgataagtataacattatgcttagtgttccacaatgcttcagtgaatgtacaaagcagttccatctttgaaatgttgtctatcactggatgatctgtgtcttcttacctagtacaggatgttcaaaactctttatctggtaaattgtatatattatatataggttataaaaacatctacacatttacttcttaggggtctaatgtatttggaattaccatcgagggctccgaaagtcttgtagctgttgtaatttaggcattcataataaataaaaggtttagatctacgcaacaatttgaaagctttttgatttcatctggcttcgtatgatattaatctgtgtgctacttagcatcggttttagcatatttagtgttctccactgaaggaattattttttctttcttgcatgttagaagtgtcaaactttggtttctttatttcatttcagttttgagcagctcaaaatggcagtcaccaacctaaagagacaggctaacaagaagagtgagggcagcctggcctatgtgaaaggcggtctcagtacattcttcgaagcacaggatgccctctcaggtaaggcgatcctcagagccatctgctggcagcttccgccatggaaacccggcactgcctgcagggtgtttacagggtgtgacactcggtctgtttttatcaaagtagagatctcaaatgtgctataaatatttgttgcagagtaggctggcatctctttgaagacttggtactttaaaaatttatctctgaggcttttgttaacccatcttacatgtgtgaaatgggagactactttaactctctgtgatgtccacactccagggctgatacgaaattaaatcccaatgcacaaccaccaatatcttacatatgtgactaattctataaatgcaacccattgtgtgttcactttggaaaggctgatgataggataccagtctcttcagcccttatcgcacaggcgcccacgtatgcacgcaggtagctgtcactgtgccatctgtgtatgggagggacgttgtatggagtacagatgtcatagctttagacattttaatgcaagatgttggtagagttttttttttataaaactgcttttaattaatgaaagtttaattattgctatttagtaaaaagtaatctatatcaataaaagttaactcaattctttttaatagctaagatacttaaaactaaatacccatatagcttaagtatccataactctaaccatgcattgaggccacatcttcttcaattcaggaaggtaaattttaaaaattatttttattcctaaagtatagacattcttttattattttaaaagtccccctcctccctctctactaaaaatacaaaaaattagccaggcgtagtgcatacctgtagtcctagctccttgggaggctgaggctggagaattgcttgagcgtgggaggcggaggttgcagtgagccgagatcgcgccactgcactccagcctggtgacagagcgagaccccatctctaaataaattaaataaataaataaataaataagcccccctcttcctgtgccatatatacttaattgacctccaacacattaaatgtgtatgtgatgcagtgtatgtgatgcagcttcttccttgcaggtagaagttagtttttttttttttttttttttgagacggagtttcgctctgtcgcccaggcgggagtgctgtggcgcgatctcagctcactgcaagctccgcctcccgggttcacgccattctcctgcctcagcctcccgaggagctgggactacaggcgcccgccactgcgcccggctaattttttgtatttttagtagagacggggtttcaccgtgttagccaggatggtctcgatctcctgacctcgtgatccgcccgcctcggcctcccaaagtgctgggattacaggcgtgagccaccgcgcccggcagaagttaggtttttgaaggggtaaaatgtgaatgtctaagagggaacagagaaggtaggtgctcttcctgataaatatgtgtgccttatgtttcttgatggtgtgccattctttatttgtgcttattgctcttctctctaaattaccactgacagcacatagagcaacacagagagatccactattgtcagtggactatgtagactaggaattacatggttcaaatttgacagagctgatatgtaaagttgctcgggtaagttgtttttacttttctgttatgaaaattttgaaatgtgaaaagtggagatgaaagtataatctcccaagtaagggcaaggacatttatgtgcataatcacaatgatattatcatagttaaccaaattggcaataattgtttaatatcatctcattcccagttcagatttctcaaattatccccaaactttatttttataggtgatatgtccaaatcaagattcaaataaaattcaggcatttcacttaatttttaaatctcttaagcctcttttaaactaaaaccatcccctcacctttcttaccctgtttctggtttttctttttttttttttttcttttgagatggagtctcactctgttgcccaggctggagtgcggtggtgcgatttcagcttactgcaacctctgcctcctgggttcacatgattctcctgcctcagcctcccaagtagctgggattacaggtgcccaccaccacgcccagctaatttccacgcccagcctgtttctggtttttcatgctattgatttgttgaagaaacaaggtcatttgtcctggaagatatcccccactctgaatttgactgatgacttccttgtggtgtcatttaacttatttttcttgccattaaattgcttggactcatctaattggatattagataagattcactttcaacacttttaggcatggatagtgctgtgcttcctgtttcatcacaccaggcaggagtgcattcgtgtctggggtctcctgaacagacactgcagtggatcagtagcttcaaggggggactgggaacgaacaggtgagacagatagataaatatgtatgtatacacatacatacacacacacacacacacacacacacacccacacccacatatacttttcaaacctctactgtctctgctttattttggtttgttttccctgaaattctctattaagattttcatgttttattagcattgcattctaatttttaaatcatttaaaattcatgttataggccctttcgttatctgtttagtatttgtatgttctgtgtgatttttttaacattgattcttcagagatatcttttttgtgtttttaaaatgtgtattgtaattttcctccttagtagtttttagtaaatttttgttttcatagtctctgttctcatagtattgtgaacagagaatatgtttcttaatatatatttaagtttttgtaagtatgccaaaaattaaaaaggacggacggatgtggtttcttcagggtccactatttgatatagtatcaatgcctgattgattatattatttaaatatagcttatttatattaaacatgacagacaaatctctttctttaatttggattctgtcggcttttcttcatatgtaaagcatgtatttactttgtcacttttgatggtttagattctcttgatgataatatatttataagtagtccccaagattaccctcagtttggtgttttgctagaaggactcacagaactcagtgaaagctgttgtactcagacttatggttcattacagggaaattacaggttatagtcagccagggatagagattcatggagcaggtctaggaaattttcatccatggagcttccagtagtctcccagtggaattgcaggcagcactgactttcctggtaacagtccgtgccacacacatggagtacttgcagccaaggaagctccccaaaccttgttgtccagatccggagtctgtagtacggccccgtcacatggacatggtcaaggccgacttcaatcttcattccctcagatcaggctgatattgagtgaccctaagtcctcaccgtaaattccattgttagattatctagtgtggcccgtggtccacaggcaaacaaagacactcttatcaggcagaacatttcaagagtttagagattacctcccaggacctaaggacaaaggccagaccttttggggggcaagattaaattctttggtgcataataacatgatattaatattttatacccttccttttatatacattggcttgatatattatttgtaatattctttgtaaccttttagaaatttttcttttggcatgtgtcttgtgttgctacatgtggcaggatttttattttttattattttattttatttatttatttatttaaattatactttaagttttagggtacatgtgcacaacgtgcaggtttgttacatatgtatacatgtgccatgttggtgtgctgcacccattaactcatcatttaacattaggtatatctcctgatgctatccaaatactattctgagagcctttgctctgagttgaccagcagtggatgcctcctcccggtttccttctgttttcctgccattctgggatgtggggaaattgttctccaaatggttatcaaaggaaacgagctgtgtggttaagaaaaatgggggaacagaactgtagtcctgaagatggttatggaaacattggaaaatgtttctggtctgtgccatccttgtgttccagtgttgggcacaggggacaggtacaaatcagagcccttctctgctctttttttgttgtttttttctttctttctttcttttttttacatcatctgcattcttcagttccatccagtggactatttcatacccagtccaagtctggtttttttcagtccatcccaacccggtattccattagtagcttttgttcatccttaagtttttatgccattgtcggttttgtttcttcctgtgtgtccccacaggtattttaattagaacttgacaagaagtgtgtctggcataacacctgccaatagcaaccttggtatgtttagtacagttttttttctttattctgcaaaaatgtttctagcaccagacttcattttgccatggccttccctctgtcattcccttctgttcccttgaagtgggagtgacctgtgggttgttagcagatactgctcacgctggtcctcctgggtggtggtgaggttcctggagctgtttgtagtgtgaaaggccttcctgagctccttggtgcctctgggcacctcctttgttttggtggcgatttccctgaatgccccttgagcttgtgcatttagtgacctgtataatctcttgtttttagcggcaagtccagcattatcacttgcccctttcaagaacaactgtgggtcaaaactgtgtgagtgaatattcgttatggtacactggggtaaaaagccgaaacagactaaattacgcatgttcctccctgcgctctgtcttatttgtcttccttcccctgttccttttattgctgctgcttaactctgtgtggcttgagccgtaattgattttttgacacattctgttgttagtgtctattgatgtatgaagataattcaggtaggtatcattttctgggactcagttatctaagtgagaatcattcctgttactcttctgtgtaatagttgcaattattttactgtttgtttattttctttagtataatttgggaagaaaaggaaccacagattacgtaaccagtttaaatataatttatatatgatttgtctactctgataaaagtttggtaaaataagaaatagaaactaaatgtttgaagggctctctatcaatttaaaatattaatgcatcttacactaacccttcctcttctcctactttagtaaatataatcctactcagaggtcagcatgtgagccaaattaggccacagcctttgtacaggccgggagctaagcatggctgtgttttcccatgctaaaaacaaaaaaagaagaatatgtgatagaggccgtatgtggcccacaaagcctaaagtgttgactgtttggttcttcatagcaatagtttgctcatctgtcatccggcttgaatattcctgtctcacacaggctagcattaacatagattggttagagcatatacatacttctgtgcccaacactggatcctttagatactaccctacacagacattattccttggtgcctcgtttaacaatgatatttacataaatgcatggatggatattatgaatttcttattgtaattgcaaatttgatatctacattttatttgagtgttaaaatgatcaaataattgtagtgaagtaataggcagtctttctataaccttgatttttctttgagaagtactgttgtacatacttttttttgtttctcaaatacaaacttataatgttcaactgcttcacatatttaagttttaatagattagaaacaataacaaacctatgatcatgtaccaagttgcttattgagttattctacttaaagatgttttcagagaaaataaaaggtcaagtgaaccagacattgggttatttggtttaattttctggaaaataggattgcctttatcagatcccagtgtctctcagtcctcatgcttggctgacagcttggcagtggctctgctgtggtggagatgggcggaggaagttagtctgtcagcaaaaagggctgtaaactgagccggggggccagggtcacctcatcttgacctgctcatcagtgatgggttttgtcagcatcagaaaatgtggctacatgatttcctttaatgctaattttgacttagaaagcaacctgtggagcagggctactgtggggtgtgacatctcagcgcagtgtctgttcattgcagctgcagtgggtgcccactcggtgcagctgcagtgggtgccaggtgtccttctcagccaggactatcagaacatcacagcagcatttaaaccaagagggagagcagatctgcacacatgcagcatggaagtctttccagtttagctttctaatgcttaggcatagtccatctcctttccttacagagagggaaggaagttcctttccgtttcagctttctaatgcttaggcatagtccatctcctttccttacagagagggaaggaagttcctttccgtttcacttagtaagttgaaccccagtttcagctttggtatgtagaaacatcttatgtcactgttaccacacaattcaaattttgaaacattacagaaattactttctcctcactccaagtcaaccaagacaattcaactgcagtagctgggttcttccccaaatatactccttctttctctgaatgtgtttctttgatagaggagcagtctgtttattttagaatttcaaagaaaatttgaggtggcttacagaaagaaaaaaagatgaaaaataacaagatcataattagaaactaaaaggagcagagagatagatattagcaggcattgagtgtgtattcatagtgcatttgagaaccgaatttactcagaattttctgaccaattatctgaaatgcttgggacccagcaatgtttcagatttcagattttttcagatttttaaatatttgcattacctagttactggttgaacatcccaaatctgaacatctgaaatgtgaagtgctccaatgaacatttcctttgaatgtcatgtgagtgcttcaagtttcagattttggagcattttggattttcggattggagatactcaacctgtgtaatgagacccaggatgcctcaagtctcccttttctttttcaattcaactgtttttaccacttgttcttgaagacagatgattatgtgtgttaggtactattttaatagtgttaaactgtgaataacttagactggtgtctgctgggtaccttgtacagggtagcatgtttttgctgcttttcagcagtgaaaataatatgaccattttaaaaagctgtttaaaaatatcattttgatttaatgtatctccacccattaaaatggcctacattttaactagatttttttttctagccatccatcaaaaactagaagcagatggaacggaaaaagtagaaggatccatgacgcagaaactggagaatgttctgaacagtaagttttgtcctactacccagaactatttatggattttacaacatgctttaaaattagttcttggacctgatatcgcgggacaaggcagtaagttgcattttactatttatttctaaatagtagtgatttaatgaacacaaaggagaatagaaacattgaaaatgaatgttctgtttctgcttgcattttatttatgagaaatcataatttgaaaacaatccaatatacttcttaagaaataaagtttcctaccctaaaaccaaccagcatataaacagcatcttcaaagcgaggaaagcactgaagcagtagccaggattgtcactgaccagcaacgtggaggagccatcatcaggcgtctcccagcattaatgcaaataacctcagccacaagagtaacagattcttaggggtcatttatttgtgtataacttgcctttttctaaaaaagaatttaaggcagctggctatttaagaaggtgtctaaatctgagatattttgtaaaaattataggcccagggaaaatggctatgtgcaaagttttgagttctgtccacgtcccttgtctgtcctttttctgatgtcctaggtcccagctacttatcctgctgatttagaagaaagtgatcagatgaattaatccttactatgatgttagtggcttaaaaataagtcatttaaaataaatcttttcacaactatagtttacatttgataggaatgcccatgggcatctccttaggtttaaatataatgtacaatctcatcaggaagtagagttaagaatcattggaagaatgaaaaaacctcacaccagatctttaaaaattctgtgaatttaaggctgtgatgtgaagctagttttgcccttccggcttaagtgagtcccgtgggtggaacgttctgagcctgtatgtgaatatcttttcacaaacctgagtgatccctaaaagaaagcattttctagaaagaagtgttctcttggtagtagcatttgaggacttggatttcattctaaatttaggaatttaacagcacttaattttttcctctgattattattacttaattgccctgagatcttcccttgtttttatctttgagaaccaagtcaccaatgttgttaaaatgaagatattctgaatttaactcaaacacttattgaagctgtttctatattagcatagtcagacattttaagatcttggaaggatattttctactcaaggatgttatttgccctggagaagttatcaaactatgatatctgtataaaaaacatgtttacttcagtaattttaaaaaggtggcttataggaacagttgacatagtaagtatatgatggtatcagagaaggagatccttgttccggtttgggaaattctagggtctgtttcatgtgttaggcttaccatagtgtggtaatgtgattttttttatttctttgaagcagtagtttgagaaatcgtcccttgggacttggggtattaaaaattgcctttttccatatattcctttataaccatgaatttttttttccagaaaagtgtcgtattaactttctattgaagtttgctctttttggataaagttcagcttaatataaatggtcacttctttatgagaccattcgtcaggactttttgctattaaaatttccctaaaatacatttctttataacaattcccccttttctagaaacattttttaacaacatgatgttgattgctgtcttaggatatgtttttcctaattcaggtcaacttgacagacgtttatttaactctggttgtgtcaagccccgtgctaagccagcctgggagcaaagccggaggggatgcagctctggccccgagagagtcccgcccaggcgggttcgtagttatcagacttcagtactgcagaactggtgaaaacagaactaaagtcacaaagattcagtcagttctgttgaaaattgaatttattttgttgtagaaaggaaggaaagcataaatgagtatgagtgtcatttacttcacttagatgattactaatgctttttacctgatgtataattatatactaatgtatatggatatttcttcagtttttttaaaagatttttttttaaattgggcaatctttctgacttttaagctaagtttctaaaggatactgttggctgcaggaaacttaggtcatttattcagagtttatcagttttgacactttcttttgaaattgttaaaaaaaagaaattgttttttgttttcatgatatgtgtttctcatgtctgtgtttgaacttaataacttattcttgatttcaagccaatgatgactattagtttatttacatcaaatttgcatattcaactctgtgttcttacctgtttcaaatatatagaacagcattgttcaatagaatttctgcaatgatgaaaatgtagctactgagcacttccaatgtgactagtacaactgaggaattgagttttaaatttttatttaattttaattaattctgctttaaattgaaatagtcccgtgtggctggtagttactgtgttagacagtgcaggtgtagacatgctgtgtaagtatttgtagcagtagctgtggcagtcgtagctcacgcttgtggagggcctactgcagggcaggtgttgctcgaaactatctaggtatatttagtcctcacaacaacactttgaggtttgtgctgttatcttcgctttattgatgaaaaaaactaaagcccagaagattaattgagccatgtaaggttatgtaagtagtaagtagcagagctgcaatttatatccagaaatatggctccagacttgtgctttgaactgcaggcaggccgtgctgtgtgtgtggttttgataggcgcaggtttcagtcatcacggttcagttcatgacagccgtcccccagcaacaccgtggagaactgcggttcccacagggcagtcaccatagctgcataaagtacagttcccctccagccctttaattcacacgtcgctgtgtaaatgacaggtgctctggatgatcagccacactgcctccttcaaggccaccagcgatagtcactgtacgtctgttaccagttctcagcagacagcaaagtgtgcagttgtgctacctccttatctcccagtgacaaaccctcctgacattttacaaaaatggatgatcgggaagggattggtcgataaagatgaaagtgcatcaaaaaccaggaagctctaacactggaagtgaaacgcaaatccaccaaatggagagtgacggaaggaatagctggctgtggggatgtaggtcctcctgtctttgagactcaagagtaactcagtggaggggaacttcccaacaaaggtgagcaaatgtgaagaaaagcatgagatgtcccaaaggaagcaatgctcagagaacctcagagatgtttcatgatgtggacggtgcaaaggaaaaaatatcagaagttgattcacgcttagaaaggagcaggataatctgtcagagcacagaaaagaggcttgattcatattgtaaatattacaacaaaaaagaaggcaaacactcttgataagtttttctacaaagaaatatgacgctttaattttaaatgtttctgatgttttattttttattttttttcttgtgatgtggagattcttttttttattattatactttaagttctagggtacatgtgcacaacgtgcaggtttgttacatgtgtatacatgtgccatgttggtgtgctgcacccattaactcgtcatttacattaggtatatctcctaatgctatcccttccccctcccccaactccacgacgggcctcagtgtgtgatggtccccttcctgtgtccaggtgttctcattgttcaattcccacctatgagtgagaacatacggtgtttggttttttgtccttgtgatagtttgctgagaatgatggtttccagcttcatccatgtccctacgaaggacacgaactcttccttttttatggctgcatagtattccctggtgtatatgtgccacattttcttaatccagtctgtcattgatggaaactcactcaaaactgctcaactacatggaaactgaacaacctgctcctgaatgactactggatacataacaaaatgaaggcagaaataaagatgttctttgaaaccaacaagaacaaagacacaacataccagaatctctgggacacatttaaagcagtgtgtagagggaaatttatagcactaaatgcccagaagagaaagcaggaaagatctaaaattgacaccctaacatcacaattaaaagaactagagaagcaagagcaaacacattcaaaagcgagcagaaggcaagaaataactaagatcagagcagaattgaaggagatagagacacaaaaaacccttcaaaaaatcagtgaatccaggagctggcttttgaaaagatcagcaaacttgataaaccgctagcaagactaataaagaagaaaagagagaagaatcaaatagatgcaataaaaaatgataaaggggatatcaccaccgatcccacagaaatacaaactaccatcagagaatactataaacacctctacgcaaatgaactagaaaatctagaagaaatggataaattcctggacacatacaccctcccaagtctaaaccaggaagaagttgaatctctgatgttttaaattgtatattaaatattagttgtactttaaaaaattgttattcattcgtaaccaacaataagtgagtttttaatgtttcaacaaacgtttttggatatcacagaacaaatgtaattttcccattgattattagatggtcttgctggattttagcttgcacagcccctgtcatagccctgcacactgtgcaaagccaggcctgcccatggggtgttgtaccacctctctgagtagtaagaatactggtcattgattcagacagcaatttttagtccttcctctgtaagcatttattgagcacatgtttgttttatcctagggatataaaaataaaacttgtactttacttctagagattataactgaatggaaaatacacatattcgggtgatcaaatgatggtttgataatactgctctggtgggagtcctcaggtgtggctacagcccacaaaaggggaagcaagccaaaaagttgagtgcagagaataccaggggaggacacaggagccttaagagaggagcaggaagtacccagacaagcagaggccggcggtgggcggctgagtggagggaggcaggtgtgtccccgcggggccagcgcgtgagttcagagacaagcagaggccggcggtgggtggctgagtggagggaggcaggtgtgtccccgcagggccagcgcgtgagttcagagaggagataggccgcagcccaggaagcagggtccagtgtggctgtgtgcagataggagaggtgtggccgcagggtagacgaggtctgcccctgacgaactggctgtgcagtagtgtggaatctgtctttattctgaagacaaatagtgagccatcgcagaagtttaacagaacgataggagatttttaaagagcaatctgccatctgtatagagaatggacgagaagggaggtacgccagaggcaagaggagagcagccagaagtggacggtaggcatgttaagccaggtcagcagtaatgtgtgtagtaatggaataaagtaacgtgagggtgacgtggctgctagtgaaggtagagcgagtggcaggtgagaaaggtgaagggacagggaaggtttgacatgttacatagggaaaaggaagtagtcattggtgatttacagatgtctggcctcagatggatgaaggagcacgtttggcgcataaggagaggcatagagatgagaacattcagttcaacatgttgaatttgagattcctgagggtcgtgctgatgggttttgctagctctcactatgtccccatgatgtcacactgggcaacttgaataacctctgtgtctcagttgcctccaacataaaacgggggtaaaaacagtgcctgtcttacagcgacataaccatgtgcaggtgaactaatacccatgagggttttcgaatcacacctggcatagcatcagtgcttcctgtcgttattagctgtcattattgtatgtccagtgaaaatattcctgtcattattagctatcattattgcatgtctagtgaaaatatttttaaggattggtcttacgctcgcaaacacatcttgaaacacagatttgggagtcaccagcataaagatggtagttggacaaacaggattgaatgatttaacccaagtaccacgtgcaaaatgaaagaagaatgctaaggatttggaacactagggaatatccagaagggccaggatgtggaaaagaaactgacgtttgctcagtggctggctggcaaatatttcacaacatgcattcaaaaaaaaaaagaagaagatagaaaaaattaacctaatattagcatttcccaatttccaaggtgtaaatactcccattggggttggtttcaagctgccaactcagcttggaggtgaagagatactgacagttgctcttgagaggggtacgtgctgacgtcagctctttcctcagttccatctactccacacagagtgtcaggcatagtgctgtgaaacaggctttcagtactgttaatgatcctgtccgtatagcatcgttatggtatagccggcagcctatctcgtcattttctagcctgttgaaattgaggtagttaggtctctttgtgaatttgtacattttagggttactctgatattccaggcaccctaatgtttcacttcctaatctcattcaacttgcttattcctgggatacattgtgctgtggtgggtggggtagcaggtgagggggcgttccttctgtcctgcctctgacctctccaattcacagcaagtggagagcagattagaaatcacttccgtgatctgtctcaagtgtcagtaccaaggaaaggaccaaatggtcactttgaaataagagaaagcataatatttactttaaataaacatggttgaaattataagacaccatcagaattacaggactaggttttctagatgactggagttcctggcacatacaaagatgtttgttccgttgttaaggatgtaagatcactgggcaggtatgagttccaccgactggtgtgtaatgctacctggactttccttcccatcttgcactgtagggaaattttactgctccacagacccgactacactggtggcaaccacgctgtgtttacatcattgctgttagttcttgcagttcctgtgtgaccgagacagtgagaggcattgtccaaattcactggtgctggagaccatctttgggtgaggagaaaggaccaagttccagaccttggtttgcccaaggctggcaaatagagatcagggtttgtcctacagcctatgaggccaaagtcatggccatccactccaggtggacttgttctgtggttggacactgatgttcaaacccttaccagctgccttaaaattgggtgttcttggtgtgagaatgtgtgtggatttgcacacggggtgttcttggtgtgagaatgtgtgtggatttgcacacggggtgttcttggtgtgagaatgtgtgtggattcgcacacggggtgttcttggtgtgagaatgtgtgtggattcgcacacggggtgttcttggtgtgagaatgtgtgtggattcgcacacggggtgttcttggtgtgagaatgtgtgtggattcgcagacggggtgttcttggtgtgagaatgtgtgtggattcgcagacggggtgttcttggtgtgagaatgtgtgtggattcgcacacggggtgttcttggtgtgagaatgtgtgtggattcgcacacggggtgttcttggtgtgagaatgtgtgtggattcgcacaaggggattttatgggatgacctttgttgatgccttcctggtggcgttatctgtgacatcagcctcacatgtgaagagcaccccttttcttcaatagttttgttttcttattagtagccctaaagaagaaagacataaaatgcattttgtgagctactggtgatttttatctatttgcacaaatcttggtttcactgccctcatgtattttattactgaatacattatctgataatcagagttaggaacttcagttttattgtgaatacaattaaatttacagcagaacagtaatttacagacagaagttatctctaaattaaaaattataatctcataacttataatttgtcagtattcacataaaattttcaacatataagtacatgtattttggcataaataaacataattttatagtttataatttctgcatataaatttttctctgtctctattttatttaattataagtgagttttcttcctgtacttgttttcatactttttagagaagttaaaattattagttgataatattttacgactttaataagatgagaaaaatctaattttgaattcatactttttgccccaaatttcattatactaaaaactaataaaaaatgtaaaacaacagtgcttggtgatttaacatccaaacctaacatataagtaattaaccttttaaaaagatttagtctcctttacatatctattcatttatgagcctcaattcttgaaatttatattttttaagtgataaatactttaaaatagttttctttgatgaccaaaagttttaaccctaatcagatttcaaatactaatttagcctccattgtgtggtttggtggcaagaaggaaatatattttttctcatcttataatagaaatgtagaattctacttaaatagcatgtggtgaaaacagttatcttgacaaaacaaagtttttatatgaggcctttaaaatttcaacagaatttaaacattatttagataaaacaatcatgttacaaagatgacttttaacaggatcaggccacccacagtgtgctctagagaatattgcatgcgagccacccagtgagactgaggcaattttttcatctttgcttaaagtatagtcactagaccagataatgcagaaactttttacaagcagcgatcaaacaggcaaaaacagtttatcttttttctctcctttcgttgtggaattaaaactaattcacaagttgcaaaatttaaactgtttttgtacacagcaaattttgctttaaataaagcaactctttcattacagtgattcatatggtttggggtcttttaggtgaaaaaaaaaaaaacttaggaaatgtgcagctcatgtatacttttataagattagctgatttaagaaatattcatgatgctgccttcacatttgtcatttgtaaattacttatataattttctttgcctgctacgtagaggtaattctgccaaggaatagaatttgttttaaatatttctattgagcaactttcctgaaaatgatttccttgttttgtttattgtcccatatgtagatattgagtccgcagaatttagctaatgtacacgtgtatgcacatacatgcgtatgtgtgtgttttaccctattgtatgaagttctgaaataacctaagggcccataattgctatacagtttagaagtgtaatgaaaataaatgtaggttcacattagagaatttatttgggcatggtaaatatggtgctttttatattggataccattcttaacatatgaaaagacttaggcaaaatggaaattttattttagcaaaccataaaagatcccctaaactgaaaaacagtctgagttttaacgtaaaactacaatagcagtattaacattttgtttctagtgcccagttacacattttctgattaaaatcagctttcatctaagtttcctttcctctttttaaaacaggagcaagtaatactgcagacacattgtttcaagaagtattaggtcggaaagacaaggcagattccactagaaatgcactcaatgtgcttcagcgatttaagtttcttttcaaccttcctctaaatattgaaaggaatattcaaaaggtagagtacatgtttatttatttacatatggttgtagatgtcatacatttttaagattttttaagatgttttttatattaaccaaatgtcttcattttgcattactgacagttttcaaaatgtttctttattttaaagggtgattatgatgtggttattaatgattatgaaaaggccaagtcactttttgggaaaacggaggtgcaagttttcaagaaatgtaagattcatgtattacttttagatcttctcctttccttttataggaagaatgtggaatgtgttctgcaaagaatgttatatgagtttttagtttttgtttatatgaggctctctttacaatgtaaagcaattacttcagaaataacagtatgacttttcttatttgatacgcagtgaaaatgagcaaccacgactctaggttgttcgcctgagacgttctctgccgtttgttaaccatcacgctgttagaaagtcttagtttactggaaggaatcaatgacaagtattttctagagatggaaacctacattttaatcttcccgtcttcagagagacccatagactgaagaattccaacctcctttaaaggaagctcagcaacttttgaagttatgtctaatgccagagttacagtccaccaggagaaatatcacagggccttattaaatttaaaaatgaaatctgtaaggacccagaaaactaaatttatttttttattgtggtaaaatatacatgcagtgaaatgtacagacctcacatgttagaggtcagtgagttttgacaaatatgtacacccttgtaacctacatcggagatagtgttctgatcactctagacacggccctggtgcctcttagccctcaccccacaaaagcaactactattctgctttttgaaatttgatattaaattttcattctgtaaatcttgtgtattcttttctttttaaatagattatgctgaagtagaaacaaggattgaagctttaagagaattacttctggataaattgcttgagacaccatcaactttacatgaccaaaaacgttacataaggtaaatcttctgcaaacattttgttgaatcacatgtatctgtttggtactgtatgcatcttgtaacccttaaggctaacttgagggactttaggagattgatgaaatggtgaaggggaagacaaatagcagaaatttagggttatctggtgtaggacatcaaaattcttttgaatactaatagatttgggagtagttatggagttactcactttttgagaaaactctgccattttcgggaaaggaaaagtagtctcaacctcttcctcctgctgagtaaaggggtaccttgcctagtgggatggtgtgggtacccataatctgtgaaggaggggctccctgcatggcttaaagcagaatactgtcacacactgggtgggaaatgcattatgccacaagaatgtgctgctgcttaacagcacagtaagttctggaaggttttaaccttgaatagctttctgatttccaagcctttagtggtcagtgaaagagaaataaagtcactaagtgagcatactttttaaaaaattgcagtaatattgggccgggcaccgtggctcatgcctgtaatcccagcacagcactttgggaggctgaggcgggcggatcactaggtcaggagtttgagaccagcctgaccaatgtggtgaaaccccatctctactaaaaatacaaaaatcagcctggcatggtgatgtgcgcctgtaatcccagctactcaggaggctgaggcaggagaatcgcttgaacccgggaggcagaggttgcagtgaaccgagatctcacaccactgcactccagcctgggcaacagagtgagactctgtcttaaaaaaaaaaatttgcagtgatattaagagaggtgaatttcacaggatatgaagagaaggccttagagagaaacagtatcacataatgggaactagctgttaactttgggcaaccgacttgagttctatttttcggtttcttcatctgaaatggacatggtaatcaaatctgcatctcaggatagttgcaaagataatcagaaatacatttaagggtttaatacctcacccggcacataaaaagtagtcagtaaattttatgtacatgtagtttatgtcagggtttggagataaagcatataaattttaagttttttatatctgtgattaaaaatattaacttcattttctgctaggattttttgagtatggcctttgttctcagaataaattattttccaaatttaatggtttttccacttgaattagtgaagtttattgactattcagtggttgtaaaatgacagactatgtatttatgaatttagctgtggtccccatgtgacctttgaaaataatgtctcaggaacagacacagtggcccagacctgtgatcccagcactttgggaggccaaggcagaaggattgtttgagtctaagagttcaagactagcctgggcaatatagcaaaacctggtctctgcaaaaaatcaaaaattagccagatgcggggatgcatgcctgtagacccagccactcaggagcctgaggcagtaggatctcttgagcccaggagttcgagactgcactgagatgtgatcgtaccactgcactcgagcctgggtgacagcaagatcctgtctctgaaaagaaaagactgtcttgaaaagagcgtctggcctgaaagctgctgtgtgtgcaagtgtgaacgggggaaaagatccgcacctggacctgtgtcctagtgatgaggcgtacggcgggagtatgagccgtcgtcattggcagcacactagtattgcccaggaggaagcaagcagaggcagtggcggtgggatgaagagagggtgctgtgtttgcatgctgccacccctgcacgtgtgcagcatgctcaggcgctgtgcgggatgtgttctacatgtcctctctaatcctgatcaccaccatgaaaggacgcttgtgcggtgcccattgtacaggtgaaaacaccgaagcttgcccagcacacacagtgacccgggggacgggacgcctgtttggcttcagagcccactcttgtttctctctaagctgcctccataagaaagaatgtatataggggattttcctggtttgtagaatcctagaaatgtaaagctggaaataaaccacacatttgtcatccaactgctttattttctacctagaaagcgacagagttgcagggaggttgagcgtagtgtccaggacacgcagctgggtagcctcagacgtcctgaggctgctgtttcctgccctgctccttcactgcgtgtgctttgtatatttctggcctgtttacacttgttatgttaaacttgcctatagtagtgtgttaaatcttgttgagtgtacaaattctttatgttgtgggttaccatctatatggataactcatgtgcagtttttatgagtatataacttactggatatcgtttaaaaggtggtagtgccaaaaaagattcttttaaggagccttttaactacgatttttcctgtcatcttaaaggcaaaagagcaaaaatataaacaagtcaacaatagtttatgtatttgttaatgattattttatttacgatgctttgagaaaatactgagcaattgttacctttttaaatgaaatttttagtcgctaagaaatagaaaaataagatcagaaccaggtcaaatacctgttggactttgaaatttatgagcatcaagtaggaatagagatagctttatcatgaacaaaaatgtattagttttcttacataatccagattatgcatagtagaggggaaaatcagattaccactatattgtcttactgttcacaattttttctaatatcattcactattttatctaatttaaaccttccctattcttctccctctccttatttctatcttgatgttggcaggaagcaaagctctgcatattcctttccacagcagtgtgatcttatccctggtagctgtgagaagatcatgtcagaatatgactaaaaacttcctttattcttaaattttaaaatactgagcctgtgttaatcataattaacattctttacattgcttttgaatctaaaaagcctttttaaagtgttcttaatatgcagttttaaaagaaatggcgataacatgtatcattctaaacagagttttgaaatgtaactacttatttttagctgcatactgaaaggaaacaagaaacttatttgaagagcccagcacaagttgtcatgcttttgaactgagtctagaatttctaaaagaacaactttatcttgctttgtaaaacttttataaactcctttactttaatacccgttaataagatgatagaaaaagtcttttgttattaggttttgcaaggacacagtcaacattttaaagagacgtataatgtaaaaagccactaagcaaagcttattgattcctcttgctgtactcctggagaaagaacccttgtacggaactgtctacactcctattcagtaatttaaacattaaaaggaacaccgtccctaaaagagtatctctttattttactactaacaccaaatctgagggctacgtgagtgaaagtgttaggagaaagcgttgcagaggtgttgggaggcaaaacaagcctatttagggagaacgctgaaatgcatcatccccagcaagaaagcatagaatcacgttctttgggaagaaagacacagtgtactatttgttatatttatcgttcaggtaataaaagaagaaagccttgtgtgagagaaagaatcagactgcattttggaatctgaaatgaatcccctgtgccaagctaaatgtaacttgttagattgtagttttcttctcaggatactattctcatttatgaggaggagtgctggtgacttcttaatctgagtaaagctcttccttctaattgacctgccactttctcagcacagagacacatcctgtttgcaacctgtaggtggtcacaagggggaggagatggcagctctcagccacctctgggcagcctgagtgtggcccgtctgcagatgcctggatatccggctccccacagcacccagtccctccccatcagctgggaatgtcagtgttctcagcattttatttgttgctaacatattacaaagtggatttgtttctcctctgattggctgctgattgagatacctgagtaacacacactcactactggaagaatgggctggaagcatgggtgcacccctgagggattgaggtctggcccaaggtcagcctggagccattgatgatgatttaccactgaacaaaaacctctaacccagagacaaagaatggcatatggcttaacaacagttttaagacaataaattcatttggacatgcttttggagttgatttaattggatttagcttgctatatttatatattttgtgagggctgagggccaaatcttaaataatatttgacagaaatttttctatggaagtaaatggtctctatggatttgggtgttttatagacaaagacttgatatattttaagaatatttagaaactaagaaaaacaccgaactatactatatttcctagagaaatattttctcagtcgtgagtgtggactttagaggtgagtgttgtcaccaaatctcttcacagttcggttagccctcatttagctagttttagaaagcggtgccatactgccatctcgtggccatatttcatatcagaaaggaattaaaaaacatctgaaattttaaaagtatttgcccagtatctgctggctcccacctgtgtctaatataatgactctgaactaagtagaaaaactcctgtgaactaaatataaatataaagaaaaatgctcatcaggtagataggatcactgcaaattgtccttatctttttacaaagagctgtttttaatagttttatcatttatatgaaaaaattttaaagctctgctgtttatttttttattttttgtttgcttgtttgtttgtttggagatggcgtctcactctgtcgcccaggctgcagtacagtggtgagatctcagctcattgcaacctctgcctctcgggttcaagcgattctcctgcctcagccgcccgagtagctgagattacaggcttgcaccaacacacttggctaatttttgtatttttttttagtagcgacggggtttcagcacgttggccaggctggtcttgaactgctgacctcaggtgatccatccacctcagcctcccaaagtgctgggattacaggcaggagccatctcacctagccaagaaatttgaatatatttcattgagaattaaatattaaagactaatatttgacagggcacaagactaattgataaaattttagcctttaaaaagtaatgattttaaaatatgccagcatttccctttggcctcaaccttggacttgctttttcaggtacctgtctgaccttcatgcgtctggtgaccctgcttggcaatgcattggagcccaacacaagtggatccttcagctcatgcacagttgcaaagagggctacgtgaaagatctgaaaggcaaggatttctcttccaatgtgttgtgtgattccttcatgtcattttgatgcattctgggaatgtttaatgatgaaggcactgactacctaatttacttggtatctcttattattgtcttttgcttgttttgtggtttttttggccactggttagcattgtactaatgaaaagggacaactcttttatcatgtctgtttttgcgattggtggacagcgttgacgtttcggggcaggcagcgtgatgccgaggaggtgacattggtctttggtaactatcagtctgcacatcgtctcgtcaggtgtatgttgagtcctgctctgtgccaggcactgcacccatcgctagtaagacatagctgctgcctcccagagttaccgctagaggaaggaaaagccactaaacatgtaactaaccaaataaaatgctgggacatgtgatgaaagaaaaaaagaaaatcaagatgttccaaaagggagtaactgaggagaatgctttagatggctggtgtgggaatgtctcagagaagcctccgtattagaactggaaggataaaaggtagcttactagccatctcagcttgagaaagggaccacctgtgtggaggccctgagggaagctgggggagagaagtcaaaggtctatttgtgtgcaggtgtattggcttttgtttgtatactatcatttggagaatattgagtatattgaatgcctgctatgctgcagacactgttgggtgccaaagtcacagtagtcaggacaacagacaagggcctagctcatgcaagctcacaaaatagtagggtagacagataaccagccagctgttagaatattgtgtgctgtttcatatgactggggaagttctgagtgacattggagtgcttaggagtagcctctgatccagggttttgaggtcaggggagtgacattctgagagctgaagggagtgacatctcttttgagatcagaagggtatctgtacttgacagttgaaatagaggaggaaagcatttaagacttccaggaagggagaatgtgcacaggttacaagcacaagaaggcctctgaatcctgtgtggttggagcttagatcgtggaggtggagtgaagagacgaactttcttggctgctgtgacaggtttggacttcacccagagtgcgatggggagtcgctgacggattttaagctggggtcaatggattgggggaagacaagctcagacttacttttgaaaagatgacgactctggccgcccatagtgggtggatgagagggagcaagcccagagcagtgaagctggtgaggagacaggcaccccacctgatgtggaggtggtgggaatgtgaagaagagcatggactccagggccgttcaggaatagaactgatagggctggatgatggacaaatgaagaggaggaagggatgagcagtgatttccagatggctgactggcagctagttagggtgatggtgccactgagttagggaacataggggagaaaagtgattccgcctctttgtttggacagcttgacttggggttgtctgacatgtaagtagagatggaagtagttggatctagagactgagaaatttgagcttggtgggcatacaggtggtcccttggaactcgtgcatttacccaagaagacgaaaaaagaagcaaactcaggaaagagtcctgacaagtgatgttttaggggctggtagaagaagagaagccttcaaaggaaacgaagaaggggtggtcatggcgggaggaaaacagaagggagtggtcagcaaaatctccaagatgaagcagaagatgaaagagaaatgtccttaggattgctcttacgctgttggtggtgactctggcaaatgcagggcctgagacctgagcccctaactggatgacatgaaaaggagtaatggccctcatcaggtccctgggaggatcaggagctgtaacaggagagcagtcttggtagagaaggaagtacaatggagaggtcgccgttgtttctttctagcatagttttgtcatgaattagttggcttggatttgagtactttccagctctgatgccatttttttctatgcttggtatttaagaaaacccaggtatctctgctgaagccatgtcaacatccccattaatgtcattaattattttatatttttagcaagtgaaaatgacagcaaatgttacacacagtctgcagtctttgggaatatttagaaagccttacatatttatttctctgttgattcaaccaataatttttgagtctactctgttcggcagagctctcaaccttaagggcccatcagagtccactggggattttttttttttttttccagacagagtctcgctttgtcgcccaggctggagtgcagtggctcgatctcagctcactgcaagctccgcctcccaggttcacaccattctcctgcctcagcctcccaagtagctgggactacaggcgcccgctaccacgcctagctaatttttttgtatttttagtagagacggggtttcaccccatcacggtgttagccaggatggtctcgatctcctgacctcgtgatccacccgcctcggcctcccaaagtgctgggattacaggcgtgagctaccacgcgtccactggggctttttaacaaccagttatcaattcttggccttaccccttccctccgtgccaagcacattctaatctctgtggctggagtccaggcaatttcaagctcccgggcgattcatgtgcagccagggctggtcaccagggtgctggctgctgtgccaggagccggaagtgcagtgcgagctggcctcttggagcttgtggtctagggagaaacacaccatctaaaaaatcacataggcatgtattcagttggaatagtgaaaagtgtgaggtagtggggagtacaaaattgtatgaaaatgtatgataggaagggtgcagtccggttgaggggaagtccagggaagttttctagaggaggtgaaatctcagttgaacctaaacaacgacagtcagttctccggatcggcattgagacgcgttccagacaccgtgcgggtgctggacagtcagttctctagatcagcattgagaagcgttccagacaccgtgcaggtgctcgacagtcagttctctggatcggcattgagacgcgttccagacaccgtgcgggtgctcgacggtcagttctctagatcggcattgagaagcgttccagacaccgtgcgggtgctcgacaaatgtcactgctctccagcaaaggtggtgatgaatgcagtcaccatattcactggatacagataggatatgtggtctgaccaaggattttcctacttatactttcaggaaacaaactgaatacctaatttggtatgaaaatatttgaatttctggaatatgtgtgtaatttatgaagacaacatatggactttttgaaactggaaaaattccagaaaatttcatctatctcgtcatatctttacctcaaatatctgataaccagtattccatcaccaaaggtctgaatctttctcaaagatagagggaaacacaccgtcatctttccttccctgacatcttaatttattgctatatatattcattctaaattgcttaaaatcagtgttttggaaaaaaaaaaggtgacagaagctttcttgtaactcacttactctgagcaagcttgttgcgcaccttgttcatcacttgggaaataatcgaaagaatgtgcgtggaatgggagcagtgcctcaggttactttcattacttcatcttttcattagaaagtgaagggccggtgcggtggcccacgcctgtaatcccaacactttgggaggccgaggcgggcggatcacaaggtcaggagttcaacaccagcctggccaacatagtgaaaccctgtctctactaaaaatacaaaaattagccaggtatggtggtatagccaggtataggcccagctactcaggaggctgaggcaggagaatcacttgaacccaggaggcagaggttatggtaagccgagatcgtaccactgcactccagcctgggcaacagagtgagactcactccatctcaaaaaataaaaaagtggaaacaattccttacaactctttgaactttacagttttaatgacaatacaatataaatgtcttaaattcacattttattttttcttttgacattcagaacatgcttaactgttccctctgtcattgtcagtaaacactgctaatctaaatgtaggtaattctagcacatgagaggcttttaactggaaaattggggtggttttttgaacttaggtcagaagcgattttcactattaaattttggaaaatcccacttatatttaaaagcagaaaggataatgtaacaataccccatgtactcacgctgacttcagcagttaccaactcatagccaatctcattttatcagctcatagccagtcttacctgcttctctcccctccctcaccctggattattctaaaacagatcacatcattttatccataattaattcagtatgtaattcttagaaataaggattctttttaaaaactgtagccaaaataccatgaccattacctaaaatatgaatattttttaaatatgaaatactccagtttcaaattcagaaagtttaatttcttcagtatctttctgagtgcatcgatagcattgcccttgagctgatactcagtgcacaggcaaatggtaaatgaaatgcggcacagacgcggacagaacgtttcctcggatggaaggaggattcgccattagtgaaatagagtgtgctttggccagtttgcatgtcggtgtttttctgtatgtgatcatttctatatgtgtatgtcattgcacacatgttaactttaatatacacatatctatggccgggcgcggtggctcacgcctgtaatcccagcactttgggaggctgaggctggcggaccatgaggtcaggagatcgagaccatcctggctaacacagtgaaaccccgtctctactaaaaatacaaaaaattagccggacatggtggcatttgcctgtagtcccagctacttgggaggctggggcaggagaatggcaggaacctgggaggcggagcttgcactgagcccagattgtgccactgcactccagcctgggcgacagagcaagactccgtctcaaaaaaaaaaaaaatacacatatctacatttacatctacaggtaatgtcatatctatgtttgtgtatgtgtgcgtgtgtttatataaaatatttgccttaattataagtttgctgggaatacacacaaattttcttttgtgtgatctacaactgttgttgactagggacccttggtggatgttttattattgtcctaattatatataatataaatgtaaggtaatatgggggaatgcctactaaatattgtttggaatttcctttgagcatcctctcataattgtgacattttagatgtggaagaaatctgggaaactgtctagttttgtggatgcctttagctctatttcgcatgtgacaaaggtgtctcagagaagccacaggacagacccacgtcctccgtatcctgagtaggggtgggactagtgggtgtccagacacgtcctccgtatcctgagcaggggtgggactagtgggtgtccaggtcactccccctctcacctgatcacactccctccagaccagtgagttatggaataggttactgaacacctccctctgagttacattgttggagcaaatattgcatcaaacaggatttctcaatgtgatgtcagagcaggtgagcgttcccctggtaagggaaggctggctggtatttggggattcatgaagagctgcacctgaaactagccaagctcgatgaagtgcttctggtctttattacttttatgctattttgctatacataggtgaattctattaaggaaattttacacagacctcatcactcacttctaaaattatatgtgcaatgtaaataaatgctctgagaatgagcaagttaagaaaatggaggtgagtgagagagcatccagtcccttaggagggatcctgggaaatgtaaggctgtccctgggaaggcccgcagtgcccccatcagagccaaaggaactcatggcacatacattggatgtaaagcttcagagccggcagcctgcagcggatgccacctctctcttgactcgagtgtgtctggttattttctgatgcccggggctcggtgacagagtacttacttgtttgcttggcacctgctgtttccttgaattgattatagctgtctactgaaggctagagcatttgaaaacacaattactaccgtaagaaattgcttacaaatgatctgcggtaaaaggactgcctacattttatctggtactttgttataaagctacattgtttttatgcgggttttctcaggagcctgcttttaaaatgaaagcttactacattccaatataaagaaaacaagttttaagtagttcctttattataatatctgtacttagactactaacactgtaaagttgtttaggtaaatccactagcagaacaatggataagaagaagaatagctttgtgaaatgaaatgcaattttaaatggatagactataaatatttcaaacggaaaaataattcttgatgtctgtttaaagtaaatgtggtctttgtgcatgaatctaagaaatctaacatataaatatttttttaagtctgcttttttaaagcaaagacttttgcttttcactttggtggtttgggaaaaaaatgttaattgtatgtagccctgtggtattcagagaaaatgttatgagcaaagatggtgacagattttcagagacagcagtcctacatacaaagctacctttttccgagaaagctccttttgtagatgaagcatttggcagcagagtttgccgtacagttgataattctatgagtcctgcattagatccttgtctggactcgtttttgtagtaataatatacactggtgctagcagatggtgcccttcggagtataacacgaggccaggacaggagctcacccttgcacctcacacacctggtcctttacccccaaacgctccacatgcctcttgcatcctctaactctgtagcccaaatgtgatcatttaggtttttctaagggtggaaaaagatgggaaaaacaagagcaaaactaaggttaatattttaaaaactcatcttgaaaccttctaaatactgatggaagagtttatggtgtttgtccagcctgaacaggttaaccattttgcttctcttcccctatgttcaaagcagccttgtgttctgaattgttatacatgttaaacttttactaccttattaagaagtgtcacccgtctcttaaaattcctgtgaaataggtccaaaattagactgcgtcttcagaggtttcctgccaggaaaagcctttggttaaccccctactgacattcacaaacaggatttttaaaggtggtcttcaaaggtgtttttttctttgttctgaatgtgagttaaaatatatgctggctatgtctgataacttaagggagaaggcatcaggctactcatagagaaagtgttaccttctttcagagatgcacttaattagaacttctaaaaggacatcattagaattagggttcagtaggcaacatttagaacatggccacactgttaagtaagcagtaagttctcgagaatagccgcagagcagaagaaaagacatttatacctggctcaggttctctttgaaaacttagagatggtatgttccatctgagtggtttatttcgagtcttcacagtggtggagctattatagaaagaaaactgaataacaggctgtgctaaacatctacccttttaataatttctgacactcactagagtattaattacttgctgaaagaaataaaaacatttatgttactccaagaaccttaagatacacaaagtccatattttcagtacaagctcataacatacatgcataaatcatagtattacaatttatgattttgaatttacatagtataaactgttatatcttgctattttaaaaaatacagctaggacctttacgtacatattttatatcatttttacaaatattattggggttaatattacatataattctggtattaccataatgcagggtcaggtagacttcctgtatgcgagattaaattacagcccccattaggaaaccattagcagattcattgaattttctgtggaaccacgcaaataatttcatagttaaaaagtcagtgtaagtgtattgttgtatatgtgctaaatcttttaataaaattatcattttaattttaaagttatcataataaggttgcacattaggaagcttctttttttatggagttaattttctagagatttaaaaaattgtttctctcctgaatattgatcacagcctgaacccaggttgagagaggttggtttaaaaaaaggaaaggcacaactgcagcgagcacagatatgagatgctagtttctttccatcttgccctccctgcagctcagcactggggtggtgcctttgtgacctgtgtacggctgccagtgggcggacctccagggaaggcttctgctgtgcacttgttcgtttgcatgctgtgatgacagagtttttcaaaattgtctttggaagatgaaatgcttagtggggttttatttacctgctttaagatgtataagctgcgctatgtatgcagcgtatgtgcacacagtgagaaagtagattcaggagagggaagtggaagaagtcagtaacctgggacttgagaatttgatttcttttggaatagcatagcactcatttgtagatccccatgtagtaaagtaacagctgttgaatatcacaagaaaaagttggattaaggtctcttttttttgtgtctcctgttttgtaatagattctattcaccttacaatgaataatcttttttagatcacacaggccaaaaaggctatgtgaaaaggaccttgtcaatttgtgattgtagcagctggttcttttccactgccctggcttactgtgcatctggaagaagacttctggcagccggaagtcatttcatgtctaaacttgtccccatccttcatagaaaaaaaattttgatgatgaatgtcaaacacacattgaatgctaactttacttggtaattaaaaatactgataattgtaagtacttttgttctgtattctgttatttttgtaattcctttatatgttctaagcatttttctgcatgtaaatctatatgaaactgctaaaagacataggactttgacaaaaacatacatttcattttggtcattcacttctccagcttacttattacaaatatatgattctcacataactggccaatggtagctaataaatgcttcttcaaagtttatacctgtagttttgcttttaatttacatttcctttggtgaactcttgctttgaatgatactgaaatgcacgtccgaaatgctgcctggagcttgtgaaggacagtcctgagtgagtgagttaacaggggcttcttaactgtgcctccctttgtttaatttggattaagtgattctctttaaattaaggaaatgcccctgtcaggactttaaaaatgttatatatatatacatatatatgtatatgtatacatgtataatcagaagatcaaaaagcatttttatctgttgacacaggtctaattcctgaggaatttgtaactctgccttgatacgcccaccgcacccccacccccacccccagctttggcattgaaattcttgtgtgtggtgcgcttgaaaggaatcccatcctgcctgcgtctgcggaggctcccggcccgtgtttggtcagcaagcaacagtgggtggtcgggctgctgtgcaggacaacggcccgctgtgcgcaggaaaatgtgttcaaaggtgtttaagggccatgaggaagtcggccacccttctgagagtctgaggctgcagatcagtgttccctacactattgtagactgtgagaaaacttgctgtagtaggcatgaaggatgagaaaatacagtaaccttactcacctggctccgtgtctgcaggcttcccttaagaagggtctcttctgccctttttgtggtatagagtctgttaaaaaaaaaaataccgactattgaaaatcagaaagacttgcacagctttgagtggaaaggatttgactgatatggtttcctggaagtcctacagaattctaggtataataagcattttctatagagtctcgattgtcaaagattgtttactttcttttagaaaaatgataaattttaaatttttgattatttctacacttctagtgaagtgactaggattgtttcattagttttctgaagaaaattatttctgcaactcctgaaaacaaattttccaactgtttttctcttgttaaaatgtctagaggtatttttttctaattttatgtttgtttataatttgttaaatgtatctgcatacttaaaattagaaaaggaattttgaggatattgcaagcatatgttatagaagcagtatttaactggaaaaataaaatactaacttttgacttccagtagttaaaaacagttgtgtcttttttttaatgttaagtggttaaaggatttttttttccttccaagatactaattccaggcatttgtgataacatatgtatgttttctttgacatattgacaaaataataactcaaatactaatgtggggaagttaaaagatatagctagatcctaagaatatttatttccagaattttgttttgtatcatttttcctgcaaatatcacatagaattttgcaattagaaatactacggtgatgatttcccacactatagggtgatgtgcctgttcgcaattttgtattcagagtaatctgtagttattcctcaggtaatgttgagagattacaaccaaatgtttttgatcttacaagcactcactcatttgagtatgtttattactgtgcttactatctttaagatagccaggctgaagtccataacaaatattataaaattcggatacagttttcactgttactttttttttttttttttgagacagagtctcgctctgtctcccagactggagtgcggtgatgtgatcttggcattctgcaatctctgtctcccaggtacaagcagttctcctgcctcagcctctcgagtagctgggactacaggcatgtgccaccgcgctggctaatttttttgtatttttagtggagatgggggtttcaccatgttggtcaggccggtctcgaactcctgacctcaaatgatccacccacctcggcctcccaaagtgctgggattacaggcatgagccaccgcgcccggccacactgttacttttttattgcttttagtatttttgtgatgtaatttccattttaagacataattttcacatttgctccatgtgtagaggcaaactttttatacatttaaaacgacaccaccactgatcagtgtccaaaactgtacgaacagtgatcggaataaatgtcttttctgtgttgttctcagtggtgatttaaggtttctgatttaaactttgaatcatagagtcagaattttatagctaaaaagacttttagaattgcatagtataaagccctaatctttacaggtatattttacaggataggttagtgcctcggtgagctgccacagaacctgataccaactgcatggccatggaaattcttcataaaattagtccctgcctcaatttcaaacttagggaacaatttggtagtattggcccaaatgaaaacatagttataaccttttcatcagggcccaaggtaatcatttcctgctttaaaaaaaaggctttttaaaaattttcatccagaaaacaaattctaggaacagttaatttctatagaaaatttactgccaagagaacaagtaacctctgaaaactcctatcaatgcagcattagtttgaaaagggcagagtcaaacacaattttatgttgttacaggatgttaaaaactgcacccagggctggacacggtggctcactcctgtaatcccagcacctggggaggctgacgcaggcagatcacaaggtcaggagttcaagaccagcctggccaacatagtgaaaccctgtctctactaaaaatacaaaaattagctgggcatggtggtgcatgcctgtagtctcagctacttgagaggctgaggcaagagaatcgcttgaacccaggagttggaggttgcagtgagccaagattgtgccactgggctccagcttgggcaacagagtgacacttcatctcaaaaaaaaaaaacaaaaaaaactgcacccggccaccatatgctttatgtaatgtgtatagttttttaaatgagatattgctgtcatattgtaagatgaaacaaaatagactgatatgtgaaatatttaaagacttttgctgattttatattttatggaaactgtttttttcttttttttatagaaatgcttactcatgaaaccagttcatatttgtaataattttgtgagtcagaaatagtaagttatgtaatttaaaaggagtgtcagaattatcaaggtgtttgttttttttttgacacttggtcatacataatttgtgacaactggtatttaaaatgtttgtgttgcttttctcttcaaaacataagctttctaattctctataaaataactcattctgagattattttttgacagtaagaaaagtacgagtgttagggagagaaatacatttctaagctagtacccactgtttagttgacagggcacattatgcatttgtgtgcagctgtgaagcgctaccttctggacactcagcaaaaatacatcttccgaatgtattccagatgctgatagtccggaggggcatgtgctcttctagctccctgctgctgtgttatacttctggtaatgccagggtaccaattggaaaatttgttcacggttacctttgttttcctgatatagaaaactgatgatgtggtttctaatagaacaaaagcatagtaatacagtttctgttattaaaggaaaaaaaatcaatcttttaaccattacaaaactcaggatgtacttaaactatacaaatggtttaatattaaacaatttaaagttataaaaataccagttataaggagaaaactttttctgaaataattgtatttttgcaggaatggtatatgcgtattttcaggaaactaggaagtgttttccttcttaatcataaattcatagtcctaaaaaccttcaagagtaagtgaaatgtaacagtttaaagcattcttttttatactttaaaaatgtacattttaatataaattagaagtttttatatgtatttttaatgtgacgctaagtttgggcccctttatttttctctttaaagtatgttagaaaattcatattttgatattcatttcctgaattccacaattgatagaagtgacaactgtataaacttcaaaggaaaatgtcataaatcactagaacatccacacaaacatttttatatgaaaaaaagtcaattagaaaaaaatactttcttcactgtattttttttctctgtcacatttttttggtaacacagtggattttataagtcttcttatcttagctttaatattttcaaaaatacaaatgtatgcacagcatttatttagcacagtggccaaaacatagtaagtcttcaaaaaaacttctgttgcactaaaaaatctgttcaaatgatttattttctatttatctaagacctaccagctagaatttgtggggatctggagagagagatgatagtgtgtcacgtccaggggcacacggtaggagggcctcagtcagatcaagccttttcttaccacacaatcactatttacctcctctgcttagcgtttttttgctatagttttgttgtttatttatctattggtttattttctgcctccaccaccagaatgtaaacatcttgagagcagggccttagatattattcatcactttatcccccgggcctgcaattcctcacatgcgggagggagctcaataaatacctgttaaatgttattgaatagtttgcattatcagagacaccaaaatgttactttaatttggaaatatgttttatattagcacctgaaaacaactccataggcttttaatattctattaagttataaagtaaaaaatatattttttagtgtcagtcacttactacatgtggtgggagttatttgtggaaggtccaatgactgtggggaacatggagatatatttacttcttatccctgagaaaacagcagtctttggtggagataggcaatacctagctgttaatgaactacagactctagaatgtgaagtcgattaaattatatacataaattatatacattctcactgctgtcagagggcagaaaagataggtagcactttaggtagataagaggaagaggtgaccttgtgtaatagctgtatttcaagtggcatctttcaggatgtgggtttaaatggatgaagaagaaaaactgagtgaggcctttccagtagagaggatagcaaataaggcagcaaaatgtaaggtgtatttttgtagggagaatattcaagtgtcctatgcacagtactgtaaatactctgtaaatgcactttgaattcagtttattttgaagctctttgaatactcagctaaagagtggtgttttagactaacaaggtaaattttacctcttcaagccaatgtccttactaacatgcttggcaacatggaattctattcctaaaggcttttgtgatccattttagaaaaattgtttcctaattctcagcataatttggattggaaaacatcggggtagactttatcctgccggttttctggaagacttctcagatgagaatcaaaaaagcagtatttgagtgtgagacaataaagacaatttcttgatggtagtagaatgttctggcttctggcatatgaagtgtgaggtgaaaaggatccacactagatgactggcatcaagaaacgccatagggagtgaaatcccatgtgtccaagaaacaaatggtgggatttggggatttaagtgtaaagtgtggcattaagggagaagtcagaggagatttatgctacaaaaatgtgtaagtcagctacatttaaagaaacagaagattctgaactccattatctttcctagtgccaaaagttgttttgcaaaatgtgatttttcctgctactttttgtgtttatagcattatcctcccaccaccacccaattttgctgaactgagaatgacttttaaaatctgtttagagaaaatactttttattttatttaataaatgccttatttaagagtggagcaattgagcaagaaatagcctcagagaagcagaccattaaatcaactaagcaagagtatatagagcatgctatatactctgtatatctctcctttcttccccaggtaacccaggcctgcacagtcccatgttggatcttgataatgatacacgtccctcagtgttgggccatctcagtcagacagcgtccctgaagaggggcagcagctttcagtctggtcgagacgacagtaagtatctccctccactgccactgggtcttttaaatttgtactcgtgtaatttcaaacattcttctcttggaaaattccccaatttgtgttgatactggtgctaagtattatcagccatcatcgcttttgcttgttacagtaactaccagtaatttaataattaaaatatatattacatttaaaggaatgctatttgatttttaagtcattgggtgcaggtcagtgcttattaaacatatttagttcaagtctagttttactttttctgtggttgaatttttttaaagtgccacagaaaaaaattctgtgagaacttcattaagatggaatttgcgataaaagtagtatcagtataccttttttgatgaaatttaaactttggtctggaaagagggattggctgttaattaaccataaaatacttgctaataatttttcctaagatgaagcatctaaaattttaagtatgttgcatttctgaactttctggagtggatatttaccattttcctatttgagatacaacatgatcgactatcaggcattcttgcaccaaattagatgccactagtcaggagccatttgtgatctcaataacagatataagaaacccaaatagactaatagaaataccttacattgtattaaattcagatacctgtacagttgttttaaaatgtcttatattattcttaacaagcattgcagtagggaatttttcgaaggttttattaatataaatgaatgttcatcataagagcaccttaaaattagatgattcatttgtactaaatgaaaggcttccataactgttggtattccttcttcttgtccgattctcattcctctcccagctcaccaaacattagaacaaacaatgttagatcagaaccgtttgctcctacattctgtgggacagcagctaacattatataatgttcaatgtaattgcacagaggagctgagatcttttgaaacattattcttgggaaagataccatgtaagaatccatttgctgccatattaagctgtgttagtctgtttgtgttgctataaaggaacactgaggctgggtagtttataaagaaaagaggtttattggctcacagttctgcaggctgtacaggaagcattgcgccggcatctgctactgggaggcctcaggaagcttccagtcatggcagaaggcaaaaggggagccagcatgtcgcatggcaggagatggagcgagggagaggatggagagggagcgagggagaggatggagagggagcgagggagaggatggagagggagtgagggagaggatggagatgccaggctcttttaacccatttcccatttagggaaaaaaggtgcagctcactgctggtgctcacttaatttacataaacatgttctttgaggctgaagcaaatatcactgattttcagtgtgaaaacaaaatataagaactgttcttggaattatttctaaacaactcgtctctaatcctaatgtaatagaaatgtaaatggtgttccattaggattagagacaagagtgttctcggggcacacgggcaatgggtgaaacaactagatcttgtgtgaactcatagagcaagaactcactcattattgcaaggacaccaagccattcacgaggggcccgcccccatggccctcctgcaacattggggatcacatttcaacatgagatttggtggggacaaaacatccaaatcgatcaaaggcaaatctttcagtgcttccatttttagattttcttgtcctgtttttcaccttgtcattggacccttgacgcagctggccatggcctcgccctgtggcacgccacctgccatctggaaaacaggcattaccaactactgttggggagaggagtctgtaactgctgtctccagatgaaacccactcacctcagattaccatcatggtgtattcaattggttaattgactgttctgttagattctaagctgtgaaggcagagcctgccttgttcagcattcagagtgagttttgatcttgggtggagccacatgataagcacacggttaatcctcaataaatattagctgaatgaaaaataaaagtttacagtgtgcccttaagtaaagaaccgttcctttcacacctgtgaaaatgagtttaaaactttttcctgcaactcctagcatagacaaagggctaatatacctaataaataaagaggctctatagcctacacagaggacgtgtcagtggttcttacacgtgtgagtagacactcaaccccacaatagtaagaagaaaggtcgcataacactacaatgagatacgaggttggcaaaaactctgagtgtttatcgttttgttttgggttttctatgtttgtttgttcattgatgaggccactacttgcacgtgtcaccggtggaagtatgagggcatacttcctttagagggcagttcaataatatctatcaaaattacaaccacaggtgctctttgtcccagcaattcttgttctggacgttttctatgctttcacttgagcatgtgctaaatgatataggtatacagttactggctgaaacattcattttaattgcaaaagaccgaagacagtcttgtccattggaagggaacttgttaaattacgatacgtcaaaaatgtgaaaggcagtataactgtggggagaaaaagaggaagcctttgccttacgtttgaatacagaagaactccaggatccatcgctaaatggaagaagccaagcttcaaaagagtgtgtttggcctttcgtttgtgtaaaaaccaaaaacgtgtaaagaacagttgggagggagaaaaacacatttatacttgcttgtgtatataaaaaatatttcagaaagagtcacaataactagtgacagtggtttcttccggctgggaactaggcacttgggagtggaggggcaggaggtagacttttcactgtgtacctttcaggtgtcattttctaaccatgtattacctgatcaaataactatttaaattattaaatcattaataaattattaatacaattttattaataaaatttcttaataaaattaagaaattttattaatacagtttataaaatttgcccttccttcactggactaacaacagcaaatccttttgcttgggggtatttggaaaggaagctagcaattagcctggcccagggaataaacgttctcatgggagtccacctgcccctgaagttgctgagtaggagttagagcctgatccgcggcgtcattgtgctgaggactggacggggtggactctgcagtgcccctgccatggccaccgagtggagtgcggggcgggaggcaggtgggaggcagcagggcgaaggcatggccctgggagtgaaaagaaagaagggagacagaggacatggtgagtgggtcctgaatttctacacttgctttattcccatgaacctgttcttcccacaagaagtctaagcccttatttcccagttacagcaatagctatgttaaatgatgtatagccaaagaggtttcaacgtttctagtttttcttaaatttctttattttaggtggggttatttagtatgtgattgcactagaatgtttccttgtgataactggattccttcctgcattctcacttcccagggtgtatgatggcatttctcacaggctgatcagctgcaatttcacaactggctgcacagcagcccctgcctttgctgttagaaggcgggactttttgaagagacgtttactatccagaggacaaggctgataagtcaaagccacctcctctcggtagccctcccagtactgaggctgtggccacctggtcccttgccctggcttgctggtcagccatgagggagaggggctcttccttgccagagggcaaggagaaatgcgggggtgtctggtgacgagcgtaccgctgccggtgtcagccaggtgggccgcgagcgtccacgcagactcaggctattcctagtgcatgttggagttttgcgggagtggaggggggtgcgccaatatgctcaaaggtgttttcttgattcagaagtacaatcatagtattttattcttttcccccttagcgtggagatacaaaactccccacagggtggcctttgttgaaaaattgacaaaactcgtcttgagccagctgcctaacttctggaaactctggatctcctacgttaatggaagcctcttcagtgaggtgtgtatacggactcggctagaggtggagctgagtcaccgtgcatttctggtctttaaaatgttagatttaagtgattttttaaaatgtagaggcccaacatctctagccatcgtcatagtttaaaatcagttaaagcattataaagccctctcacttagtagctgtgtgacctcgaacaagtcacttttcctcatgtacaaaaagaatagtctgggcacctgtctcaaaaggtggttgtagggattaaatgagataggcaattaaagaaaaaagaaagctcgaactcttttcagggactccgaattgagatattgccagtcaggccaaattctgggtgatgtgcggtagactgtgaacaaatgaggaaacaaggatagcaccttggcagccggcacccggaacaaagtcatccatagagtatgcaatttcccttggaaaggatgtaaacattctgcagtctagccccattgttatcagcttacagaagtttttatgagcccgtccaccttctgcagtcacacatttattaatgctttagtatcttcatcatcatatgactgatagcatagaaggcatgaacataaaggaatgactctgttatgtgtggcacatggaagtcagtcactttctaacctcacctcaagtgcgccatgaaaggcctccggctcctggacatagattctaacgccctttgtcctaggctgccaagggcacccccgtgggagactgagaagacaggtgtttcgtgtctctgcaggagaccgactctacaccaagagctctgggggagataggggtcttctgagagtaaaggctactttctgcttctttttgacttggcaacacacaaaatggacatgggcaaaggctaaaaccatttttggttttttgcacaaaggcacagcctttgtggtttaaacctctcctccttggcggaaagtggctaagtgtcagagtacctcaggtgtctttggagtctcatttggccatgaccataaattcatgctgatattaaggaaatagagatgtgctctggaacttttttctttgtatatttgaactccaagtgcctagtatctccgttgtaaacccgctggattcctgcagccttgtttatgtgaatggttggttttctaacctataaaatttactatgtgcataaaaacagaaatgtgtaatgcatgaacacaaactccttagtgcagaaaaaccaatcgtgtaagcacaacttatcaatgcattttttctttagtttcagttatcagttactttataagtgaacattcaaatattaaagcaatacacaactttcttttctttgttagttatgtatgaactctattgaaaagttgactatacagaggaagttcttccatgaaacgaacgtcaggtttcgcaggtctacataatgagagttgcttattgctggcttaggaagtgaataatttcagttttgtcctgataagtctttccagtactctgcttctgtgtgtcaccatcagtttgtgtctctgtgatctcagctgggtgagctgtggggctcaccatgctgaggtcaagccttgggtcccccttgccctctgcacagtgacagtagtggcaccgcaggcaccagcttcctctctgtgtctgctctgtccctaaaccaaattgttcgtgtgggcaggaaagattagatgctcccctgtcatgcctttggacagatggcattcataggttttcacgcagaacactaggagcataatagaaacatccagtgtctatcacttcctagccgtgaccttaggcaaattacttctctgcacctgcttccataggactggtttgagaattcaatgagttagcatgagtgaagtgctgataataatgtctgacagataagtaagagtttgctgttattatttggagtaaaatttattccagtatttccactgtttgaaatctcatcggcctggcacatggtaggtgttcagtgaacaaaattttgtaacattagaaaatagtagactgatgaactgctggagtagaattgaataatgtcaagctgaatcaactcatctaaagaattagaattactcttttagggccaggcgcggtggctcatgcctataatcccagcactttgggaggccgaggcgggtggatcacgaggtcaggagattgaaatcatcctggctgacacggtgaaaccccatctctactaaaaatacaaaaaattagccaggcgtggtggcgggcgcctgtagttgcagctactcgggaggctgaggcaggagaatggcgtgaacccgggaggcggagcctgcagtgagccgagatcgcgccaccacactccagcctgggcgacagcgcgagactccgtctcaaaaaaaaaaaaaaagagaaagaattagtcttttaggacatggattttaagccgtagtgtttgtttccagccaagtgtttttccctcatttgcatcagttcctacaagtggcccaccacacatggacagtagttgccttccctggagtctttttgagtcataagattcctaagaatttttgatctaggatattttagtgaaaagggagtatgttttgctttcttacagattacataccaaacatataaatgaaatatttggtcgtagatgaaaaataaatcatctacttcagaactcatgcacaacattaatggtgaaatgaaaaaatgactcttaattggttgtgctgaattggatatgcctatgacgtgtctacctgtctatgtttataaacttaaaagcttatagcaataattactaattacgtgtaatttgctctgcagatttgggcatgctttgaaactgtgtgccctcttctgaagagctagaggaaagcgcagggctgtaggaaggagcagaggagctggggacacttgcttcccttgccggtctgcaagtgaaacccagaagctggattgaattctgggaagagttctggggcttttgatagctatttaatctcacacaagaaagcatgatagtttttaaacacaatttatttgaattttcttatttttcttgttataaaactatcttgttgtattaagagcccatccgttaaaaatttagatgaagtttccaacagtttaaaaaatagtcagttcttcaagccagtgaaggccatgtgaaataacaaatgtgaatcaaaacagtgaaatcagccgttgctctcaccacaaagcagttttggtctgcgtgtgcaggaaagagttaaggtttctagttaacgaaatggttaatagtaggttaagatctcacctttagatatatcttaaatatagtgtatttttagataaaaatctttaaaacagccaaataattgatgaatattaagagtcagcattttaaaaagttacataactcaataatatataaattaaaatgccttacatattccaaaattagattttcttttaaaaatagggcaaactttacataatccattgtgttggagatattcagctctattaaattaaaacagtaagtaacaactgaaagcggtctgccccacaactagttcccttccccgtctacttttcatgtgtttggagacaaatccttgaattttacaaaattactgtccagtacatttcctcatgcactcatgaacacctatttgttgggcaaaattgttgtggcaaaatttagccttaatttttatatgttttttaacaacagattttcacgcttttctttgatttaaaaatatgtaatagaacaaatgactatgaaataatcttcgcattgcacagtcttactatgtacaaagtttggtatcaggtactgtggaggatacaagcagaggatatgccctttgacagtcaagactcttgcagttttatactggcatgtgcctccctccatagcaggtgaagcaagcgtccacgaatcagggtgctccagggcaatagaaccaataggatgtgtatgcctatccctgcactcacacacacacatacacgaagagatctatgctaaggggttggcacatgtcattatggagactgacaagccgcaagggtctgcaggatgcattgcccagctggatggccgatgctgtaagctccagtttgaatgccagccggctcgagacctaaggagagcacatgtttcggttcaactatgaaggcacataaagcccacagtgtcccagcttgaaggcagtcagacaggaggagtgcctctaactcatgggaggatcagctcttttgtgctgttcaggccttcaactgattgagcgaggcccatccacatcccggagaggttctgccgtgcacagtgcattgatgcgcatgttaatctatccagaaacacctcacagacacacctagagtaatgtttcaccaaatgtctagcaccctgtggcccagccaagatgacaccaaattaaccatcacaaggtccttaacaaagatttagctcctgacattccagtaggtgctgggctccgcagcagtgtctgaattcaacaagcaaagcagtcctcctaacccccaaccgtcacacaaagctctccaacctctgctcatcccatttgctgacatctgacatctccgggagaagaattgggcatgttaggtttttcaggagtaaatcatagggttacgcctggcagatctgcctcccggggccactctcatgtcgggacccagagcgtttggggcagttacactttcttaagtatattcaagaagatcttggagaaccctaaccctaggtgatcatttattcaccagggcccaggtactgagacacacatgcatgcatgcacacgtaatatacacatgcacatgtatgcatgcacacacacaacagacacacaacacatcatgtacacgtatgtagacatgtatgaaacattaatgtataacacatgcatataaatgcatgcatgtactcagtatgtagacatacacataaatttacacatatacatatctacaatataaataaaagtcaccaaagtaagcatgacctttcctcttctagagacagaactcaaataatttttttaaattattattttaaaaattctggtaacagctataaaagaaacaaatagggttgtaagacagaatatcagcaatgggttggaggtcagggaaggccgctctctggaggtgatattgaaactgacacatggcacaagagaaggacacaaccacacagaggatggggggaagcaggccccaggcagcgagaaggacgcctgcagcaccaggagggcagctcagcttatcagaaaaggaagaagcgtcctgagcagtgggagggctgggagggacaggcccagctggcagtggcttcatcccaggccatggggcggggaacagaccagctttccagttttaaaaaacccaccttggtggtgtgttcagaatcaattggtggggacaaatgtgggggaaaccatggaggtcctccaggcaggaaacagtggtggtttggataaggtttcgtcagtggagttggagagcagttggtaggtttggttgtattttggacgtggtgttcaggtgagggagaggaaagcaagaattctgacgttgctcgcagtgggctcctgagcaggagtgccgtatgccaagccagaaagacctaagaaagagcatgcttggaggaagcttcagatttccattgataatgtggtagattgagattcctgggagttattcaatattcacatatgggtcacagaggagatatttgggctggagatagactttggaaggcattagatagaaatgatatttgaagccacgggaacaaactagacggtatagacagcaaagaaaaaaagtacccaagcctaagacctaacaaactgcaacatgtagaaaagagctatttgtcacctcagtgagcagggcattcatttgctcgatgcccataccccataccaccaaccacgttctgattctggtcttcacactgggcagacagaaagcagctgaacagacactcagagccgctggtgttagccgagcgggcgtgcgttaggtgggggtccctctgcgcatgcctccttcctcactgcagcaccagggcagtaggttctccttcaggcggcctgtctcagccacctgggctcacctgctgctgtctcagtgtggctgtgttcacctgggccactgcaacatcctgctggctggtcatactcgcacactggcccctcattccttcttcttaatgtaggcctcacagcactcacctgcttaaaacacttcagttccttctcatttgtcttaaaaataaaggaaaaatcaacctatgagttaaaccctggggtacaaagaattttaagtgtcattgaccagtgaactcaggagctagctttttgaatgattattgagatggattgcaggtttagtttttatacatacctttaattctttcaagacaaaaacatatttctacaaagaaaaaaatgataaaagctgcgtagtttaatataaaatttaaaaatgaatggaaactacagtttgaaggatgttggtctgtgtatgtgctgcccgtttttttgtcaggtttgtctgatagttctgttgaaaacacccaacaatcctaacccatattttacttacattgatatgttcattatataaactaaccctacacgcagtttttatagcttatacagaaataaatatatatacaacgtgcataacattgcttgtattttaaaactgacttaaagtcaatatcatgataatttataatgcaactgttcttaacttgaaaggtctcttgacttgtcatgcattaaccgataaggcatgagcattttcaccttaaaggttaacttttgcattatgtcaatgaagtgtcagaattttattttacattgtataattttgttaatgcttctttatttagaaagcttcctgggcttgtccttctaggttattttatataaaaatatttagttagaaaatttgttaataaacagttctctgaaatccaactgaacaggcttctcttttagtcaatataaagtagttttccatacattaaggggaaagagacaatggaaaaaaacatgagttatatcagtaaacaaacaaaaattaattctagaatgatagaatgtattttatcctaaattacactgaaatctctgaaggaagagccatagtttatagtatttaaaactaaaatgacagatttcagagtttaggcttcctttggtttctttactagctaatgagaaatgatgttgacagtgttgtcgtgggtatgatacctgatggtttaaccatacgacatcgttggtgaaaatggtagatgaaattcacctgtaaaatcggtagtttcaacttaattcttggattcattcatgggaattgtacgtaaaggttttagaaagataaataacttctcattgggataagaaaggttttctaatgaatcattctttaatcagaaacatagattatgtcttaagcatttcttttaatcaagttataaccatatttaatgttctcttgatgtacaagtgctaaagcatttcttatttttaaattatttctaatatgttttattttgtttttttaatttttaagactgctgagaagtcaggccagattgaaagatcaaagaatgtaaggcaaagacaaaatgattttaaggtgagtaagggtgataagtatgtagaccttttcacagggtagggtttttcctttctcactttgtattcaagacatccattactgcccaggcagcatcttttagttaatgtaacccgattaatcacatttgaacacggttatgcttgttcctggttttctagaaaatgattcaggaagtaatgcactccctggtgaagcttacccgcggagccctgcttcccctcagcatccgggatggggaagccaagcagtacggaggctgggaggtgaagtgcgagctctccggacagtggctcgctcacgccatccagactgtaaggtgagtatggacacattctcagagaaaggcgtacttctgttttttttaactttttggaaagaattaatacattcagtgaagaagaaattcttctttttcttctttttgtccttttgcctccactgtttcctgttcatcatctgacagctaagctcctcactgttcctggtttttgtgttggactagaatgttcttgagtttacgcatcttctccgttgtttcactcagtattactctgacagtacagtcccagttgtggtctgtttctgttttcagcctaatgctgtagctcgtaagctccgtgaggaatgattatacagtgaaagagatgctagggattgctttgcgatcccactctgctcacttctgtttggatgtgtttgttcgcagacttactcatgaatcgttgactgcccttgaaattcctaatgacctgttacagactatccaggatctcatcttggatctccgagtacgttgcgtaatggccacgttgcagcacacggcggaaggtgtgttttgataaatcggtgacgttcactgtgcaatgattatctgaatgtgccacctcctttcagtgtccaaatccttgaaaacaagggaaaattactcttctggaaattggaatatattagttcatcttatttctagctgctcaataagtgttttttctttttgtgatgtattgttgagaattaagaccatgcagaaactaagatggatacacttgaaaatgtttaaagatataagaatattgttatgataaatgttaagtagaaaacatagggtataaaatgtacataaagtctgatctcacttttgaaaatatatggatgtatatttttaaattttaatttacagaaatcaatgtccaatcaaaggaaactctgttagtgttggttctctggattccagaaattatagatgattcttgttttctttatactttttaaatttttcaggcttttctacataaaatcataaaaaaaccataaaggttttctttacaaagcagccttttagttattaaatattttcaaaaataagaacattgctaaaatggcacaggcctttactatctactaccaggcttggctttttaggtaggaagcttacatctctgcaaaattggtgggcgatactgtgtaaatgggaagggaatggaacccaggtgagaagttggatattcccctcttagttgattacctcctcctcacctaggaacctgagcctgccccaaggccgaaggtttgagcaggtggcattcccttagccaactgagaatcatattgcccttgtcaggaatctgtaggattcaaaaaacagccaaattactcatcagaaattttaggaaaaaaaatactgtatgacttattttgtacatgcctagtgttgtgaagaatcctgaataagtaataaatgattgtctcaagttgtcattaaatccaacgtagaattccccaaattgggctatacagtaaaaacttttattcacattaatatcttagtagaatcatccagtgaacaatatgtacttaaatcatcaagtctaccaaaattatattctttgcctactttcatcgagtttttacaaacctatataaaacaatgaaaaaccataacctgtatacatttttaatctgtataaaatttagtgagataattataataaagtatttgtgtgcttcttctcatatagaaataaagagattagctgaaaaagaagactggattgttgacaatgaaggactgacttctctagtaagtttaagttcttttcaattattagtcattagtgtgtatttaaaataaatagtttatcatattaatagggagcatgtgctccatgtgttgcagctctaaatagaaatagaagcttcttaaaggttttcttctcagagacatttttgcttaacacgaaccataaatattgaaaaattaatgagaacaatgcgtttcttttagacttgacctttttcatcctgtataacttacgatttttgtttgaattagttttttaaaaacagagtatgctcaattctaaattactcagcaacttgagcttttccggaaagcaggatagaagagatgacgttgctggctccaaagccaaaacaaaccaaacaaacaaaaacaaccaccacagaccactgcagatacattctcaggccaggcagccaactgtgacctgtttctagaatcttcatcttttcagctgggacttttaggtttaaaaatcatcttcatgatttcacgggttttcacacttgtctcacgggtgcccctcgcggtcctgtgggtggctgtgccagtgacgatggccaggcagcggccgacacatcccagtggctttcaccagggggggacttctgtctctcacagcagcctggcagcgtggtcacacagtcagtgcccagggctgcctccatccttcttccctgtgacccttcacactgccttctactcaggctggcctcggggtcactcgtggcctggctgctgtcaggaagaaagtccagtcccctcccaggagccataacttgcaactctcctccatctaattggtcagaacacattccatgcctgtccctgttggcaacagaggtcgggagagcacgtggctgctcctgttttctgtcttaccttattaagaaaaaaggataggctgggtgcggtggctcacgcctataatcccagcacttttggaggccgaggtgggcggatcatgaggtcaagagcgagaccatcctggccaacatgctgaaaccccgtctctactaaaaatacaaaattttgctgggcatggtggtgggcgcctgtaatcctagctactcaggaggctgaggcaggagaatcacttgaacccaggaggcagagattgcagtgagccgagatcgcgccactgtactccagcctggtgacagagcgagactctgtcaaaaaaagaaaaaaagatagcaatcctaggaggcaactagcagtttctgcctcagataaggaaactagaatgaaatggtcttgacttgcccagatttacaaaccagtgatgagtcaggctatcaggaaacaatgatcctgcacagtatttttaaattcccttgaatttctatatagtcgtgccttggtatcctcagcgaaggctggttccagatcccttcatataccaagatctgaggactctcaagcccctaaaagttggctttctatatccttggactctctatccagccagttccaccattggtggaattcacagaggcagaacctggggcatgaagggcagactgtacttctcatggactgtcttctgggggctggggaatttttgactcattctattcctccaaagttcaaggtcctatcttaagttaatatatcattgtaccttactttatatataacaaggtgatttagaaaagcaatgcttttttgcaaattaaatcatgcttgaaatgagttagggaagtttattatttttaataagtcaattaagattctattttaaatgctttatttttaataaaaatattttaattgggccgggtgctgtggctcatgcctgtaatcccagcactttgagaggctcaggcgggcggatcacctgaggtcaggagttcgagaccagcctgaccaacatggtgaaaccctgtctctactaaaaatacaaaaattagccaggcacggtggtacatgcctgtaatcccagctacctgggaggctgagacaggggaatcacttgaacccgggaggcagaggttgcagtgagccgagaccgcgccattgcactccagcctgggcaacaagagcaaaactctcatctcaaaaaaaaaaaaagaaagaaaattttaatcgattgggtttctattcgtcacaattatttgtatttaaatagtgactagtctatagctaattctccctcacactaaatctttagagaaaggtatggacctgcaccacctgcacaaaaggcagaatgtgaaccatctccacgttttacatgcactacctgggaaataataatatttggatagactgcattaaatagattatatgaaaattgactttatgggtttattttttaaaagctttttaaaatgtgattaccggtaaatctaagatttcttacatggcttctgtttgtggctaacattatacacctatcggacagcactggtgtgaagggaaaacttattgcacttgatttggaatcagaacctacttcaatcttccatgtggtcctaaagaagccatgtagtctgtctgaccctagagtcttagtctgtaaacagggagcagaacacatcttcacagtgatgtgggttaggatacaatgagatactgtggaccgaagcacctggtaaactgcaaagctctggacaaacataaaggatttttatttgttaaattaatacttgtgatcactgggctactatgataataatacatgaagtttactgtgttcagagctcttttctatagacctatcctaatgatcacagcaagcctgaagacaggccagaagggatcattgggccaccatccactgaatcacttgcccgagatgaagcaggtgcaggcaggttagacatacctgcctcaagtcagttatgtgcaaatggaaaaaaattatatgttcagtttgagaaggcagagtctgctgtcagggtcctattcctcattcttaaaatctgccatcaattcagtaactctgagccataaaacagggattggcttcaggtccttcttcaggtcagtgcctcgggtacacgtggtcagccagtgtgtgcttccctggaagcctccagacctcgtttgcctgattgtagtatatcagcctctgtgaaaatgctctgaaatagttacttcagaagcttctttgtagtttatttttaaactttaagtagtgcaactgcaaccataaaataactgatttcatgtttgatctctcacacaagccacataactatcggcagggacgaaagaactgacccccagtgcaccttgcgaatgaatgagccctaggaaatagcacgtctggagtcagccaagacattgtctagccagaggtccttgaagaagtgtcctaccacgatagacctgataacactgagtcagttttttagctattccgcgtggacctcttaagagaaaacgtgaatcaatgtttagaaaatcccatttttctaaacattagatatcccttaatgggataatcccattgcttatcccattgaggacatcaaggtcaagcactgcctcactatgactgtccctcggctgaggcattctctctgattagagctttgcttcagagctcagaaacagctcactcgaaagcatcctgttttcttctcatgctgaaaatggtttctgcctcttttcaatttggataattctgagattctgagaattttcttctttcagaagaactggaatgatttgtgataacttttgacagtcatctaaattggatgactcactgacaatacacagagacagaactatttcttttgagaaaaaagaaatagtgaatgtgtagactatcacctactcccggttcaactgaaagcactcattgaactttctagtattctgtttctacttattatattagtgtgggtataaaaataaaattaataagaaagttgagtccaaattttaatagaagaaatctaaacaaccacacatgaacatcaacatttacttattttttttttaatttttaatttttttgagccggagtctcgcctgtcacccaggctggagtgcagtggcatgatctcggcttactgcaacatctgcctccctggttcaagtgattctcctgcctcagcctcctgagtacctaggactacaggcacgcaccaccacacccagctaattttttgtatttttagtagagatggggtttcatcatgttggccaggctggtctcgaacttctgacctcaagcaatccacccgcctcagcctcccaaagtgccgggattacgagcgtgagccatcgcacctggccaaacatcaacatttaatggcccacggttgaatttcagattcgattgtcaatattatagtaataattatcattgtaacatcttaaattttcataccttctgaggtgggtaggttagatgagtaaggtcagtaacctaacaaacattttgcctctttaaatgctttctgtgcagttggtatttcatcctctatttcttattttattactgtttttgtactttcacttttaagtattctttataatgccctctggtggtttcaaagtgcagaaataacatgacattaaagctgaggcactgttttagctttcattaagtctgggttcctttccataagaaaataaacttgtctttttaaaagatgtatatagatgtcacttcctttcttctcttcagtttttttcccaaactcttttaaaaattaatgcatgtgttgaagagaggttctcagtcccagtgttttgcacacaactgcttggttgagccttgagccttccatgtctcgctgctccggatgaagcccggccgcctaccccatctctcaagacctgtgctcatgtttggtggttctgacacgctgctcttgtctcgctgctccggatgaagcctggcctcctaccccatctctcaagacttgtgctcatgtttgttggttgtgacacgctgctcttcctgtgctcctgctttcccagtggtttcttgcccactctgcggggtgggtacactgtcgtcctctgagaacttgctcctctccttccctgttccttcaaagggctggtccctcttccccttcccgtctcagcatcaatgttctcacagtcttgggggccttctatgaccatcctatttacagccgatcccccatcatgattgttctctcagttcttcttcttttcttttttttttttttttttgagatgaagtctctctctgtcacccaggctggagtgcagtggcgcaatcttggctcactgcaacctccgcctcctaggttcaagcgattctcctgtctcagcctcccgagtagctgggactacaggcgcgtgccaccacgcctggctaatttttgtatttttagtagagatgggttttcaccatgttggccaggacggtctcaatctcttgacctcgtgatccgcccaccgcagcctcccaaaatgctgggattacaggcgtgagccactgcgcccggccaaattctacttcttttattcatgacacttactattttaattattttatttctatacttttttaaaccattttgtcaactttgactttcatgatcgtgtcttctgcctgaaatatacacataatgagaattctgtcttacttattcctgtatcttccttaacctagagtagttcctggcacaaagtgaaaacttaaacacccttaggagctaagattcattctagcttgtcttgaaatgccattggttgggcatattttcaggtttcattttctgacttaatgtagatagaaaatgactgtttacaatctatctgatataaagatcctgtacatcctctaggtcattattattatcattaaattttgtttaacagttccagagatgtggaagatctaggagactcagctcatcccagaatatccttcagaattagcattcaaaatataaactcattatatctgctcctcgttgtatattggcctcttagaagagtagaattttgaagaaaatttttagtcatatctgagttttattgtagttgaattagatatactttggagtctcaagattgattcattctaaaatacgaagtacaaaacatatgccaaacctctgaaactcaatgactaggagatgacttttcagatcgtgtgtctgttccattccattaatctggaaaatgtggggcttggggccatattcgcttgtgttaaacatgtcttcacagccagtgctcatttttgagttttacaatatgctgttttcccttcagccatgtcagtttgaacagtgcatcgtgtgttctctgcagtcactgaagggggttctggagtgcaagccgggagaggccagtgtaagtattccagctccgcttggactccagtttcccagggagccttgggaatcatagttgtaaatttttgactcatcgtactgcaagatcttttctccctcttcgcctgcttgttccatttagtttaactgcgtagatgtgctgatttccgattccaagccaggccgatgcaagttaaagtgtgagtgcaggtgttgtaggtggagtggttacagtgatagcactttgtggacagctattgatgggcctggctcttgaccatcagcccaggactgcgttgtcttctccagcccaagtcactacagtaaggaacacctcccagtaggcccactcttcgcacgcctccttttataggaagggcaccactcctgcagcagcgttccacgttttaactgttcatatctaacttcatatacaaaaaccttttcttagcaaagtccaaaaattttcatcaaaattcttccttacaggtcttccaacaacctaaaacacaggaggaggtttgccagctaagcatcaatataatgcaggtaataatagaaagcagtaatgctgaaagcctcaaataatactaagtgtcagtcaacccctctcctatttataatctgcagatgacgttcaccaaataggtattcttttttcatcttgtctgtgtacataatagtttaaggtaagtgggtaacaaagtttaatgtaagattaattccaacttgttttagcaatacccaaatgtttcatttatgttatgctccccttttttgtgttctcttggtactttctatgtattctgttcgagcacaacgtaaattaaatgatatttagttgttcacattatatctagggtataaagtattgttattgggaccagtgctttgcaggcacataaagttgagaatgtgggtgaatgaataagagaaagtctttttccggaatatatctttacaaacttaataattgatcaaaacataggcacttctaattgtctattacttatgtgatagatatggctgggatatatatttctgtcattaatggggcatatacagtatatacacatattcatacatgcacacaacaccacaccactaatgagatatataattctactttatgtaaagttatctttagtgtccaaatagattaatgtctaggagttcattcctctgagagttctgaaacttatgttttcacttaggtttttatatactgtctggaacagttgagcaccaagcctgatgcagatatagatactacacagtaagtaaaaattaaattaatctcattaatgcatttaagagaattaaaaatacaggctcaagttttatgcttggtcttatatcctaagacttctagtaagaaagaaagattgttcatatcgaagtaatagtttttttttatattcgacctatattctttccatagtttatcttttcaactcatctttgccttattagagacaaatcaagcaaattgaagacatgattagcttattaattatccaaagaacaggttttataaataataaagtgttaaatgtaaatatgtaactcctagttgatgatttttacaattctggtgttagggggaggcaccattgctcttgctagagactaagcatgttggtagaattatgtcaagcttagttattggagctccagtggacacatgttagctcttgatgtttacaaatccatatggtaattcttttataatgctgttgtataggacagcattgtaaagtgctggttttttttttaagaaatccgttctttctgaattatacttggcatgtgtaacttctgtgtactttatgctctgacacagataatactgaaataaatgcctcttatatcttcagttgacaacttgggaatttatccatgtttgtctatttactggttttggcttttgcttttcagtatataaaactatcacctccctagagacccaataagtttttaattctcctaggttttctttgatttgatttcatatttttagctcattatttcaccaggaattggttgttagtcagatccctcatattatggattaaatgtcatgttgcccatgttaacagattatccatagtaccttcttcgagctgttaactgttaagtctaaaacacttattaaaagtttctggccggacatggtggttcatgcctgtaattccagcactttgggaggccgaggcaggcggatcacgaggtcaggagtttgagaccagcctggccaacatggtgaaaccctgtctctactaaaaatataaaaattagccaggcatggtggcgggcgcctgtaatcccagctactcaggaggctgaggcagaagaatgggttgaacccaggaggaggaggttgcagtgagccaagaacgcaccatttgcactccagcctgggggacaagagcaagacttcatctcaaaaaaaaaaaagttatgtgactttcaccaaatgttttccatataattcattgcacgtttaaatttgcgtatagttcattgcatttttgaatttgagtgctttatttgtaactgttcctacttgcttctatgttcagtctctctgttgatgtttcttcccctgacttgtttggaagtatccatgaagacttcagcttgacctcagtaagtcagacgataactagaaagtaaaccattttaaaactgtgtaacaacaatttcgcaaatctaatgactgtgttcctgcatccttgctatagcacgtggtataggacactgtgctgtgctttggagctctattatgtgaaattttcaggaaagtataatttatatgaatttcacaattaacacttttagctggagttgcagtgtcagtcattccatatactgtctgcatctgtgtggtttccgagtgttaaatgggtgcccttatagttcctggtgcttgagagttgccagggtgggttggggagcaggcagaggacaaggatgcccaccccctcacggctcctgcctcttcaaccagagtagttctgcttttctctgttttatttctataagttccatcgtagccttttatttgagcacagcctcaaatagatacacacacacacacacacacacacacacttatacacaaacagatgtatgcatacactgcatatatacatatgtatatatacacacacactttttaaaatgtatacatgtatttaaggagattcacaaacatatattatcatgtgtataaattcatctgttgaaactcaaactctagctatcataaataaaataaccctttctggccaggcacggttgtcatgcctgtcatcccagcactttaggaggccgaggcaagtggatcacttgagatcaggaattccagaccagcctggccaacagggcaaaacctcgtctgtaccaaaagtacaaaaattagtctggtgtggtgtcgggtgcctgtaatcccagctactcgggaggctgaggcaggagaatcgcttcagcccaagaggagaagcttgcagtgagccaagatggctccactgtgctccagcctgggtgacagagtgagactccatctcagaaaaataataataataaataaccctctctggtttgtcatgagtttgaagggggggtgtgtgtgtgtgtgtgtggtctgtgtctgtctcaaggtaaaactgtttgacccaaatgttctactatatatgtaagtatgaatacctaaataagggatttggtatattagaaaaaatatagtttggtcaaagtaatttaaaaaattattctagattcaattccttggatgactaggtagagaatgataccattcactgagacagaaattcagggaaaacacaggctcacgagaacctgggttttttttgttgttgttgaatgggtgacatacaggtagagatatccagtgggtgattgaatgtccttgtttagatcccaggagagaaatctagatacagatttgtgaatcagcagtatataagcaatatataaggcctgggagtagataagaacaccaagaattctggctgaacaaaagaaaaatgctggttcttctgttcacccagaattgcaggtggagtcgccccaagagtggtggcgggccatcccgagccaccccaaaatgaggtcagctggccttccaaagcaagaagcatgaaatgcagggtcatcagtgcaaagcattagggaacgacacacagagggggcggcacttggtcctcacaaggaaaagcagggagcgacgtcctgcctaggtatgtcggcagtgagggggcctgggtgtggacttcatgggagggtttaaagcatttgcctcagggcggggctgatttctgctatttagcaacgtggttgatctctgtgttttctgctatagcttaaagagcttcatcggtgcctgggaggtcatggtccccacttgggtgcaagcctgcaggggaaggcagtcagctggcccagtcagagccgccaaggcactctgtgctcctccaacagggcgcggagagaaagcgagggaagctggggaaccctaccctcactgaatgagagaagggccaaatatataaaaataatgttgagggtgccagtatttatgggctcaccagtagcagagagcctcagtttgccctgaaaagggttaatcagagagacagaaggaaatccagatagagcagcactcctgagagggatggaaaatcccatttaaacaaaggaatgcttagcagccccaagggctgaggggcttgtggagcatggaaatgcggcaggctaggggagtcctgtggagacagggctgcaggagagggcctcccgaatggagactgctggagtcttccccttgctggcactctgaatcctcaggcactccctcctggtgtgctgtgtccctgcacttggggtggtcctgctcttgtgcctcttccagtgggtggagcacaagagtcagccctggactccctgtgacgcggcagctctcagctgactcacattgagcctattctcagctatccccccaggcacctcacatgtgtctctgcaggttgcagggcctcctctctcctgccttagtctccagtgtttttttgtgaccaaattcagttcctctgtattctccattgaaagctatctcatcagatttggtgcgatcttcttagggtcttgttctgttatccagaagggaagcagctgtggtaaggaaggtatctagattcggagtcagaagacactggttcgcatcctgtgtgacctcaggcacatcactgagcgggttctcctgaacggaacgtgggggatcactgaaataatctaagaccatattcatcacctgcacgtgctacatttgatgggcggcgttgttttcaaacgtgcgtctccatcttagttgttaataagcttttgactagtcatccacggtccagagtctgtgctgttcagtttttctttccacttttattgcatctgaatgattacatttgagcaacaaatgtacttataggaggaagactttaaatcactcaaatagcttttctgttttttaagagtcatgcaaattacagtgagaaaaacaaagagaatttacagggcagagaagatgtggcaggctcaggtctgctagataaggagacttgactctggaaggaaaaagtaactaaggattgattttcaaaactgagcaaccagctgacgtttttgaggcgaacagcatgttgaaggcagctgatgaaatgtgaggtttacttactccttgtccttacagggactgcgtcatggtgactccaggcccggggactggaggggaatgtagcgtcctcgtccctccctcacctgggcgagtttccagtgcttattcactgttttccttctggccgtttattcacgaaacgtggaggagtatcatacataatacaaccctatttaccttgtcttataccccatttcctagccatagagtaactcaaggccgttcgcttgtttgaagatcctttaatactccctaggccttttacttatgtttgttgatgactagaaacaggtagtgaataggctacacactctgccagaaataaagatgggaacattcaaaataaaagaatctagaaagtttttggaaactgctgagctgaatgaaattattgggagatataaaatactcttggtgactaaattcaaggatgttatcttttttcacatatccaaaaaaataggaagctctttccacattgactatatcgaattactttcctgtaagttattctggttatgcacagaaagagcatgcagagtatgtgatggaaagtgttttttgccaaaggtttagtcaaaggatctaactcaaggctctagattagtcaaagttgttccagagaaggcccgcctgcctgcgggagcacaggttgggtgcctcggtgaaccgcaccagcagcaaaagggcaattcctggaattttatttaccaggtagtcttgaactgtgaaaggacactgtgtttatcagcatttgtgtctggtagttttcgtaagaaattactttaggtggacagaaccctggagaatgtagaagtaactggcttgtaccccttcctcttggcaacactgaccgtgtcctaaggtggagtcctccaccctcagtgaccctcactccccattagagggagattattccttgttttcttctgcaaacacaagcaattcttaatgccctaaggtatttaaaggagcccatcatacagatatatggcagtgtaattctgttccaggttataaaaatttataaactactttataatagtttctacattttaaatgtaattagttattaaaaatattcctgtagccttttcttgtatacaaagtattaagtaaacaatatagtagaacacttttcataagcaacactgatcccagttcccagctgatcctagttaatggaattttctcaatctgtttttccatccaagctgttaagtcttaaaggaaatatttgattctttagtatattgcatgtaattataagcaaatagtagagttgcaggattttactgtgtttctctttatgttataatattgggaaagaagcagccaagaaaagcaaagcattggatattgacgttaaagagcagagattataattaaacttgacaagtgttaatcagctattctctctggcaccataaaggtgattttctaaacatttgttttgcttttaggaacagcgccttttgatagtcctaagtaattgctgctatctagaacgtcacaccttcctaaatatcgcagaacattttgaaaagcacaacttccagggaatagaaaaaatcacacaggtaagcgagttcatgtaaaacgcacaagtcggtggttttaccagctcagttttcaagctgtttcctagcctgtgttctgctagcagtgcccattccctctgcgtgccgcccccacagccacactgcttccccgccttcaccctgctaaagctttggatgattcccttccttcccatggttcaccttgaatggttaatttaatacccttttcttttctctagagcagagctccctcaaggttacagctggtttactcctcacctgagctgttcaaaagtgagggaagaaaatgaggagggaaaggcagcaaacccagatctttcagaattatctcatatttgactccttttaggtgaacgctttagatacagccagcagcaaactccctgagcctgcagaaaaacctcttcctgcgtattcacacctctccttcctctctccctttctgtatgacctcaaggatgcttttgctttgctgctttgtgcatgcacgcgtgcacacacagccgctggctcagaacagctgcaggatgctctgcatcctacctgaaaaatatgtcctccccactctccaatcactgcacgcagaaagattgggcaaaagggagtccagtagaaattaatggagtgagttttctttttaatgttacactttgttgtttatatttttttcaactaagcagaaaaggaaaaaatgaagtaaccttgttattaaggttgattggttcctgggcaaaggtttatcagatttctcagtaaaactatgctagtaccactttttaatgtcagtacagttttctcaatgcaaagaatgagaacgataatgatctggttaatcttataatcaacacgcactcagggttacctactttttataaatggtggttccagttcgtgaactacattgggatttttttttcaaagagtgaaaatgtcaaagtgggcggccctgtcttgttttcctgcctttttgtaaagattaatcatcctgatgagaaatgtcgtgacttaagcctttggggccaaatgtctagtttatttccagaaatttttgtgttaagaattgcaaggtgctatcttgcagtaaaaaagtggctatttgtagaaggtggttgctttgtttttatataacaacaatgacatgaatatatttattggagaaatgttatttatcattttaaaatatgtgaaatgattaggaattgcatgtaaaagaagcaagtttggttttctctaggttttttgcagtactaagtaggaactgttgcttcactttatatcactaagaagtagaattaaattaattcttaaaaagattttttcatatccttccttgtctttgtccagatcattttgagaccaagataatacaaaggatctggagatttagcagtataaatggtaggctctttcccactcagaatttggatttttttttcatcgaccgtcttgaatattttgaaattcagttgtgtttagaatgaatagatagtaaactagatttagatgataacatttgcactgattttattcatttgtgaatctgttaatttcatgattccaaccaagtaaagtctatttctggcatcaaagggaaaggtctgctgactctgccactgtttttcatagttttccctccaaaagacaaataattctaggggcatcgatcccagaagagtcacagggcacaggtcacagtggatggcttattcattccctctctgtttccgcacttgaagatgagggtctctcatagggggacctcatgtcactgggtgtgagaccttctctcagactcctctggtgtgagccagggcaggccaagtgtttcctccggggatatttcctcctgctttcttactggtacttacgccaggaaaggcattaaacggccagtttttcattcccttcacctgttcctcaccttgaaacatggagataaattagtcttaatataggaacaggagacaaataaatgtttttaggggattattaaaatgtaatgatcagtgacatttgaagctagaatgattttatacatacacttttatttggtgcatgaaatcaggaatggtatcatcagctccataatcttcatagggaaagatacccagagaggtcaaggacttgacctgtaagagcacagcaaggcaggactcaaaattacattttctcattctaaatccggaatgctttctggtccagcaccatgcatcttaaagaataaaactggtctcatgataatacagttgacccttaaacaactcagaggttggggtgccaaccccctgtgcagtcgaaaatctaagtgtaacttttgaccaccccaaaacctaactactagtagcctcctgttggctggaagccttatgaataaaacagcctatcagcatgtattttgtttatctattgcatactgtattcctgtaatatagtaagctggagaaaagagaatgttaagacaattattaggaagacaaaatatattaacactattcataaagtggaagtgaataattattatgaaggtcttcatcctcctcatcttcatgtggactaggctgaggaagagcaagaggaggggttggtcttgctgtgtcaggggtggcggaggcagaagaaaatgcgtgtataagtggacccacatagttcagacccgtggtgttcaagggtcacctgcacaccaaagaaatgaaaataggacctgaagctggttgattagtgtacattgttttggcctttatgaaaccacattgaatgataattcatgagatcagggtatccaaatcatcttcttctacattgttcctccttaaaaataagccccgttataaacctttggtggactcggtgctgtctgaatccagaagtatgtgccaacagggagcgtcctgccatgtgcatgcattttcattagtattgcctgtaccatttagcttttgctcaagtcctggagatgtctttttccagtcatgcatttttttttcaacttataaaagtaagatccaaccgttattcttaaaaagaaaaaatattgggaagtctaaaaaaaaataaaaattaaaataatctataatgcaccaaccaaaggtagacactacgattttaatatttatagtaaccatgactttatatatcctatctatatgttataaaaatatgaaacatggtgaaaaggaatttgagaaaaaaagaaacatttttctgaattcatttgacattgtatttttctactgaatatattctatcatgagtacttttccatttttatttaatatttttgtaaaatgtgtcttatggctttataacatttgttaatgtgggtatacgtagtatttttaacctctcccatactagtaaccttaaggttatttttaatttttgttgttgttactgagaagtgaagataatctttgatcacatgtctaattacttcctcacgatagaatcctgaagtagattcacagccccagaggtacttggtaaatattgccagatagctttttggaagctgatctcatcacatttctgtcatctttttaattacgatgtttaattcgataggttaaaataggctttcattgtattttaatttgcatgcctttttctatttaggaggttagcgctttttcttctgttattgactgtttatattctagaagaactaattttgaaggctcttagagagttaagatacatgttgcaaataagttgcaatttaagtgtgcaaaccaaatttgccaccaaccaaattctttcatacctttgagaaaggaaaaccagagttgtatggttaataaacttcagcgtataattttattgtggtaggtataattacataattccagggagtgcttttacatatataaaatacttttttaatctgtcccagtctttaaaaataagcatctaattcagaatttgtatacttccagattttcacctgacgaagcctgtagacattaaacatggctggcattaaatttttaattgaagtttttttttttttttttttttttttgagacggagtctcgctctgtcgcccaggccggactgcggactgcagtggcgcaatctcggctcactgcaagctccgcttcccgggttcacgccattctcctgcctcagcctcccgagtagctgggactacaggcacccgccactgcgcccggctaattttttgtatttttagtagagacggggtttcaccttgttagccaggatggtctcgatctcctgacctcatgatccacccgcctcggcctcccaaagtgctgggattacaggcgtgagccaccgcgcccggcctgaagttttattttaagcctgtaaatctctttgagaaactccggcgtgaaaggtgtggaggggcagctcctttttcttatatgtccagggaagttcctttatgctgagcagctgattctagagttttgcgttgctttaactgcatgtactgtattttacatgtttgattattgtagcttatttgaatatcactaaatttcaagttggaaaccatttgaatacctagatgtgagtgagtacagttttgtgtcttcactgctgtattatctctatatatatgtgtttcattttccttgtgttatacgtataaacaaaatcagctaaattttgtttacaggctattttatataataaataagttgtaacttaatctgtttcagagtttaagatcttacagacagaaattataagttgatcagatgtgtttctgctttcaaaacactgatcctaatttttgaccctatttggctgccttgagtttcttgttcaaacaggaagggaaagaataaacatacatacttagagagataccccatcagaaggactcagagaccttgtcatttacaaagtgctacctccccaatacagaaagtacctgagaaaaggtttcacaaagcaagaaagaacataagatttcacattccagatgctgtttcagagagcggaggaaaggcaccacatctctttggaaagctgggaagtgcaggaaataaggagtaaaacagctggttctccagttgggtagggtgtggcattcctaagccaaaaactttgaacccaagccaacaaaatgtagataattgtggtaccatcccctgtatttctgttctctgagcatttgatttgtctgcttcctcttcatactcagcagtttctgtagacgacctcatctgcctccacagcttcacccatcactgacggatgcccatgattcccagattctttatttttgacctgcatgtcattctgataccttcgatctgtttcctaccagacgtcctccctggaagtttccatcgagatttcaaagcaacctggcctaaccagtcatcttcctccttcaaaacagcttctcttttatgtgttccctgacttagtcagtagccactgtggatcactgagccacagcttgggaatggctcctttttttctgttttatttattcatttttaattgacaaataataattatgcatatttatggtgcacaatgtgatgttcaacctaagcatacattatagaaaagtcagtcgaactaattaacatattcatcacctcaccaacttacctttgttgaggacattaaaaatcttttaacacttttgaaatacacaatacattattattaactgtggttaccatgccatgccctttgatcaacacctcccctttcctggcctcactctgccctcagcccccggtaactaccattctactctctgtttctatgataatgacttttgtagattccacatataagtgagatcacagtatttgtctttccgtgcctggtttatttcatttagcataaggtcctccagtaccatccatgttgcagatgacagaatttccttcttctttaaggctgtgtagtattctattgtgtatatgcaccacattttaaaattcattcatccattactgggaattattcttgacatcattcctcatgatggtttttgccaagtctttcttctcaactcaacccctgaaccatcttccaaatccttctctacctctctaatttgctgttcctgtccaagcttagcccttttgcatcatccgacagccgtggtgttgtaggaaccttcctagcggttgctttgcttaatgtctaaacgtttccactctccagcttatcatccagagtgtccaggatgggctttcaaaaacccagagctcctcttgttcttcctcctcctgtgtttcaggactccgtactgcctgaagagctaagctccgtaggctggcgtttgtgtaggattttcatctggctctcttgcctctttctctcatggctttttgtccccctactccaacaccttatcattcagcctgggcacctgctcatctttacttgaacatttcatatactttctctgttcattcactcattcaataagtacacattcaatgccagcttactacggtgctctgttgtaggaacatttatctgtagcttgtgttgtactctctaggcccagtattttctttatgaggtgatggttaatgactggtccaatttcttaagtggttatagaaccattcagcttttttatttcttcctgttagttgtagtcatctgtatttttctaggactgccttttcctcagtcaatccggacttcacaaaatcttgatcgtccaccaaagcccacttgagatgcagatgtctcatcctttgttaagcctgtagggcctctcctcctccattcccgaagtgcaaggtgcaccgtaccgtcctctttctcctttgatgccttgttctcggcactagaacagcatgtcacacattgcattatgattagtttaatggagatgcacttcttttctagatgtacattctttttaaatgtttttatgttaaatattttatccatataatagaatagatatcgcataatgtaggatgtaagagagtgataaaatgaacccaggtgctcccacaccaccaagctgaaggaacaaagcatcccagaggccttatgtccacttgtgcccctgcacagccatgccacccaccttctcctatagagaactacttctgaattgtgtggtttctaaacaatattttgtttgaaattaccttttttgacttttacattagcataaataagattatatggtgtgtgtttttctgtgactttgttttcccactcagtattattttgagatgtatccatgttgtagcatgtaggtcatgctcgtttgtaacatgaattaaagaatatattcctttttcttctttgaaagagtttgcataagattggaattatttattctttgaatatttagaaaaacgctctggtagtggtattttccgtatgcccagattttctttgtgagatgattgctaatgactggcccaatttctttaatggttatagaaccatccagctttttatttcttcatgttaatcgtagtcatctatatttttctaggactttgcccattttgcttaaattttcaaatctgttggcgtaaaattgttttataacagttttattacttcaacctcagctgcgatgtggtccttatttgtacttactatcgcttgtttgtatttttattccttcaacctcagctgcgatatggtcattttttgtacttactatcgcttgtttgtatttttattctttgtttcttgccagagtctttttcagagaataacttttgactttagtagtgctctctcgttatatccttgctttctcttgcagtaatttggactctaatcttgtttatttacatagttcattaattctaaacctttctgtcttttaatatgaacatttaaggctgtgaatttccctctaagtgtctttttagctgtgtttcccatgttttcgcaagtggtattttagttattcttcattttttttagttttgaattttaatattctattttagtcttggctagaagtatgattttaaatttccaagctaagggagcagaggagcagttggaattagttttctctttgttagagatttctaacatcattgttctgaggtcagagaatatcatgtttttaggtttgctgaggcttgctttgtaagctcatatgtggacagttttctgaaaccctacctcggttgaaaagatcgtgtccttacgttttggataccacattccacagatgtctattacatcgggtttgtggattatgttgttcagtccttttgtttgtttggtttggactttgatctcttgattactgagaaaaatgtagtaaggtttttccttggctcctttttagatactttatttgcctcttctgttctgtatttttattatgtgtcttggtattattatgttttttggcctgtttgttcccttggctctggttgatgtctttaatcaattctggaaagttctaagccattatctcttcaaatattttttcttctccattcaaacttttctgtcctttaagatctcctattgggtgtatgttagaccttctcactctattcttcacatctcttaatttttttcttttttattctcctcatctttaattgtctgtactgattggggtaatctcctcagctctctctttttgttccttgtttcttcagttgtgtctaatcttgctgaaatttactgtgtattgaaatgttatttcagttgtgtttcttctccagaaactttgttttttgttactaagtaaggggaaattattaacttactctggaatggtataattcagaaatcagggaaggagatagtggtagcagtaaagttctttccagtgtctttccgattattctgtatagatagaaaatcaaatcgtcaaggataagattatcctattgagaacagtggagcaaacaagtgaagcctaatatataggatgtgaggtgactaacttgattattaaaaattcctggctgggtgtggtggctcctgcctgtaatccctgcactctgggaggctgaggtgggtggatcacctaaggtgaggagttcaagacgagcctggccaacatggtgaaaccccatctctactaaaaataaaaaaattagctgggcatggtgtgcgcatgtgtggcttggaagccctcgctaacaagtcctggagacacaggctgtccttctgtttcaggtgacagtatatcctgtttcatctgtagttttcttttttgtgttaatacttctcctaggaattaagaggttttttaaaattagttatttacttggcatttattttgcccccatttgacaagttgtggttcagtaatataaaggaatgtcagtttgccacctgtcctgccatccatttgaaaagagctaaaaaaaattaatttgtctgaacctagttatccagagtcacttggatagatgttctaatgatagtttgatgaccttatttctatacagatggccaaattggaatgaaaataattgtttgttgtttattttctttcttggaagcataatttttaaaaaacattattatcaaaaagtttttaaaatcacaaattggaaattttaaattggaaacattaaaatacatcaaaataatgatgttatcttttaaaccattgtgactgtgttgaagacaacagtaaagaagttagagaaatttgacaatcgacttaggcatctcttctccaggactgtccattgggagcactggctggcatcagtgcctggtgcgtgagatggaaatgttgttgagtgtacgtgattgctgctaagaaaggcagggcggtggcttattgggagcactggctggcatcagtgccggtgcgtgagatggaaatgttgttgagtatatacatgattgctgctaaggtggcagggcgctggcttattgggagtattgtccattacaccagaattctgcctccagcatacgccttttacttctgtaagttattacccacagttttttaatgcttcgaaagaccctcctcagtgctaatatgtacgaattcagtgagtaagtctatttctgaatacagatattcctgaacttatgatggggctacctccagataaacccttccaaaattgaaaatatcgtaagcgcattttctacttatgatattttcttttttttttttttcttcagacagagtcttgctctgtcacccaggctgtagtgcagtggtgtgatcttggctcactgcaacctccgcctcccgggttcaagcaattcctgcctcaacctccctagtagctgggattacaggcacctgtcaccacagccggctaattttcgtatttttagtagagacagggtttcaccatcttggccaggctggtcttgaactcctgaccccgtgatccacccgcctcagcctcccagcgtgctaggattataggcgtgagccactgtgcccggccagatattttctacttacagtgggtttaacctgacgtagcacatcataagccagggaacatactgaatgcgcattgcttttacaccctggtaaagtgggaaaatcatgagttgaactctcataagttgggactgtctgtacacaattaaattgttatcttttttaaaggaggcactgtgtttttgttagagacacctgccctaaaaggccactggaccctcaggcatgtctactctgctgcctttctcacccccatcagtgaccctttagcgctccgtctctgtttaaccactgcattccttaaacacatcactttataagactgatttccttagtgtcaggatgtttttaaagttaatctttcttcctcactctcagatagcgattaatggtagatggatctgacccttgctttttgagcaggaatcaagcagacccagttttctatgttcagcagccagtgtgaacagggtgttagtgaaaatgaggctgttgagttaatagaaatagctgctagcatttattatgtatttgctttcagtgtgctatgcaagtttcctgaattatctgtttaaatccttacaacaaaaagtatgagctgtgtactcctgacattgatcctgcctcatcacacattaatactgccattctactctctttttgtagcatttgcctattaactgtttgcacatctatttattttcaactcctcttttcccttctttttttaaaaaatgaggtgtaatttacctacagtaaaagacacaaatcttaagcttatggattgatggctttttacatatgcacacgttccagcatccaccaccagatgaaaatacaaaaccttcccttgtgccctgtttgagtaggctcccttctcagcaacgttccagctgctatctgcagagaatcattttgcctgtcccagaactttacgtggagttccatgcagtttgttgtcttttgtatctggcttcttttgctccaaattaattttttgagattcatccagttgtgtgtaccagtgagtcattttcttttattgctgagtttggataaccagattttgtttaatcattctcatggtgatggacatggggttgtctccagttttaggcctttatggataaagttgtggtgaatattcctgtaagtctctttgtggatgtttgtactcactgatcttggatataaaccttgaagtacaatagctggtcgtggcacaagctgattaggaactctgagtagttttccagagtgtacactccatcggtcatcaactcgagtgtacgctccgtcggtcatcatcttgagtgtacgctccgtcggccatcaactcgagtgtacgctccgtcggccgtcacctcatgtgtacgctccgtcggtcatgaactcgagtgtacgctccgtcggccatcaactcgagtgtgcgctccgtcggccgtcaactcgagtgtacgctccgtcggccgtcatctcgtgtgtgcgctccgtcggctgtcaactcgagtgtacgctccgtcggccgtcatctcgtgtgtgccctccgtcggccgtcatctcgtgtgtgcgctccgtcggtcgtcatctcgagtgtacgctccgtcggtcgtcaactcaagtgtacgctccgtcggtcataaactcggttataaactgcatcctagccaacacttaatattaccaatcttgtttatttcagccagtctcattgttgctttatttggttttccctaacaatgatgttaagcaccttttcttgtatattcagatacattcaggtagcttctttcttgaagtgctgtttaaccccagctcatttttaaattggatcagtcatctttctattgacgatttttagaaggctctaaataagtcctttgtcatgcatacatattttttcagttcatggcttgctgttttgtttttataatatcttttgaacagaattgtttaattttgatgagatccattgtatcaagcttttaaaatgtttaatgcctttcatatgttgtcagaatctttacctgcttcaatgtcctgaatattttttcccagaagttttgtaatgttaacttttatgtttaggtctatgatgtctatccttatgccaatattgcattgttttatttattataggtttatagtcagtcttgatatcaagtagtatgagtcttccaactttgttctttttaaattgtttgggctattttaggtcctttccatttatatataaattttagcctgtgaatttttaccaagaaaaggccttttaggggttcattgaatttggagaaaattaccaatattgatgatcctatttatttgtttaggccatctttaatttctttcagcagtgttttgtagtttccattagagattttccatgtcttttgttaagtttattcctaggtattttattttttatggtattgtattataatccttcgatgtcttattatatagaaatataattgatttttgttattgactctgctgcctccataaatttacttattccattagtatgtcaacctgcttagaatttctaaatacgtaatgatgtcttctgttaataaaaacagttttacttcttcttttttggtattatttcttgccagatctcatggactaggacctctggtataatcttgaaatagtggtgaaaggggacaactttgccttattcctgatcttctggagaaagcactctatatttgtaccattttgtagatgccctttacacagctgattttctttctagtcttagtttactgagaatttttgtcatgaaagtatattgaattttctcaagtgctttttcatctgttgaaaaaataccacttctgcatgatatgtttttaaaatttatttatagtttctatttgccaatagtttgtttgggtttttatgtctttgttcatgaaggctattggcgtgtgatttttttcttacaatatcttgctcagtttggatattagggttatactggcttcattaaacaaaataggaaatgctttcagcctctattctatgaaaatgtttgtgtgtgctataatttcttccttacatgcttggtagagtcacaaatgaaaccacctggacctgaagttctcattgtcaagcccttgtctataatggattcaattagtttaataaatataggactacttgtgccagtttttgaaggttgtgtttttcagcagattagcaatttcctctatgttgtcaagacttgatggcataaaactgtaatgtccttttactatccttttaatgtcttcaggatctataggaatgtttcttttttcatttctgttcttggcaatatgtgggtttttttctttatttcttcatcagtcttgcccaggagcttatcgtttctgttgttattcctttttaatttttaaaaaatttcaaattttttaagagacagggtcttgctctgttacctagattggagtacggtagttgaatcataccacgctgcagcctcgatctcctgggctaaagtcattctctcaccatagcccccaagtagctgggaccacagatgtgcaccaccatgcctggctaatcatttttattattatttccaaagatcctacttttggcattggtggttttctttaatatttacctttttaagatattgatttctgttctttatcttttccttctattttctttgggtttaattttctctttttctagatacttggggcagaaaattagagcagtgatttaagtttttctccttttaaacttttcttttaaaacattttcagctataaatttctagccactggttctctcttgcagattttgatatgttatctcttcattgtgtgttattagtatttcccttttggatgcctccttcctttgaagaaatcttacttcacacttgtatttcacatgtccagggagtctctaatcatctatttcggtttgtgtttatagatactagagaaagagagagataaagaagggcgagagggaactcagagttattgcctgtcactgttttcctcagtagttcatcttcttcgttctgatgtgtttgattttaggttagagccctttctcattacatgggtgaaatactccttgaacccttgcatatccaaaaatatctttctcggactctgttaagagaatgacacgctggctaaatacaggattcttgggttctgttctttcattcctgtagattttaatccagtgatttcagctcccagtactgcatgtgagaaatctgacgtcagaccagttctttcttctttgtaagtaaattattgttttgatctagaagcttgaaagtcagtctgtctctgtctctctctctctctctctctctctgtctctctctcatttagagtaaatgtattagaaactagaaactttaacagtagttgcctagatatgtgggctgtcttaccagtctagcctggcactctgcaagcctactcaagttgcaaacttgggtctttctttagatccagttaaattttctcctactgcttgtttaatgaataccttttctctatctgcttgtatttctttacttgaatttctattttttgcatgttagagctcctgggtttatcttctagtcttgttcttcatagttttcatgtctttacacttttactctatgttttgaagtagttcttgcacttcagatcagtctcaacagtgaccaggagttccttgtgttaatctactcatttgttagctttggaagttgtatgtttcacctctggaaatcttgttttgtattatactttaatcgtcatgagggttttctttcttttttctgttcaagttgttgcttgtctcttctgcagctgagtttcactgcttggtggatgtgcctgtgcatagcagcggactcccttagacgtgtgtttatttttcactgtagttcgttgcagctcaggcctggcattggagagaagcctatccctctcaggccagtgctgcagaagcagaacggccaccagccccctgcagggtgacctgggcccacagactctccacaccccagacttcccatatcctccatgcttgggtctctgcctcccccctcttcttcttctggcctcctgcctgctggtgagacaaggcacactcacgtagggctgatgccagcctccttaccctcttctgctcccactcccatcgggagcccccacagtccatgcagctgaactgtgccaaggacaggacttactgataggggtctttcctgttcctttttgcccatgacagcgagcgtgtgtctggcctccctgtggagttgccttagactcgaaggcctgacctgcacgcccctcaagcagagctgtaactggagggagaatccaggggagccacactggggttactggagtgtcagagcaggcttattttctattggtcacacttttcaaatgaattagttaatatgaagaaacagaacatgattttaaatggttcctttttaattgtagtttactggctattacaatttagtatttataatgcctcttgctctgtgtacagaaatgagtggttagtattttcaaaaatgaatgatatggttaggctttctgtccctacccaaatctcctcttgatttgtaatccccataatccccacgtgtcaagggagagaccaggtggaggtcattgaatcgtagtggccgtttcccccatgctcttctcatgatagtaagttctaatgggatctaatggttttataaggggctctcttccccttccactgggtacttctccttctggccaccttctccttcttcttgtgaagaagatgccttgcttcccctttgccttccaccaagactgtaagtttcctgagggctccccagccatgcataacataattgagtcaattaaacttctttcttttataaattacctaatcttgggcagttctttatagcagtatgagaacggactaatacaatgacctgtagtccatatatggagattattttttctcctgcaaaatagctatgctaaaagagatctttgttactgaaaatatataaaagtcacgagtttttgtaggaaaattgagaagtgcttttattatagtctgaagtatttattgttaacattattttactttttccatcaccctcaaataggcaactcatactcttcattatgtgtttataggttagcatggcctcattgaaagaactagatcaaagactctttgaaaattacatcgagttgaaagcagatcccatcgttggctccttagaacctggaatttatgcaggatattttgattggaaggactgcctgcctccaacaggtaagtaataaagtttcttgagtaatagatgtggatatacttttatcaattgatacttgcttgaattcttttcattttattctcatttttctcatatctactgagagtgagagattaatttgattttaactttttgtttgcttaaacccatttcttggatagtttggaaattggacactttgtattattagtggcttaaagctgttcttaaattctagagaataattaatgataacttgtaataattgatcgttttagtaatgcattcctgcttcctgtgatcttctcacatagatacaatagagtgattgtgagtgacagtggcatgcaatgaccttgtgtacatcatcaaaaaatgtattaaagaaatctggtcacttctatgtaagacctgattagtgatgctgtaaaggcgaaggataggagaaaagtgtgtaggagtaagattattatagtaatttagcaaagagaattgagccacagaaggatgaatgacacagttcaagtattatctttgtgatttcaaatgaaagtcacttgaatcacttcaaaatatatatttttaaaataactattgctttctgaatcaagtaaacttttgattgatcaaatagttgtttctttgtatgaaataacgtggaatacctaaaaccaagctgcctgttggcacttttgtagagaagtagtttatgtagaagtggtcatgctggtatcggacacgggttcttcatgggtgtacatatgcagatataacaaagcaccagtgagttgttaacaggtttggtaacttcattgttttaaccaatcactttaacctccttttgtttttattgtatggcacttatactaaacgatgataaaattgtttactgtttaaacacctttggtttttattgtatagtgttcacgtatagtgatgccaaaagtgtaaactaaaaactgggatcattaaattagccacagttacttaatgtgaccacagttattgaatttcctgagctcacagtcatggcagtcatgccagcccttattcctcatgtgcttttctgtgcacacacttttctgtgcacacactttctgtgcccacaccacattcagttcataccctcaaagtacatccttttaaagtttaaggcaggttctatcagtatcttacttaaaattcttacaacatcttctcatgatagtaaaaccggggaagctgtgctgtgcccacctctgccctggcactctgcccactgccccaatgctccacctcacagcccctctccagctggactcaacctctgcctttttgaaaagctcatccttctaaaatataaattggatcctgtcaatcccctgctgaaaaaccttcgaggaggctcattctccctgaggctaaccccagacttctcagacaaggtagcatccccacaggtaccagattccacggatgctcaagttcccagtgtgaaatggtgtcatattcgcatgtaacctatgcacatcctcctgtatgctttaaatcatttctagattacttataacacctaatacaatgcccgtgctttgtgaatagttgttaaactgtatcatttagggagtcatgacaaggaagaaagtttgtatatgctcagtacagatgcagccatctgggtcccccaccccggaatattttccattcatggttggttgaatccacagatgcagaagccactgttgtggaggccacagatgcagaggccacagatgcagagggccagcagtactccctgtgcttgctatgagttacttccctctccacgggctcccccaggcagcaggcaggctgggtgcttcgtgcactgtgaaccctgtgcctagtccctctcacctctgcccctctcctaacctctcctgcccttccgggccctgtgtcctctgggagctcacccagcccatcccctgcatgtctccaggtcgcattggcctacctccattcgtgatgctcccagagcagctcttgccactctctgtgcccgcgggaaatgttttgtcgttatctagctccttgctggacagtctcagcacaaggccgtcatttgggtgtcttgttctcagagtttttagcatagtgcagtctgtgacactcagctgatgctgtgtgtgtgtttgtggagtaaatgaagattggcattttctataataatataccatctctctaaatgtgccagttgctccttctcttccaagtgtttgccatatgcttttgcctgatttttctcaaaattttctcagtaggaaagtacattatacagtgttctagcttccactgttcttctgatttgctttttaataaacagtacacggtggatattcatatttgctgaatgggaatgagtgagagtgctcattttcttgtcctttgtgaattctcatatggtagttgcatagacttgctaaatttgagcagctgcgtttcaattaaaatgcgactgtcaagtgtatctaacacatcagcacgtctgtctgtttaactatttaaactcttaccgaacaatgtattaccttgcaccatgcaaaaagtaatacatttttcggtaatagttaaaatgaattttgttaaagttcgtatcttcccctgtgattagcatgtaacgacattaactgttcacacatctaacacatcagcaattctatctgtttagttatgtaaactattactgaacaatgtattactttgcatcaccatgcaaaaagtaatacattgttcagtaatagtttaaatgaattttgtcaaagttcatatcttttcctgtgattcacatgtaagtacgttaactgttcactctgaaatcatgcttatcttaattggttatgttcaaggctattaaatcacttgtgatatttctttgagaatagaaaaaaatcatgacacagcccctctgagtttcctgcgcttcagtgatgactataaaaatttagaatgggccaccgagtttcactctcaacaaagtgattcttctctgtcgtcactgaaatctccgattgttaccgagaaagaggatttatttgcccctgatgcagaagaagacttttctttgccagccctctctcagacctgctgcctccgttaacaaacagcgaggcatctttagtgtatgccgaacaccggcaggggcagtcgagaatgtctgtcaggtgaaaggcaggtctttcccatccacccgctccaaggtgtcttcggaaaacagacatctatgaaggcccattccctgaagggcggcgttaggtcacaggacttcaagtgcaggggctgctggccattatcacgaggctgtgaatcgtgtggcagcacttgagtgagcagtaaccagggcgcgggggggggtaaaaggcaggcgatgccgggctaacggggatcttagggttcttctgcatccggctagttaccaccacttggaatttcaaagtcctcactggatttatcttagggttcttctgcatccggctagttaccaccacttggaatttcaaagtcctcactggatttatcttagggttcttctgcatccagctagttaccaccacttggaatttcaaagtcctcactggatttatttaaggtacccagaatcctgtctctgtgaccttcatattttccagccatgacattgaactagacaagcctcggttgtgaattaggatcagagcctaaatgtaatcctgaggttgatcttaataagagtctgtaacctcagataatcttcactacaaaattaagattcttctggctgtgtgacattaagtggtgaggcttttttttttaacatagcttcgtttattggttttgtttttttcctgacaaactttctttcataagcaaatggcacatggcaccatactaccagcaatttatttactcttcctcagattccaaaaacatgtagaagtcatcggtgctcgtttcacttttataaactctatttagttctgttctttgtgtagttttgacttcatgattactaactgaacctcagccttgcatagtcatatagtgatttttagtttgtttaaagctgacttaagttgagaccttgtgtaaagtgagcagccaaaatagtttgactattaatcttccaaaataatttcaattaacaactttagtattatcttcagagtttacttcttcagaaactgaattttgcaaatcatgtaggtaactgattacttattgctgtagttaccaataaatttagtttccgatactgtatgtagtgattaaaaaaaaaaatccagttgattaatttcatgattcaacaagagatatccgttaaagccgtagcgatgtttttttaaatcttaccgttgggtatttaaattgttgtcacctctttatttgtgtatatgtcagtaaagattattctagttagttctgagtcacaaaactgctgttaagattttaattgttctgttatctgcaattattaagagttcttagtatttgaattttataaattttaaataagaatactgttggtctttacttacaaatacacattgaagttcacgtctttgaaacattaaataagaaaaaagtatttatttaagttttctgttaaatactggttttattttttctatcaaaaagtcataaaaatttaaattaatgtatattatttaaagttatttactaagtgaatctaaacttaatcattttctataggtaaatagtgaacttatttttgattcaaatgtgcttatactaattatagtaattgaaattataatgggaaagggaaaactttatataatttgtgacatgagtatgtctaggaccattctaaaaataacagcagagttggttgcttccatgtatgatgcatataacctagagtagggtaacctcctgcccgtcagtggtgtgccagagcacaggcttggggtgcacagtccatcagtgagcgaaacttgtaagtgtgttgtccaggcagtgtgccaagcagcatattccaacaaattgaagagaaagaaaatgtaagtctaattatggagacagaggcagaagcacagctcttctcaagtctatgtttgttgaattttattttaagatctctgccttttggaatgtatcttgcagatgttttcactgaattttacaagagacattgcacaattaggttatctcttgcatcctgtaacttaaatcattcaaagctcaggtccagcgtagaatttctagagaataagaaaaatgctacaagaatggagataaggagaaattgtaatttttgtttgattttcaaaaaatggaaaactgcagacagacctcaaagtttaatgtagctctctgagaaaatggaccattaaaatgttttcaggtccttataaaataagttgtatgttacatgtatatgtgaatttatacatatattccttatacatgcatttatatacacacattactaggtacccatgtttagtaacgtagtcagcatttattgcatatataccatgtgcaaggcagagggctttgcataaatcacctgatttaatctatataacagcacctcaaggagtaagcagtatttttattctcattttatagatgaagccactgagcacaaagaagttaagtgacttgctcaagttcatgtagctaggaaatggtgaggtaggggttccgagttcaaatccaggcagcccttaattttaggcattgtgctgtgttgctagacaataaacagcctccattagaaatccacgaagagccgggcgcggtggctcactcctgtaatcccggcattttgggaggctgaggcgggcggatcacctgaggtcgggagttcaagaccagcctgaccaaaatggagaaaccccatctctactaaaaatataaaattaaccgggcacggtggtgcattcctgtcatcccagctactcggaaggttgaggcaggagaatcgcttgaacccaggaggcagaggttgccgtgagccgagattacgccattgcactccagcctgggcaacaagagcgaaactctgtctcaaaaaaaaaaaaaaaaaaaaaaatccacaaagaaaaaggcagatgtgctggtagaatagacacaagttcatgaaattcacaaaataactaatatggccaataaatataagaataggataaaattcatcaattctcaaagaatgtaatttaaaataccattagggtatcattttattaaaaccctctggattgacagatactgtaaagcttgataatacctgctttttggcaaaggtacagagaaaaaaactattccgtcatctttctaggagtgtaaattggcccatctatacacatacgtgtgtgtgcgtgtgtgtgtatgcacacatttatatgtatagaatttacttagaaattttgtgtctaagaatttgtcttaaggaaagttttacagaagtaagtaaagaattatgtacagtgatgtttattgaaacattttttaatatatgtagaatctgaaaaactaaatgcccatcagtagtgaattggttagataatttgttatatatctaaacaaatattatactttctttataatggatgagatggatagatggataagtaaatgcatacctatatgtgggggactgtacatatattggtagaaaatgttgattaaggagacatgcattcattctttcctcatttttattgaaaaagacaatgtatctatttcatatgtacaatttgacatgtatacacatatcttgaaaggggataagaaggagcatgctagaaaactttaattttctactttaaaattttgtttttaaaaatattggggcagaatagatgtatttttattttaaaaaaagaaatttctatattttaaagaaatgaaaaacttcatggagacagcatacccacaaagaacaggcacatgcagtactaacttgttttcttcttggacacacacttgatttgatagagaaatggcatacatggtgaatttaggtttctgcaagtcatttgacagtttttcctgatattttcaggagtcctagttgctgacttattgccatcatgtcttcatgtcagtctagaggaaagcctctagtcattgcaagaacactcattgaacaatgttcaacattttattagacatttgaaaatggaataaattccactttgggtaaatttgtgaagaaaaacctagtaaagttagcttagtagtagcactatcttacacttagaaagtttttacaatgcctttatgtaagcctgtgatggaactatcctaaaattaatgataaaatgtagcatgctttcttaattagaactaccacagaataaaaagtgcaagcttcagaggaattttggtttcagtaatagaggaagaacttatcagactaaccgttccacagttaaaaattgaactctgcacagaatatagaaacccagctgtgagaagcactggagagccgtcaaaagcagacagactggagggggcgcttgaacccttgcaggaggggagcttgcaccagccagatctgagggccatccacgactgcagcaggtgcccagcactcctgcagaaggcacagagggatgcagccaaagaaacactcgatggaaacttgaatctaaaggaaggaataaaaagaatcagaaatggttgatatgtgggaaaatagaaaagacaaactttttgggttttgacttttgattttttaaaagatgattaaatatagaaaaatttctatatttattaagttgaattcacaatcaaagacctttctttgtggaaaattccaagtccaaatggttttactgataagttctatgtaacatttaaggaataaataataccaattttatacaaactttatcagaaaatataataggaagcatattcaatcttattttatgaaacctgcataaccccaaatcaaaaatgtgacaagaacattacaaggagagaaaattacagactagcgtccctcatgaacgttggaacaaaaaattgtaacaattatttttagcagatcaaagcactattgtccatgcagtggaacactaattcattatgactaagtagggcttcttttttttaatgtttgaaatttttgttttatttatttttattttatttcattttcctttaagttctgggacacatgtgcagagcgtgcaggtttcttacatagatacagatgtgccgtggtgtttggtagtcatgggacgaccagaggcaggagccatgctgacctcttcacaagatgacacctctacgtaattacagtcattgccgagtctggtggttcttccccatacgtaaatgtcctaatgaatgaccgaataaggattataagacatttttctttccactcagcatatattgctcttacttttctatcaataaaaaaataaatccataagcagagctaccccctctgtttaacataatcaaacttcaagttctcctccctttgcggctttttcagttttggtggaagcatctagatatattgtaatgtcttagttcagctctgcaccccacccacaccttcatactaccccaaacatcaccttcaaataataacattgtattcacgttatcaattcagcggaaaatagaggtagttttccattccccattgtacatttttaagaggaatttagaaagctgcattttaatcatatgagttagtgatatcaccaataaggtcatttgaggccagggcttcagggttatagtgagctatgattgcaccactgcactccagcctgggcaacagggagagaccctgtctcaaaaaacaaacaatttttttaaaagaactgattatactttggcacctgccaaaataaaccatacattcattgccctgtttaaacttagtctaacttgaattcatagatatgaaaatatacatgtttgaaacagcaagagtagaataaagtgaaattaatctcttaatctgtatactcaatgtctacaaaatacttcatgtacagatagaaagtacatttttcattcataaagtcaacaaatattaccaagtctatactatacaaagcactgtccaagttttccaagttgttcaaatagcagtttctgatttccaggtttaaagcataaatagagaagccgacagttctgtgcgtaggaggtggacgcactgcgttctcacttaaccaaggtggtaagcacgagtgtgctccctcagcatctggggagccagggtactgatctcaagagtgtgccctgaatgttctccatttgaaggacaccaaactggtagcacttggacacacccccttggccagcagaggctctaaatgtccctttctgcatagcgccatcccatctctggtttctttatcttacctatcagatttagattttcagatgttacctgtcagaacagatttttttttccctatctgatctcttcctctccagtctcactccctcaaatcctgctgaaatattctttcgaagttcatttttgttcaggtttcttctttcctcacagccatttcatggcgcctggcctttggaggaaaacagctttagtactggtcatgtgctgacctgcttagctctgaagcctcatctcttcataccagccgttcctggtcatctgtactcagtccacactgggccattgctagtcctcaaagacccagcattccctttcccagatgccctcaagcacactgctgccttcacttgaccttcctttcatcccctcagacctggctgaggcctggagacaccttgctgcaccatcatttcacctgagcccagcccagctcaatgctcccccacacgctgtcctgcagtccgcatggacctgcctgagacctggagacaccttgctgcaccatcatttcacctgagcccagcccagttcaatgcttcccacacactgtcatgtcgtccacgtgggcctggctgaggcctggagacactttgctgtccccatcagttcacttgagcccagcccagttcagcgctccccacacgctgtcctgcagtccgcatggacctgcctgagacctagagacaccttgctgtccccatcatttcacctgagcccagcccagctcacagtgctccccacacgctgtcctgcagtccgcatgggcctggctgaggcctggagacaccttgctgtaccatcatttcacctgtgcccagcccagctcaatgctcccccacacgctgtcctgcagtccgcgtggacctgcctgaggcctggagacaccttgctgtaccatcatttcacctaagaccagcccagctcacagtgctcaccacacactgtcctgctggtccacctgtctggatgtgaaccctcctgcttgtgtctcctctctgtatccatgattagccaggcacctggcttggagtaagcatccagtaatagatttattcagttattagttgattagctaatgccttggtaagggttactcaagccatagatgataggtgaaaatgaacatcaataaaatacgaaatttacccttgggttttttatattaatagttattttcaacagaaagtcaaattgagtcaactattttttattcaataaatgtcaaaaagagaactttggtttattaattaggataaataaccaaaaataacatggacaccccatttacaaagaattcgagaccaggcatggtggttcacacctgtaatcccagcactttgggaggctgaggtaggtgaatcgcttgagcccaggagttagagaccaacctgggcaacatagtgagaccccatccctacaaaaaaacacaaaaattagctgggcatggtggcacatacctgtggtcccagctactcaggaggctgaggtgggaggatcacgtgagcctgggaggtcaaggcgtggtgagccaagatcccatcactgcacaccagcctgggtgacagacagaccctgtctcaggaaaaaaaaaaaaaagaattcaaatgctataaaatactgtaacaccaaagatctcctaaatgtagttctacctttcttcattattctaaagacactttgagccccacagaattttaaggctaccatcatgaacatcatattcctagtgctgtttgttgggacacttttcagaatctgtttttgtctccgagtgtggacagtgactgtcggcactcagtgcgtggtggttttcatctccgagtgtggacggtgagtgtcggcgctcggtgggtggtggttttcgtctccgagtgtggacggtgcgtgtcggtgctcagtgggtggtggttttcatctccgagtgtggacggtgagtattggcagtcagtgggtggttgttttcatctccgagtgtggacagtgagtgtaggcactcggtgggtggttgttttcatgtccgagtgtggacggtgagtgtcggcgctcggtgggcggtggttttcctctccgagtgtggacggcgagtgtcggcgctcggtgggcggttgttttcatctccgagtgtggacggtgagtatcggggctcggtgggtggttgttttcatctccgagtgtggacggtgagtgttggcgctcggtgggtggtgattttcatgtccgagtgtggacggtgagtgttggcgctcggtgggtggtggttttcatctacgagtgtggacggtgattgttggcactcaataggtggtggttttcatctccgagtgtggacggtgagtgttggtgctcggtgggtggtggttttcatgtccgagtgtggacggtgagtgtcggcgctccgtgcgtggttgttttcgtctccgagtgtggacggcgagtgtcggcgctcggtgggtggttgttttcgtctccgagtgtggacggcgagtgtcggcgctcggtgggtggtggttctcgtctccgagtgtggacggcgagtgtcggcgctcggtgggtggtggttctcgtctccgagtgtggacggtgagtgtcggcgctcggtgggtggtggttctcgtctccgagtgtggacggtgagtgtcggcgctcggtgggtggtggttctcgtctccgagtgtggacggtgagtgtcggcgctcggtgggtggtggttctcgtctccgagtgtggacggtgagtgtcggcgctcggtgggtggtggttctcgtctccgagtgtggacggtgagtgtcggcgctcggtgggtggtggttctcgtctccgagtgtggacggtgagtgtcggcgctcggtgggtggtggttctcgtctccgagtgtggacggtgagtgtcggcgctcggtgggtgatggtttccctgtcacccacccatccctcacggggttctgtgtccttgtcattgagtacttggcactttacgacttctgcttttgatcaaaacggataccagttgagtggacttcatctctgaagagggaagcctaagtcaataatctttttttctttactgaactctgatggaaaactatcaatccctaggactattctgaattacatttacgaagtttggaggtagatattaatagtcttgtacttaatctctttaaagcaaaaaggaattttacattttctaaaggagtataattttcattggtcatctttttttaagaaaacaacagtttcattaatcttgcttgttttcagatattttcttcttctttataagctgtttgatatattagagtcagtgctgtaaaaccatttgtccaatgctttaggcatttggttatagtttctttgtctgccaagcatttttcaataaagctagttgttggctcaaatggtcttaaatgtgaaatttattaacttcaagatgacccgtggcctacatattttcttcattgcatgtcttatctgctaaagtatttattttattatgttttaaattgatagctataaactatgctgtttggcatcagggtaaactaacatactattgtacaaataaacagtccaagtcatttaaaaacttttggttatggaaattttgagacatatctccaaaccgaacagtctgacaaatccagttgacctgttggccgacttaagcagcgatcatctcacagccagtcttgtctgatctgtgcccctgggctccccactgcctctgagatctgttattttgaagtaaatcccagatattcgatcatttcatccatacacagataagataaggactgattttttttaaagaaacgtaatcataataccattatgagatctggagaaagttaacagtaattccttaattttatcagctatttagtcaatgttcaaattctcgtagaagctttttagacagtttgttcgtatcaggattcagtcaaggtccacacattacttttggttgatatgtctcttaattaagaaaaataaacctctcttgagtcacttttggtgctcagtgaagtggttgtttgcctgttacccacccatctttaaatgaataaatcgggttttttgttctgtagattttctcatattctatatttttcagatagcttcctcatggtgtcatttaacctgttcctttgtcccttatgtttcctataaatttgtggttaataatgaagctatcagtttgaggtttgattttatattgtttacttccatcaggagataccttatgtttggttgtctctgcttttgatgataagattgaaaattgaattcaagtgttatcagcttggtataccctttaaaagttcaccataaacttttcatctaatggttttagcaccattggtaattgttttcataatctatttcttattagaaattgaaaataataattgttagctggaacactaagtttttttcattaagctctgaagtacagttcatacaggaggggcaggatagatgcctgattagttagcagttttcagaatgagttggtttgctagtatttctcaaaggtcattactaaggtatttttttattttttgattacctttatgaagtcatgatgtaaacataatttgatgagcttcaattcattgtagttgatttttttttaatttagttgtgccctctttgtgggagtctcttcaggtgggccctgggtcctgacagtacagcctcgccatagggtgccatgttccacactcatgctggtttccttgcttcgtagaatcagccgttgggaggaattgatggaatatgaaatatgaacatcttccttcttctcttttatttctttccacactgtgtctctgtccaccctgtctacccccaactggctttttctaaccccatagctctcgttcagtctcaccccaaagtcagttctacagctgggcgggctgtggcagcatcagtcatggtcccttctcatattccagcagcaccaccacttccattcaggtcattgccagctggacctgctcccaccaggcaggtgagaaaggctgcctgcgttccctctaccgtggtctctccgtcagtgaggcnnnnnnnnnnnnnnnnnnnnnnnnnnnnnnnnnnnnnnnnnnnnnnnnnnnnnnnnnnnnnnnnnnnnnnnnnnnnnnnnnnnnnnnnnnnnnnnnnnnnnnnnnnnnnnnnnnnnnnnnnnnnnnnnnnnnnnnnnnnnnnnnnnnnnnnnnnnnnnnnnnnnnnnnnnnnnnnnnnnnnnnnnnnnnnnnnnnnnnnnnnnnnnnnnnnnnnnnnnnnnnnnnnnnnnnnnnnnnnnnnnnnnnnnnnnnnnnnnnnnnnnnnnnnnnnnnnnnnnnnnnnnnnnnnnnnnnnnnnnnnnnnnnnnnnnnnnnnnnnnnnnnnnnnnnnnnnnnnnnnnnnnnnnnnnnnnnnnnnnnnnnnnnnnnnnnnnnnnnnnnnnnnnnnnnnnnnnnnnnnnnnnnnnnnnnnnnnnnnnnnnnnnnnnnnnnnnnnnnnnnnnnnnnnnnnnnnnnnnnnnnnnnnnnnnnnnnnnnnnnnnnnnnnnnnnnnnnnnnnnnnnnnnnnnnnnnnnnnnnnnnnnnnnnnnnnnnnnnnnnnnnnnnnnnnnnnnnnnnnnnnnnnnnnnnnnnnnnnnnnnnnnnnnnnnnnnnnnnnnnnnnnnnnnnnnnnnnnnnnnnnnnnnnnnnnnnnnnnnnnnnnnnnnnnnnnnnnnnnnnnnnnnnnnnnnnnnnnnnnnnnnnnnnnnnnnnnnnnnnnnnnnnnnnnnnnnnnnnnnnnnnnnnnnnnnnnnnnnnnnnnnnnnnnnnnnnnnnnnnnnnnnnnnnnnnnnnnnnnnnnnnnnnnnnnnnnnnnnnnnnnnnnnnnnnnnnnnnnnnnnnnnnnnnnnnnnnnnnnnnnnnnnnnnnnnnnnnnnnnnnnnnnnnnnnnnnnnnnnnnnnnnnnnnnnnnnnnnnnnnnnnnnnnnnnnnnnnnnnnnnnnnnnnnnnnnnnnnnnnnnnnnnnnnnnnnnnnnnnnnnnnnnnnnnnnnnnnnnnnnnnnnnnnnnnnnnnnnnnnnnnnnnnnnnnnnnnnnnnnnnnnnnnnnnnnnnnnnnnnnnnnnnnnnnnnnnnnnnnnnnnnnnnnnnnnnnnnnnnnnnnnnnnnnnnnnnnnnnnatttttttattttttgattacctttatgaagtcatgatgtaaacataatttgatgagcttcaattcattgtagttgatttttttttaatttagttgtgccctctttgtgggagtctcttcaggtgggccctgggtcctgacagtacagcctcgccatagggtgccatgttccacactcatgctggtttccttgcttcgtagaatcagccgttgggaggaattgatggaatatgaaatatgaacatcttccttcttctcttttatttctttccacactgtgtctctgtccaccctgtctacccccaactggctttttctaaccccatagctctcattcagtctcaccccaaagtcagttctacagctgggcgggctgtggcagcatcagtcatggtcccttctcatattccagcagcaccaccacttccattcaggtcattgccagctggacctgctcccaccaggcaggtgagaaaggctgcctgcgttccctctaccgtggtctctccgtcagtgaggcgctggggaaggtgtgtgtgtttcttctgtcatattctatatctgtactaggaactctgagaatttaggcttctgaggtgctatggaaagcattagggattttttgtcacttgacctggttttgtttatctaattatggagggactctctccaaaactcatttacatgcttcacagctgtgtgccctgtggtacacagatagtgacagatacttgcgtagatgctaccgtcttggcatcctcttcccccagcccagctattatttcctcctggtcttggctacatttggtgtgaatgttagccctgaatttgttgctgttcttaaacagtttagtcagaagacttcgtggggcattggaaaacctgcctttcttttgatcccttggcttcaggcctgccctgcagagccagggaagcctctggtgtctgcacatatgatgacagctcagccagctgtgccacacagctctgttgggccggggctaggggtgcagtgatggagctagacgagctagctctgtgcgtgggaacattgaaagctgacaacgagcgctgcagtttggatcatcttcatgtacgcgtggcctagcagctgtcttccctctcctccagtgccgccccagaaccagagccttaggtcacagttagaaatgcgtattctcccagcgtcaggagcaaagatggcctgctagaacaaaaccacttgattagtatctttgccctctgcggtaaggtgagatttaatgaaacgctttcaggactgtctcagtatttggatgggtggagtgcactggagtagcgtagggttatagacagttccagattattcctttgaactggaaaactgaaaaacgttctgctttcccagttatttataacatgcctcacagtagacagctgaggctccaatgatttccaaatgttatggttggacttcctaacaaaccaagtcaccatacgccttggtagtttagtcgctggtgaacagaatctaagggattaaatcacaacagtgaacctaaggacgggcaagttttctaaaagaaacccccggaagccacttggtgctcactgcagatacccaccagctgtgtgcgtctctcctttgttgttggaaatcgttgtatgattacagtcactctggcttctcgctccctcctaggaccgccccagctgtgtgcgtctctcctttgttgttggaaatcgttgtatgattacggtcactctggcttctcgctccctcctaggaccgccccagctgtgtgcgtctctcctttgttgttggaaatcgttgtatgattacggtcactctggcttctcgctccctcctaggaccgccccagctgtgtgcgtctctcctttgttgttggaaatcgttgtatgattacggtcactctggcttctcgctccctcctaggactgccgtgtgccctgtcaccctagcaccctggagccacactggctgcattcagccctgaacctgctgtctgtgctcagggcgtcagggtatcagtccctgggtaagcctgcctcctgctgtggtgccgacattctaaggattgtagagagcaacagccatgacaggaaagcaggggacagacggggaggacagaagactgtgtggacaggacggacagatgttaagacatgaactttttttcatgtattttcatttaccttcaatgcccacatttcctaacctaccttcctggttttgtttgcgtgtttgtttttctttgtttctggggtagggtgaggtggagtggggtggaagtaagttatagttcttaattgccaacctggggcaagggaaaagtaattcttagagctcagctgaaaaatgtgtattccaagtattcctgctgttataccataacaatgttataaatttgtttctggcatgatactgtataaaagccaatatctttatagtttcatcaaaagcaacataattcaaatgcctttattatggctagaactgaaagcagttttaagaactgttcgtttagagcgaagccaccagtgcctaatgttttcttttaagctgtttgcatgcgccgatctggtcattggcttctggaacttcatggagaactccctgccctcagagggccctgcctccctggctccctcgctcccttccgactccgccctcctcccctcctcctgggacatcacggggcttgacccagggcctgcctgctggttctctgtcctttgggctcctcccccacacatctgcctgtggtgtgtgctcctcccctggcctctgcgtcccttgggcttctcccatagacatctgccccaggggcgacccctttggcctccctggagcccctggagcagctgtgtcttcacagccctcgccctgcagctcctaagaaagcctcacatgcacaccaggggctccaaaccacgcgctcagagcatgggaaagtgggagcagcgcatggatttactcattttagtagaaaatgagcatctgatagaatttgttaagaaagttaaaccacagagcaactctctctatgtttcctgttttctactcttgaggtcataaatgccatctctgtgactttctcccaaaaccaggatagaaccttcaagataaaaggtacttggtaaatattgggtaatcatctccaattttcttaaccaccttctcttagtaagcagcaaaaactaaccccagaatacttacagggcagcttagtagttagtaataaatagttactatttgttctaaaccttcaaggtggaaaaattttgagtgttcattgaaaacaacttgaacatttcctaagagaccacagtaaaagggttacttgtcggcctggaagaggcagagaagacctatcacacccctttcttttacagccaaggaaactgaagtccagacgaaacactgtctacagccgtcaaggagcatttggttgacaaactgggacttctgcctctgcctcctaacacttttcaaaagtatatcatttttcagcaagctaatcaatgtgcttaaactctacattgtatcaagagtctaaaaatagtacaattagcataaaaagctcagtttgtggctagatttttaagtgtgtggagcaagagacatcaacaaagcagtttgtgtctatgggagcaaattaaaggcaatgttattaaaatccttatattgcagaggatatttacttgagacttagattctttttgtatcaatttacttcagttttctcataatatcacatactaataatcaaaatgtttgagtgacaaccagagtaaattcataaatgtaatatatctgaaaacccatttttcttttttgaaattgctgtcatttctggttgcaaatggtgtgacagcctatgattacagtaatagggactttaaggattatacatagaatgcatgtgacttttagcaagtttgtgtattgaaggaatttaataagaggttttatggaatcacaaaagctaccttcatggactttaaatatgatggatatgaaagaaactaatattcttgtactctacggtcgggttgtattaatgaaaagaaaaattggtgtgtgtgcttggactttcgtttcttctcattttcctccttggtttgtgctggggcttcctttttcatattctgctaaggaaaacaggttcggcagatcatttagcctcactggggctgtgctgctcgtggacacgtgggccgtgtgcagccgcactgcacgtaaaccgtgggtgaccacgccgtgctcttggtacggcacgtggtctggctcttccccacggggactggagcacactgaagataacacacatgcagtgacccagttccattccagcctgtgacccaagagaatgagtgtttatgcccgccaaaagacaccaccagctgcattcataacggctctgctggaaatacctgaaaatgggagctgggaaacatagagtcgcagagtcggcctattttgtggggtttaagcatccattgttgaaaataaaatgccagacgacattttgctttggttcatattgaaaacctcatggatttattcaggtatttcatttggtccattttcaaatgaaaatattttacagtttacttactgctttcacatacattcttgtatgttatcttcacaccaaccgtgttggggttagatactgttttccccatgtggcaaatttttaaaatttggagaatcaagaaaggctgtgtaacttgctcaaataagggaactaggcccaacttttcatctccaattctaactttatcactcttaccaagaaacatgtacagggcatgggtcagaccacggggctaacaatacggtgtcgttttgtatatcttcatgtttgtaaatacagcagacccctgtacgacagatagttggggtgccaacctgctgtacagtctgaaatctttgtttacccccagaatttaactaggaatagcctgctgttgcccagatgacttattaataacataaacagtctgttacatattttacgtatatactatattctgtattcttaaagtaagctagagaaaagaaaatgctattaagaaaatcataagaaaggaaaatacatttactactcatgaagtggaagtggatcatcataaaggtcttcatcctcatcttcacattgagtaggctgaggaggaagaggaggatcggagctggtttagctgtgtcaggggcagcagaggcatgagaaaacccacctatgggtggacccacgcggttcaaacctgtattgttcgtggaccaactggaattgagtttgcaaagtactgtgggccttcctcagtcccaggtgctgttaacagagctgagaaggggctcaaggaccatggcctggtggccctcccctgctgacaaaagggcagtggcttaaccccaaggaagaagactgtgtgtgtatatgcaccttgcccttctgacaaacaccaacccatgagggagagtttccaagtatggcaaagctgtgaatgaacgataaagataccaggaagagtaaaggggttgcacttatttttggataaagcatctgcacaacagtgtaccaggcacgaagcaacagatgtggcggagtgatgcgagtgatcattgatactgaagacgggagaacagatgagtcattgctaatagaatctcaagagaaataacaagcaacatggaattcagtatttgaatgagattttcttagaaaaagaaacaagtctatgaaacgaggcactgttcctgcccttgctgccctgagcctgtgggcctcattggtgacatccttggagtgcactctaagctggccttgcagctttagaaacgcaggcccctgcaggtgagcggcttgtcccgctcgggctgggttcaatccagatgcccccgtgcagccctctcttggcctcacacttcaatgtcgtcagtcccaacagggtgcaaggccagtgctttgtggttttagccatctaaacagatgtgtggcatattcaaaaattagtctccttaaatgtatgcatttctacctagatttcttactctgtaaatgggactttaaaatcccagttagcaattgggttttcatattttttttttgccttccattttattatgactcaaaattgtttttaatttcaaggtgttttctttttggaaggttttacggctatttcttcaattgcatatggacccccgctatattgagaataggagctataccctattacttctttcccgtgctccacggtaatgactgcagtcaaaggggtgcgggacccgctcagcagcaggcacggcactgcctggcattttgcaccatcttgcgtgccaggccatggcaggaacccttcccagcattcactcgtgtagccacagggaccacgcaggaaaataggggtcaggaccccagctgcttccagacctgcttctctcatagcagtcattggttttgatctcagctcattaaaatctttaaaaacaaaaacaaaacaccttcttgaaattgtgaaaatcaacagttaacccaggcctgtttatgaagtagtatgtccagaagtaacacctcacagtgcaaaacaaacgcattcatctgcatgtatagaatgaatcctgttttcttgtcactttcacttttctaactgaagtttccttgtaatgaaaaaaaaatttctgacaaaaaactaaattcaaacaaatggtttgtctgtttatattaagttaattaactttctacctttatgtctaaaattcagtgtatcaagtttgtgaaacgtattctatgctaagtgtgtaatgagttctgtgacatcttatgttaggataattcatggtctgttctacacatcagactttacattttgaaatgagaggggagagttttttccacttgcgtatatttgagtcttgaaagctgtttgtctatgaagtttatgaatctaaactcttatgaatataaagtctttcttacagatgggaaaaaataaaccatgtaaccatttcactgttattttcactgttggcaatgttttctcttttctcgaggaaagagttttcctattgagattgatcacgctgatcaataagagatcctactgatgaaagcaatgaaaaaaaaaatcctgggatggaaaacagaaagcaggagagggtgaaggtacccattcatgtgctacataggaagggtgtcctttcctcaaatagtcattgaaaaaatccactttagggcaaaagacatttatcaatttgggaatgagggcactaaaacctgacgaaggggaacttaaaactctttagttagtccaacaagagctgattttgctgcagaatggttaggactttctctctgttctactaatagtgatacagtttctggttatctttttcttttttttaattaggcagtaatttcgataatgtgtgttcagagtgtaattgaatagataattcacttgaaaaaaatacaccaaagttttttcagtagtgtttcagtttgacaataaaaaaaagtacattgtgggatatttatagtatttttgaatctatttttaccagtagactgggagtgataactgatttggggcataggggttaaaaacaggaaatgtggtttatacagtaggtagtatctccagagtttccagggttgatttcttatagtattgtctgaagagtgttatgcgtcaaaacaacattaggccgagtaccttgaaatccgcctgtgtttaaaggagccgtctttccaattacaacaggaaatgcttcatggaaaagtttgcattcttggtataggttaagatggcatagcagttgtttattgtaattacaacacgttcttcctctccagcacttttcagacactttttatacagtcagagtaaatcttgtgtcacttctagtaaatttccttcaattttcgtattaaaattttattttattttcatgaaaagttttgtcaaatagctgttaagaatgttttaaaatagactatcatagctgaggaggagcatatattagggatactgttaattacagtaatcagagaatccaagttaagaggataaaaaggcatgaagaaataggagtataattctgtgtggccttttgcatgataggttggcagaatccatgaaaactgaatagcttgattacctttgcactcagcaattccacttctgggaagatatcttacataaactgttgtattagaatccaagaatctatgtttattgcagcattatttatggtagtaaattgaaaggcaacataagttccccatagtaggagaatggtcaaatagattatgatacatccatgctagaatactaagcagccatcaaaaattataaggtagatacgtatgcactgaagagcaaacaggttgtttgcttaagtcaaagaccttcacagacaacttaccaaagtaaatatgcagatggagaataagcatatgaaaagatgttccacattgtgtgtcattagggaattgcaaattaaaacaacagtaagataccattgcacacctattagaatggccaaaatccagaacactgaaaacaccaactgctggtgagcatgtggagcaccaggatctctccttcattgctagtgggactacagaattacccagccactttggaagacagtttggcagcctcttacgaaactagacatcctcttaccatataatccatgattggcaccacttggcatttagccaagggagtggaaaagttacatccacacaaaaacctgcacaccaatgcttgtagcaatcttattcataattgccaaaacttggaagcaaccaagtaatccttcagtaggtgaataaatgtgttacggtccatctggaaaatgaatattactcggcactaagatgaaatgagcaaggcatggaaggaaccttaaatgcatgttactaagtgaaataagataaactgaaaaggctgcatattgtgtgattccaactatacgacactctgtaacaggagaaactatggagagattaaaaagatcagtggttgtcgggggttactggggaaggagggagcacagaggagttttagggcagtgaagctactgtgtgtgttaccgtaacggttggtacctgtcgttatatatttgtccaaacctgtaacatgtacaccaccaaaattgaccctaatgtaaactgtggaatttgggtaataatgacacatgtcagtgtaggtctttcgactgtaacaaatgcacccctctggtggggatgctgacagttggggaggccgtgtgtatgtggtggcgggcgggacggcatatgtgaaatctctgcaccttctgctcagttttgctgtgaaactcaaactgctctaaaaagtatagtcaattaaaaaattgttatagattacagaatgaaatttagcaagtttcaagaagagaatgtgtaacatctcattttttaggaaaaaaatatattcataggaaaagatctggaagaacatacactaacctgtcaatagtggttattcctaagaaggatgaaagaggagtttattgggcaactgtgttctttacaatgagcatttaattactcagttttctgaataaaaaattaaggacgaagacttggtgaatccaaagtgttcaatattttattctttaatgtcgaccttctctaatgaggtttctccaaattattaagaagaagaagaatcctgtctcctcatctgatgacaggcagagccattccgtcctccctgtgctggagcgagaactagcgatggtaatggaattgttgccttaagagcttgaaggcgttctctagccccgagcgcagcactcagctacgtaagttannnnnnnnnnnnnnnnnnnnttttcatgaatgattctcatcaagcaaaagccctctctttctcatgtaagctttgctgtttgcctgaacaattgtatttcatgcatttgctttcttgcactgtttaaagacagtgtaagattcttctctcccatgtgcaagatggtcatttgtcatattaaacctgggtgtgtccctactagagtgcaatccctgggagtgcaggagcactctgtgtgtgtgtgtgtgtgtgtgtggggtcactgctgtgtgtgtgtggggggggtcacttctttgtgtgtgtgtgtgtgtgtagtcactgctgtgtgtgtgtgtgtagtcactgctgtgtgtgtgtgggggggtcactgctgtgtgtgtgtgtgtggtcactgctgtgtgtgtgtgtgggggggtcactgctgtgtgtgtgggtgggggggtcacttcttgtgtgtgtgtgtgtatgtgtgtgtgtatgtgtgtagtcactgctgtgtgtgtgtgtgtatgtagtcactgctgtgtgtgtgtgggatcactgctgtgtgtgtgtgtgtgtgtggtcactgctgtgtgtgtgtgtgtagtccctgctatatccccagcccctggaaaagtgtcctgcatgtaataataatggcacactcaggaagtatttttaatagtgtgccagtttgcctgttccaaaatcaagtgaccttcctatatgattaaaagaggaaactgacaaatataccaagaaagaaggctgctctactattttgatgcatgaaaacaagatcttcgttgctggagaatatgctgggttacaccggctggcttacaggaaacagcctacaagttcttgctcagtagagatgagccttgttttctccatggggaatttccacacggggctactagattaattgctaagtggtagtagtctaggttgatactgtgtgggtggggacactttttgtcaaatatcatgacacattctaatttcatattcagacagtggaggagatacatgttgtaaatgcttagaaactgtttctcattccctcgcttgaacaacatggaaagttgtgggggtttattgaaggggaacctttttaaaaacagtacttattactgcagcataataatgtagcctttaactccaaggagcaaatccgtttgccttgtatttttcttggcacactgtccacactgatgatccctccctaatactgtgtgcaccatacatttggcattgtatggcccactgttgttggagcacaaactgaaacttaggtttccctgcacacttacgtgttcactccatcctgatatacctggacatcttcctaatatccagcacgtgcggagcattcagcaaatacctaatgacattatttcagtatattgctggaaaaataaagcatattttggaaagcaaatagattaagcctcagcaatattctatactactgtacttactttattcaaactatatttttcaaatggatcctgatgctcaaaaggactgtctttgtgagaagcgagagattgtatgctttcccaaggaataccttctttccatgtatgccgaggcacttacttttagtagatgacgcagatatattctgacttgagcattatagaattctacatatatttaggtttttctctgatgtgtttattccctcattcattcacttatcaactgcataagtcttcagaacttagtagtgagcaagacagacatggtctttgccttcctttgtttgtcattcacggatatttttgaacatcttgtgccatctgtgtgccaacctctgtgatgggagctgaggctatgatgagaaggagaatggcagatgatccctgtgctgtggagtgtacggtccaataggagagacagttgttcactgagtgatcacacaaaggactgcagagctgccccagtgggaccggggacacagtgcccaggaggacaacggtggatccaggcagcacctgggaatgcagagtggggtggggcggggccgtcctaacacctcccgcttgttggctgcctgctgtctggcggatgcctccctagcctcttaaaaacgttattccacttaaatgttgtctctgttttacaaaggagaaagctacaagtcagagcagtccagaaacttgcccccaggtgactactcagtaatgagtgtctgaggcccagtctaattctgtctgtgtcccccgatcctcttcgctcaggccacggctcagatgtcgccacagaagcaaagtcttccccagccatcaccggcatttgacattgagccattctcaacaccagtgcaaagtatggtgagagttgaacggaaattctaacttccaaggactatgtatgaaaccagcaaaatgaggagtactgtcaaggacaaacgtttccagttctagcacatcacagccatatttcatgttgtattcgtgttttttttttctgccgttgttgtgttcctatatgcaaactcaactgttagccattccttgtaccactcaaaagaattaatgtacagccaggatctgcagcagctagacagtcatggcaggaccattgtccaaacttaataccttgcatttcagaaagagaaatcagtgtgctgtttctagtcattatgctttttagtcaactgttatgtctttaattttaaattaacacctgaaatatgtgtactactttagaattggcaagatgctcctccccactgacctgtaagctctcttagggtggggggtcctgtctgttttgcccactttcttatatcaccacctgttgatgcccagcacatgatagatacacagcacgtgttggaagaatgggggaattgcacacacgtggcattttcataacagcttcgttagcaaaatgggtctcgtgatctgtctgtttcgcagagtaggcagttgtctgaaagataagctgagttgtggaaggtcatacgattggtgtagggttagccaggaaattccatctcaagtgttctttctgtcacctcaataaacttaaaaggaattatcaagcactaacgttactgatagtgacattggaatgaaattcaatgggaggaggacatatgccaccaaaaataattgcagcatggcccctctgtcaccgtcactggccctttgaaaaaggttctgtcaccaaaaatcagattctggtcctgccgccaggagccacaactgaggtcctttgaaactcatcccacacatcgttctgccatcaccgcgaggcctcagccgcttccataacggatgcacacggagcccctctctgacggcctctgcctcaccttctccgtctgacctcccatttaaggaagagactgcgaggccgcaggcgagccctgcatcaccgtacgtcaccgtcccagcccctgcctggtctgggcctcctctcagtgttcgcatgtgcatgcctttaccctggctgccagcaccttcctctgcccagtcgggaaagcacgtggctactgcttttgccaacggtgttggccgtcagagctgcatggagccagcgagccgggccaccccagcacctgtcccagcacgggcttctttggacacaggtgtttgaaagagctgacatcctcccacagacagattttggataacattttgaaacagaaaacaagcaattggaagtgagtgctttatgggagtaaaagtcttacttggacccaagagcccacgggacaggctgaggaggaaggcgagggtgcgggcgtgctactcggctggtctctccctaggccagtacccagctgtggccggagtgaagagagaaaggaagcgaaattctgaacgaggaagaccacagagatcttaccggtttcccagacacggacactatctggtctctaggccctttgcccttcctctgttcctatccagtactattctttaaccgtttaaggacttcacaaaataaatatagcaaccaaacatataacaaattattttaaattgaagtataaatttttttatgtttagtttttgtgggttcatagtaggtgtatacacttagcagttacaagagagattttgatacaggcttgcaaatgcgtaataaataaataccacatcatcagggcaaatgcgtaataaataccacatcagggtaaatggggcaaagatgttttttacaacatgaaattctttcatatggccatcctgcatatattggcaggtcaaacttgtaataactaagcactttggggtcttacatatactggagatgtatacgtgttctacttggagcaccatatgccttgagcacctctgccatgtgcctagtggcatcctccatgtagtaggatctcaatgaatttatgttagttgaatgaatgagaacttttagccattcccttagaatgaacaatttcagcccaatcggtaataaaaaaaaaaaaaagtacttgctcctgtatttaattcagcgattagctttttggagagagaccatcaatgatttatttttatattaaagtttttgttaccaaaaattataataccagcacaggcactgcactgggaggttatgatggcagctcgcagagctccgcctcactccggccctttccgatgcatccagttgaatgctgcctctttgaacctcactggcctgatgtgtggtttgactagcggtaccacttcctgtccacacaggaccacacatttttcccttctctttttccaacattaccagttatttgtatgaagcagttatttcgtttttttgtgtgaggggaaagaaggcaattatttcctttttttcattcaaaaagataaaatctagaaatacaaaagttctttcttgtccaaggttacgtctttgagctccttatattatccatgtgaaacctgtgctcgacccaaaataggaagcttgattttttttttccaaattttctgcccacaaaaatatggttcttttggttcaaagggtcctgtgcctttattcttcccattcatagctttgtcttcagaattgcattgagcagtttacacttcacctcttttacggggtgtcttattagtaatgcttaggcgggtgggttcttgccaggaagtgtttatgatgtcggggtccgagtgggagttgagttcacagcaggctgtcactgagcatgtgacaccgcctggcttcactctaagtataattttctgctttttagtcagcactctgcccccactcttttcttttacattgaggaatttcaaaagttaaaaactgccttcgcatttccagtcatccttgcaccgtagcacatcgttagagccccaaatcctgacacttgttcttgcaggagtgttgacaggaccccggttctcactgagggcagaggctgtgaattttttattctgttccttagagcatcgaaaatagcagcttactattgtgcttcgattttcagtaagtatgtatgttacctgtgcgtctacatgagctggtcctccatggcgtgcggcttagagaccagacctgagcatgtggatctccgcccctgggtggggctgcccagagggtatgagcggcgaggccaggccccagtgcccccacagcagcgggagcagtctggggacaccggggggtgtggctttcctcctgcgggaagaaagcctctctggtctccagacaagttcgtttatttcactttcacttacaacaggctctttctgttcttctctcctgcctcctagataagacttcttaccttgcaattatcctttttctcaggaagaatccattaatttctggattatattgaattactcttcactcagccatctcagcaaaatagacttaataagcacactgtttttgttttgaggagccaatatatatacatagatagatatatcttttatatagagatatatatatcttttatagatatatatatcttttatagatagatatatctatctatatatatcgatatatatagatatataatatatataatatagatattatatatagatatataatatatatctatatattatatataatatatatagatatatataatatatataatatatatagatatatataatatatataatatatatagatatatataatatatatataatatatataatatatatataatatatagatatatataatatatatagatatatataatatatatagatatatataatatatatagatatatataatatatatagatatatataatatatagatatatataatatatatagatatatataatatatagatatatataatatatatagatatatataatatatagatatatataatatatatagatatatataatatatagatatatataatatatatagatatatataatatatagatatatataatatatatagatatatataatatatagatatatataatatatatagatatatataatatatagatatatataatatatatagatatatataatatatatatcttttgaggagccaatagatatatagatatatagatatatatagatatgtatatctatatgtctctatatatatctcgatatatacctatgcccttgatattgatctgtatatgaaattggctcctcaaaagaaaaaccgtgtgcttatttgtataccgtagtgtgtgacacaatcaaaacctagttctatatttggaatatgcaaatgcccgttcaaaaggttgattatagttcttgatctctatctcaactttcccaactaaccagtagcgtggatgagactctgggagaatattttccttaatgttgttactgggaacatccatgcttttacagtgcagcattttccctgttctatagaggagatgttctcagtgtgtgcagctctagaaggcatctggaatctcccacttcaagggaaaggaattgttttggaaacacaataaaacagtattttgtttttatggggtttttttcctgcaaaatgatgataatgaaagctcttagtgaacgctgtgaatgccaggacctatggcatgcatcccctttcatcctcactgcagccccccaagggtgggacaattattattctcctgtgacagatgagaaaactgaggctcacagccttcttgccaaaagtcacaactagcagctgtcgaaactggggtttggtccccaatagtcagacctcagaccccacattcttaaatcctgtgtgtttctgcttttgagcaaagtgaggctcattgaacttgtacctaaaatctgatgttttattttgtccaggctttaacttgcttacagaatcaaattcagttttataaggagtttctcctaaaagtgattccttaagacaaaaatggtccttctgctcaataacttgactttcacctttggtagtaagatgctataattgatatttaatgtgcattttataagcattgttaaacaccctctgtattttgtgttactgcttatactgagtgtgtgtgtgtgttttacagtatatatgttttaccgtatatgttttacagtgtgtatatgttttacagtatatatagatacttatctatatatattctctgtgtgtgtgtgcgtgaagaaactgaagaacattcttaaattttcattttgaggccgactgagagccagttatagagaacataaacagtgacagaaatgaaaaacaataaaagaaaacttctcatttctttttttttctttttgacctgtatggaaatactcctttcaccatttgattctcaaaaggaaatagtggtggtgttactttctgtttctcctcagaaaactctaaagcatggggtacagcctgccagcaggggaggggagcttgtgttattattaatgccttctttctctcctttatttcaatttcaggtgtcagaaactatttaaaagaagcactggtgaatataattgccgtgcatgcagaggtaaagtatcattagatgttcctaagagatatggataaccaaaaaaaagaaaaaagaaagatgtaaatttgattatttctatggtggtcttttttttccctcagaatgtgtcttgggtataaataagatacagttcagctcttgctcgcactgtctgtctctctctgtctctgtgtgtgtgtgtgtgtgtgtgtgtgtgtgtgtgtgtgtttaactgtgagtctttctctgaaattgtatgttttctttgataattccagctaaattcataaatatttgaaaggtgaagatagattgcaaggatgtttatccttcaaagaatagtaaatcccttatcttggaaaatgaattaacctctttttagcctgtgtacaaataagcactggtatctgattcctgtagcagtggctgggattccagaaaggcagacactgcttagaaagagactcggggcaggccgacactggaacagatgcgtggtttcctgtccgtggttgacttagggtcatgcagacagtattggtgcttctgggccatgcgaaaacttgctctcacttgacacgctttcatcttaagctttgtgttaacatcctcagtgaacatcctggttaggaggactcttctgaggaacattgaaagaagagaccagagctaccaccatgatctatggctgcctgttttcattcagtcatttcaggatttgttactcactgctttgccaacactttgagagtggctgtggctcacagactaatgggggaccagataaagtggggcagatcaaagaggctaccattcagtcgtttccaccgttgcccaggtgcctcttgggcgacaagcatccaagaagggtgtttttaggtttatgccgcctgctgcatccaaaagtatctgaggccatcaaggtaaactgaaaaaacatggttaattaagagtgaaacccgaatatgaccagggaagacaaagataacactacctggttcctaaatttggctagaagtttgaagcgccaagagcagaaagaaaactatagaacgttacagtttccagttcttatgaaagggaaacatacaaattcatctctaacaatagagtttttatatgatttaactcaggcaggaagtcaccacatagatctttttataaggagcaatatttttaattgtgatcttataaaaaatataaaaattctgtttttgttatggtagcatcctatagaatttgagcccaaagtgcaaatttaggtgcagttgttgcaagcatttcttcggtaggtgggcagaactgtgagatctgtggaaattgtagtgatggtgctgattcctagtgaggcagcttttattaatgtctattatcaattgccatgggcttataatgactgaaaggagaatttcattcatagtatttactatttgctacataatcttaaattgccaaaaatttccttggacactcaagttatgtttgggttaattcaaatatttaatgctagtggctcaatctgaaaaaaggaaaagcttaaaaagaaaatatgatttactgtcatttatgagtcagcagagtcagatgtttcagtaaatctccaaagacagtaactctcagtttgaaagtctcaaactttaaggtttgaaaataatgtaagtcaaataaaatgaaatacatattgagtacagtatgtgtaaaattgtggagggggggcttgttctccaatacagaatggggtaccccatatgaaatggtgtttgtcagagtttaaggagagtctgacacaatatttttttaaattgtggtaaaatattgacccagtatgttcttatttctctaatttcttctttagagatgtttctttccagtgaaaggggcaagaggcaaaagaaatgttcaaaacagtttttattttgtcaacatcagtaatgcctttcaaaattatatttgccaatattgtatttttaagagaatttttgttgttaatcagtcaatagaatttaaatataagtctgtatcttcctttcatttataattttggccttttaaaaatgacttagaagtcctgttgattttcttttgttttgttttgaatgttaactttgtctttaacaaattcaagtcaaaaagccccacaaagcaccatgtcttcctatttcaaaccaggtgttcaccatttccaaagaactggtccctcgggtactatccaaggtgatagaagcagtttctgaagagctcagtcgactgatgcagtgtgtttcatccttcagcaaaaatggagctttacaggtaacaaaatcattcaatttcatattgaacttctgttgttatttaaagcatataaaatgtttttagtcatcaatcttatgatatgacaggcttcttttaatggatctactgattgaagaagttcatattctttcttgcataagccatacccatgaagcattgtctacaagtttcagagtttctgtttctttacagtagagcaagatcttaaagacttctgccaaattatctgaatgcagaatccttcaaaagttttgtgatttttatttttattttccaactatcttcatgacattccattccgcaggaaatttttaacaacttgcttttaataagtcttttgaaagcattcagtgcagtttgcatagaaacaacaaataactgtctcttttgtttaaattacataattataactgccgtaaacaccagttgactttggcatgcacataaccagctggtagttgctaggcatgcctgcagatggaagcgtgcacttctgcctgggagctcctcatgtgatggctggcagcgtggcagtgagtttcaaaaagcagtgcccttcgtccagccatggctgaggaagctcctatcaggccagcccaccacaaataacaactgtaaacttaaatatcaaaaaataaaattttttttttaattttgaaaaaatccctgaagacaccagagaacgaccattggtgggcagattctagaggaaatggcacccgcatgaatttcttatttcttatggattttaacctaaagccaggtccaggagtgcctaaaactccaagacaaaacgtgctttctggcttgaaaaacaggctttggagcagccacaactacggctaggtgagagaggtatcccatagaggagtctctccatatgcatggtccgactccactccagccagcccagcgaaggctagaagaactgaagtaagaattggatgctgcccaagagccaagagttagagtccaaataagttaactgcttgctaaaacaaacaaataaaaaatcaacagtccttagagatatattacagaatccagagtctccacagcataacattcacaatgtccgggatgcaaatttaattgaattcaaatttaattgaaatgcacaaataactgggaaaacacgacttattcctaatacaaaacatgatcacctgaagccacccttaagatgacccaggtattggaattagcagacaaggattttaacacagcggcatcagatgatgtaaaggaaactgcgctcctcataaatcagtaggtgggaaatctcggcggagaaatagaaaccctaaaacaggaactaaatggaatttctggaatggaaaaacacagtagatgaatttttaaaaatctactagatgataataatagattttttaaaaagtcagttaacttgtaaaccaatagaaattatccagtatgaacaacagaaataaggataattgggggaaaaaagcaagcggagctctcgacccgtgggacaatgtctcaatatccagcatgcatgtaattagattttcaaaagtgtaagaatgacccatcagccacatgaaaggatgaacaacatcgttagttagcagggaaatgaaaattaacactacaatgcgatgccatcacacatccatcaggataaaaattaaagactgactctagtagacgtcggcaagaatgtgatggaactagagctctcacacgtcatcgaggacgcgatgtagcaactgcttagggaagagctcctgcactttcttctcaagctaaacatacacatacgtaccctatgacccagctattccgatcctagttatttaagcaagagaactgaaaacgtattttcagtttcgtatatgttgtataaatgttacaaaacatttgtaagaatgttcaccatgggttcgagacacaaaacatatttataagaatgttcaggccgggcgcggtggctcacacctgtaatcccagcactttgggaggccgaggcgggcggatcacgaggtcaggagatcgagaccatcctggctaacacggtgaaacccgtctctactaaaaatacaaaaaattagccgggcgcggtggcgggcgcctgtagtcccagctactcgggaggctgaggcaggagaatggcatgaaccctggaggtggagctcgcagtgagccgagatcgcaccactgcagtctggcctggacgaaagagcgagactccgtctcaaaaaaaaaaaaaaagaatgttcaccatgggttcgagaggagcctgggcaacatagtaacaccttgtctctacaaaaaaaaaaaaaattgttttaattatccaagtgtggtgctgtgtgcctgtggtcccagctgtttgggaggctaaggtgggaggcttgcttgagcccaggaagtcaaggctgcagtgaactgtgatcgtgctactgcatccagactgggcgacagagtgacaccctttctcaaaaaaataagaatgttcgtagtcaattttattcataatcaaaaactgaaaacccaggtgtccatcaatacagtaaataaactaatatattcatacagtcaaatactattccacattaaagagaataaattactgatacagcacagtgaatcccaggagcattatgcgaaatgaaggaatccttacacagacatatacgtatactgtatagttttcatttacatgaagttctagaacaaataaaactaactgtgatgagaaactcagaacagtggcttcctgtgggtggtgggggttcctagggtggggccttagggatcgtcacagggtgctggttctgtattgtgatctgggtttccatcacaggtgtatacatcagtcaaaactcatcaaatgccacacttcgagatttgtctgttgtgtagtatgtacattctaactataaaaaaaaaaaaacgggtgcaaatagtccactgtagttaatgatatgcacactgaagtggatcagaactacaggactgagtgacggatggaagccatgtggtcatgtgaggctgtgttactgggagagcctgtgagtaaacaggcattcactgtaaagttctttcagagcctccatacatttgaaattttttcaaaatacatatttgggaaagaaaaagagcagagagcacttgttaatttggttaggggagaatctgttgcaaaagcttctgctgtgtttccatttgccaccagttttctctgaaaattgatgtatcagatctttgatattatcgtttaagttgaaaggtcatggttattataatagttccatcacaggagatgagtagtataaactgtgtaatactacagatgaattaacaggcagtcgcagtcgctactgtgggccttagcagtcttagaattttaacaggcatctgccctctctacacattacctccgtaatccatttatctgatggctaaaccactctcaaaaccagcagggagaggttggaaagtgatctcagaattagctggaaaattttttcacgtacacatgtccagaaactactggccatcaaactgttccagcctccagtttttgagacctcctcgggcctggacagacatgtgtattttgaaaaaggtcgtgagtctaaactcccgcttcactctcccactgagaatgactttgagagcttccttccttgaggccatagctctaagagggatagcaggttaacctttgataggcaattaggtgccaaactccagaactgtcctgagagcttggtgaaaaggggagtgacagtttggtgattttggcagatcttttagcatgatgttttctggattacagttttgtaggtattatatagctaaccacagtttttataattggcataacttacaggttaattaaaacactctatcaccttgattgaataaaatttctaccagaagattggttttgtagtaatttaatctttctcctaaaatggtcagctgaaagttctaccttttttcctggtaggtctgtttttacctatactagaatataaacaaaatagagacagaaattgtcatactttctagcatttgtaactttctagttatatactgtttttcaggcttctaagggactgaaaaaatgaaaccaaacaattgccttccaaacagaaaaaggtcactgaatatcctgtgtcatatatatctgctttgatctagatggcttacagaatttctaataaactgtgaagagctggctgtgtcttttgtcattgttttatgttttgtccactccttgagaataagggatatttcttttaaatgttctcctgtgtgtcccactcactgtgggcacctacttcagaacatcaagttatcattgtcagtgggtctgctggagctcccaggaaactgacttgtatgtcagatcacacttattcatgcttgcgtagaagtgaaagcttaacttttttcttaaaacttttatgaaatatttcacatagcatacgatctgtctacaatagaaaaagaatatgcaattcaatgatttttggtatattcaaagagctgtccagtcatcaccatcatcaattttagaacatttcatcccaaaagaaacccctgacccattaagtctaatcatttgcctcccaaaccaccctttccccctacagacaactaccaattggctttctatctctatgatttgtctactctgaaaatttcgtataaatggaaacatgaaaatatgaccctttgtgactggcttctttcatgtagcgtaatgtttcagggttcatccatgttgtgacatatgccagtgcctcgcttctttttacatataatattccactttaaatatgccacattttatttatccattcatcagctgatgggcatttgtggttttcccacctttgattaatatgcagaatgcttctgtgaacactcctatacaagttcttgtgtggacatgtgttttcatgtctcgtgcgtgcataccaaggagcggaattgctaggtcatgtggttactctatacttaatcttctgaggaactgccagacggttctccaaagtggcagacattcctaccagcaatttttgagggttccaatgtctctacatcctcaccattatttgttattgtctcttattgattatagccatcctagtgggtgtgaagtgatacctcattctgtgggtcgtcctttcacattctggatggtgtctttgtagcactggatttttaattttggtgaagtccactttatctgttttgttgtttatactttcggcatgatttctaagaagggtttcctagcctaaggtcacaaagatttacactgggtttcttctgatagtttcataagtttcttacatttagatctgtgatccgtgttaatttttgtgttaaggaaaggattcaacttcattcttctgcatgtggatatccagttgccctagcaccatttgttgaacagactgttcttcccccactgagtggtcttggcacccttgttgaatagcagttgatcataaatatgagggtatacaatatttaaatatattttagctttggagtatggctgaagtcagaaagtctgaggcctctaaatgtgttactctaagattgttttggctgttctgagtgccttgcatttccttatgaattttacaatcagcttgccagtttccattaaggaaaaaaaaagcagctgtgattttaatagagattgcattgaatccatagagcagagtttaggttttgagattaaggcagtgtgcctgcaagggcataggtgtcaggaagcatgccaagccacatccttacctctgtgggacacgggccctttcagggcagtgtttcaaagtgtctttcctcttgcaagactaaaagaaaaattagtggttagagagtaaatacagatggctggaaaatcatgacacagtttgtacttttcatagtgagatatctagttccctgccctcacacagtcatccttgactacaagttaattttcagtcaacgaacattttgtggtagcaaatttcttcggactgttttagaaactctactcatgactggcggtcaccatggtggtattacgccaaccccatcctacgatgagcaggctggagacccttaaccttagtacttgtttatatttgataatataaattttcctgttgtcactttgtctttttctcattttcaggcgagacttgaaatctgtgctttgagggacactgtggctgtttacctgacacccgaaagcaagtaagtggcagtgttctttagttgagtgctctattaaaaataaaggttgtcttactagtcaattctgtcctctgtaaagatgactgatcagagcacatgctcatgaatttgtgatgtgataaagtttatgtcaaggccactttgtaacacaatgtaaatgaaaggggtttaatataattttttcatttactactgacaaatcttagtcttataatacagcagagtatgacatacttcttaaagcaaaagaggataagaactgagtcttagtctgttcatagcagactctgaaggacagctcaagtgctgtaaatatcagtataagaggaagccttgtggtttctctgcaaaattttgtagtggaaatttgataatttttagctgttttgaatgaaagtcaggatttcctaccattgaaatatcagtaggtgaagtgaagcagaactactgtttgtctgtgcaaaattgtttactacgtgggcaacattacctaggaaatactgggttatagtgttgatgtgcctgagaagccaagtcgtatgcaaatgaaatgtttgaggacactgtaatatgcttactcactcatttccagcatctgataacatggcttgctgtcattctgtcagctttgcaactgaaaatacgttttccattttttcctaaccaatgaagttagcctttcattcccgtcggtcacagctcaccagcagccatttttagtgggccatgttcactgttgagccacaccttttcccagccatcgtttgtctgtacaacatactaacaggatggaaagcacccagcccatgttggatgtgtgcacacttcatgcaaatgcctaccctcttcctgctgacttagttttagagtataaggtactcatctatagaggaagtttaaaatattctaggcaagcttttgagggtgttaaatgagaaaatgtgccaaatcactttttaattttcagtaccctgccaataatatgtagtatgtttatcattattgtcatactgtcaaaacaattacatcacatttctttcaattaatcaaaaagaggttcataagaaacaagctgatggtggaggtagcggcagtggcttccacaccaggaaagaggccgctgaatgtgggaagggacccgagtgcgccaagccacccgtcccacaccccaccgcgccctcccgggagcagctggagatgcccagcaccgggttttatgactctgttggaacttttcagtctttctctctgttgctgtgacacttgcccctgatttgaggaatattgctcaaaaacgtatttcctggtagattgaggatgtttttacaatataaaagcaacgaccccctaaagtcaagaattgcagtatttcttcaccttaacccatccttagagagataaaagaactgtttcctttgtgaatgggccaagttaattaccacagtctccccttatgtgcttttcatttggggttgggaattttttcttaatactttctcccttgcgcaaagctaaacactccgaccgcctgttctttttttagaaatccttgtccttttcaccctttctggaagagaaactttacccttgggaatttttttaagggcttttatataaagacgctccaatttaaataaannnnnnnnnnnnnnnnnnnnccgctgaatgtgggaagggacccgagtgcgccaagccacccgtcccacaccccaccgcgccctcccgggagcagctggagatgcccagcaccgggttttatgactctgttggaacttttcagtctttctctctgttgctgtgacacttgcccctgatttgaggaatattgctcaaaaacgtatttcctggtagattgaggatgtttttacaatataaaagcaacgaccccctaaagtcaagaattgcagtatttcttcaccttaaccaatcataagagagataaaagaactgttcctttgtgaatggtacaagttaattaccacagtctcccctatgatgcttttcatttggtttggtaatttttctaatactttctccttgtaaaagctaaacatcccacagttttctttttaaaattctttccttttaccttcatgtaaagaacttacattgaatttttaaagcatctatatagctctccatttttctacaagttttaagtagactgtaattattacaagacattggctgtagatcaggccctgtgcaggccaaatactgtaaacaccccactgtgtcatctttcagaaggtcatccccatttcttagagtaactggattatccccagctgcttgttttgaaaagactccttttaaattaaacatgttcacattaagctctcctctatcactagcatcctttcgaagatgtttttcctttagcttttcaagtagcgtttcatttcctatttgagtttttctgaccccgttgctacaaagcctccacctggtagctacaccttcgcttttacttttactttttctattgtttttcacttttactttttctcatatttccttgcttcactggcttttattggcttctcaataattaagggatgcttaagaatttgtcagcagttctcctgtgcaaggcttcaacttcagtgtggctgtttgtgtttcaggtcaagttttaagcaggctttggaagccctgccccagctttccagtggagcagataaaaagtaagtcctgtgtgctgttcttaggagccagttgaatgtgctcaacaaggttttgtttcctaaaataccttttaaaaataatgatttggattctaggaagagcagaatccaaataagaatcagaataagcagatatacctacttaatagcgttagtaggtacatctcgtcacctgtaacttgcatgtcttctgagtgacagaataaggtaagacctttcttctgggtttaggagaatttagaagttggctctcgtttcaagtgactggtatagaaaaggtcttaagaaagctatctatgacttattcagtaaactgtattagtagcatacataagaagtaatggaaaaaagaagacagcatagtaaaatgcaggagtcagtgattttttttttaatttttgagtaattcagtagtatttattttgtgttctataaaatacaaaatgttatgaaagtagatgtgcacatatggcataataaagttttatatatacatatatatttcattagaccacactgatgatctcaacctgaatttaaactttactactcatagaacaggaaacggacctaagagaaaatctaggccaggtaaatttcataaatgcccaggctcccccgagctgaggcagtcttcattccttcaccacccgccctgcacgtggctgccgggcccatagacaggcacatgtggtgcactgactgaaatgctggcaccgtgaatgcagtgcagactcagtgcagggcagagagatcacataggctgggccatgggggggagctgtcacatggcatcgacgcacagagcaggcagcagaccagcccttccaccatcagtccccgggggcatcgccgccccgccccgcacgcatcccacgtgggcacatggcagctgtgcagacagtgcctgcacaatcagccctttcttcctttttcttgctgcttctctaacttccatcctctatttgaattggttccaaaccctgttcatttctttaaaataaatatgataaaagattgaaacagtcactgctacgtttcatatgtggaacagggctcaaaaggtagtgtgtcacgaacaatacacaccctgaaatggccccaggtcaggactatattttagatttgctgtggggatagcattctaatattgaacattgttaaaccgtgaaataatctcttgacctcagtactgttaaacccagttcttggttgctgcatccaaaccaggaaaactctaagatccttcctagctttaaaaattagatgacttgggccgggcgcagtggctcatgcctgtaatcccagcactttgggaggctgaggtgggcggatcacgacttcaggaaatcaagaccatcctggccaacatggtaaaaccccgtctctactaaaaatacaaaaattagccaggtgtggtggcgggcacctgtagtttcagctactcaggaggctgaggcaggagaattgcttgaatccgggaggtggaggttgcagtgagccgaaatcgcgccactgcactccagcctgggcgacagagcaaaactccatctgaaaaaaagaaaaaaaattagatgactgtatcacatcagttggggaaacagattgcgatatcaggcagcaaagcgatttgcctagtggaattagccctaaccctgcttgccctggtggttaactcactgctttcgctccccactctctaatacctgttaatacaaaatgagaggaagggaaagtcagcagtggctgctgggagatggggttagggaagaggctgactagaggggcagcaggggaaagggtgcagccatgccacgtgctgtagcctgttacactccggtatggctttgccagcgttcatagaaccatctaacaaaaagtgaatttgaaggtgtgtaaattattttagagttgaatttctaaaaaagaataggcccaaacatcagtctgtattagggaggaatctaatcttgggaggggataggaaggagatgtttctgtacaaacataaatacgttatcagtttatcctatttgatcaacttctttgattgatgtgtttcttttgctgagttaaggatccataggtagaacttttcagctgccttctccacacagcaagcccaggcagagccgggcactggctcccctggtgttttcttgcgttgctaggccgccccatctgtcgggctgtaaaacaagtgtctccgtcctgcaggttactggaagagctcctgaacaagttcaagagtagcatgcacttgcagctcacctgtttccaagcagcttcttcaaccatgatgaaaacataaatatctgccacataaaagaagtccaggaaaataacacgtaataagactgttcactctctaagtaccctaaaggtatttggtgtattaaacattgggtttgccatttttctcttttttcttcctctgacttcgaaaattgttggtatacatttcaaccaaaatgacctcatttgaaatgcccaggaagtatttgttttgccattcttactagatcagatcctgtatgactttaaaatacattttaaaatatattttgcatctcagcagaaggttgagtgctgcaggaagagctgcttctgcagggagttttctggaatggcgtggcacatattgaagcatttctcagtgtcccgttcacggaagcgcaggcagctcccacgacacacggagagactgactgatacgagatttggaaagctatgtagacatctttggagctcttactgtcctaaactgtacagctgtgcttaaaacccttatttcatataaatggccttaagttttctaattcaagcgggtttttggaaaaatttatggtctccattaaaatacatattacaactggggtagattatttgtggtccaggtgtctgtgatttaactttgcgttttgctatctgatttttatttttcacagggctaagcatgagctttcattctcactcactcttaatttgtcgtgcgtcactacacatgcacgtgttgcagtccctgaggccctgtgtgttatctgtgatggagtgtgaatgtgtaacgggcactgtgttacactctcaggtgttggcggggcggtcgcagacttcagggtcccctaacggaaaggccaggctccgcgtggacggccaactccctgcccgctccttcagcaggtgactgtctctgccacttcttacctgctgaaggatcttgctcagtagctggaacaatgctgctgtcacacagtctcttctctgaaacttcaggatgctccttggtcaccaggcaatgggagctgtagaccagccgcatgcacttgccccacattcactgctgactggcttcactggaataggttcaggtcaccgggacttctctcagagtcagcagcccacccaactccctcataccgtcgcatctgaaaattttcagagaggaattctctttgtagtcggcttgtcagggttttcaagtttttctatggttatttttaaatctctttttttaaatgctaaaattaatgtcctcattaatgcaagtaattttagagcacagtgtagccatgtacagtttccattatttaaaataaataaatgtgttggttcatttggtgtatggggggacatcatggtaactggaaatgaaagtttaatctttcacaaatgtgcttgataaagctgttaagaattgtctttcctaagtatgttaactgttgtatctaactcaactgtgagctaagtttaaaaactgcaatcatgaatgtttgtgatattttaaatatctactacagcacattcagccaataaagaatctgcctttaatgtaagttgtaatttacttgacatttttccctaagtgtctttatttcaacattttcatatttctactgttaacactcaaaatacttacattctggttaaccctgtattggtaaacacattgtcagaaaccatctgtcaggtcctgctaattctgtttgctggggacttaccatgtgcgaggcacaccatgaagtgcctcgttgaatcctcacaacagccttatgatacatgtgggctagcttaccgccacgtccatttagcagaggaaggaatcagggcttagagagaggttggtgacttccgtaagactgcaaggcagtaagtagcaggactcatgttcacactctggctctgtatgtccttgacttcactactgctcagctcttccttccagcggaatatgctttctgacatccatccacctgggtcacagctcagagaaagttcatcaattccagaggctaataaacagtagcaacacggaaaccggtagtgcttttatggctcagagtggaaggtaaaggcctaaaaaccccatacccaagtgagggagttcaaggactactattccaacaagtcaggggggacttcttggaagaaagggggatttcaagagctacttgagttacagaaccctggtttagtgggtaagaggagatgaatatgaaataagttagatgaaagccgagagagaaaccaggacctggagcaagttaacgaggcagctgagaaaacaaattagggaggttcaaggtacttcagtgctccagtggcatttcatttccagcacacccatgttctttgtgggtcacagcatggcttcatgtgagttagctgagctggcctcacttgaatgggaaagagctattagaaatcacttggttttttactaagactttctttatcagtgtaccatgaaagagcatattctagaaatgatttgggcattgcaaaacaagcatcattgccttaggctgagcacactgactcattctcctgtctcttgtcatctttgcatgtagatttttttaaagggaagaaatagaagagattatatttttattctggatttggtacaaggtggtggtgtgtatttctgttttgatcacgtgctatgggatattctgttagtttcataagcgtgttgtgtaatgttttcagaaaagttacaaattttaactagtttttaaatcaagattaggtttctaaaagtcaaatatattttatgtaatattcataaaataattatgcatagactaaacttgcatacatttttgtcactgaacatttgttggttctgttgcaaagattttcatatagatctgtgaactgttctgaaagatatatttaatatatcactcctcaattagagcagcagccataattattttagctttgctttaaacacagttgcatattactctatactagggccattatgctttttgtgtgctgatctcatctcatttctgctcccccagaggaggatttattacattgaggtttattacgtgtattactggaaagcctttctgtacctggccaggttagaaatatatagcaataaacatcttacggacaagacctgggtctttgggtaacttgtttgcagtttggctaatgaaaggcagtaggatatcagagtgtctttctcctgtctaggcacagaaaatcctagacaaagtgggcagtgaagcttgtcttgtgccttcaacagtgttttaccatgactggaagccgttggttttcttcttgtggtcactgttgatattttcatggttgttatcattatcatctcgtcacatgttaaaaaaagattctcgtaccaccttcctacaacccctctagccagacacaaatccctgagaaccaagaccactttatccacaatgaagtaaaataaaatacgttagcaacaatttaataggagatatcagcagacatagaaacaatttttaaaatgaaaaatttagaaccaaaaaatataatttctgaaataaagcaaaaatactgactgggcttaaatagcagtgaggataactgaggaaagagtaaaggaacttgaaaatagacagatcaacgagacaaagttaacaaggatacccaggaattgaactcagctctgcaccaagtggacctaatagacatctacagaactctccaccccaaatcaacagaatatacattcttttcagcaccacaccacacctattccaaaactgaccacatacttggaagtaaagctctcctcagcaaatgtaaaagaacagaaattataacaaactatctctcagaccacagtgcaatcaaactacaactcaggattaagaatctcactcaaaaccgctcaactacatggaaactgaacaacctgctcctgaatgactactgggtacataacgaaatgaaggcagaaataaagatgttctttcaaaccaacaagaacaaagacacaacataccagaatctctgggacacattcaaagcagtgtgtagagggaaatttatagcactaaatgcccacaagagaaagcaggaaagatccaaaattggcaccctaacgtcacaattaaaagaacctgagaagcaagagcaaacacattcaaaagctagcagaaggcaagaaataactaaaatcaagagcagaactgaaggaaatagacacaaaaaacccttcaaaaaaatcaatgaatccaggagctggttttttgaaaagatcaacaaaatcgatagaccgctagcaagactagtaagacagaagaatcaaatagacgcaataaaaaatgataaagcggatatcaccacctatcccacagaaatacaaactaccatcagagaacactacaaacacctctacgcaaataaactagaaaatctagaagaaatggataaattcctcgacacatacaccctcccaagactaaaccaggaagaagttgactctctgaatagaccaataacaggctctgaaattgaggcaataattaatagcttaccaaccaaaaaaagtccaggaccagatggattcacagccgaattctaccagaggtacaaggaggagctggtaccatttcttctgaaattattccaatcaatagaaaaagagggaatcctccctaactcattttatgaggccagcatcatcctgataccaaagcctggcagagacaaccaaaaaagagaattttagaccaatatccttgatgaacattgatgcaaaaatcctcaataaaatactggcaaactgaatccagcagcacatcaaaaagcttatccaccatgatcaagtgggcttcatccctgggatgcaaagctggttcaatatacacaaatcaataaatgtaatacagcatataaatagaaccaaagacaaaaaccacatgattatctcaatagatgcagaaaaggcctttgacaaaaattcaacagcccttcatgctaaaaactctcaataaattaggtattgatgggacgtatctcaaaataataagagctatctatcacaaacccacagccaatatcatactgaatgggcaaaaactggaagcattccctttgaaaactggcacaagacagggatggcctctctcaccactcctattcaacatagtgttggaagttctggccagggcaattaggcagcagacaaaggttttaatgcactttatccgcaatgaagtaaaataaaatatgttagcaacaatttaataggagatatcagcagagacatagaaacaatttttaaaatgaaaaatttagaaccgaaaaatacagtttctgaaataaagcaaaaatactgactggacttaaatagcacagtgatgataactgaggaaagaataaaggaacttgaagatagatcagtggatattatccaatatgaagaatagagagggaaatgtttgggcaagttttctagagacctgttcaatataatcaaatggtcttaacacatggataattgtggtcctagaaggcaagcaaagagagaatcaggcaggaaaaaatatttgaagaaataatggctggcaatttcccaaatttatggcagatacaaatttacagattcataatgctcaacaaacagcaaaaaagataaagacaaaaaatgccacactgccataaactgttaaagccaaagctaaaaaacagatctagtcagcagcagttgaacaactacctgctacatacaggagaagaacattggactcaacttctggcttaacatcagaaattatggaggccagagagagtgaaataggcatctttaaagtgatagaagaaaaaagctgtcaatccagagttcttcacttctaagtgaagatactctttcacagctaaagacatttctagataaaagaaaactaagacaatttgttgtcagcagacgtgcactgtaagaaatgttaaacgaagttcttcaaacggaaaggaaatggtatctgatggaagtgcatatcctcacaaagcaatgaagagcattagagatggtaaacagctcggtaaatacagaattctttccttttgctttttcttcttaaaggttttataatatatgactgcgagctccagcggcacaatcagttagcgtgaggtacttatatatgactgtttataaagtagtatagcattgtcctgtgggtttatagcctatatagatgtaaaataaggggggggggggggaatggacctatattggtgcaagatttctacatttcacatgaagtggtaatatattacatgtaaagggactgtgaaaagttaaggatatatgttgtagtccccagaacaatcactgaaacaataatgtagaggcgtatagctaaaaagccagtaagaaaagtataattgcatttttaaaatagtcgtgtaattttaaaaaggcataaaaggaagaacagagaacagatagaaaataacacaatgatatgtccagacacaaccatagcaataatttcattaaacattaatggattcagcatttcaattaaaaggcagaggttgtcagaaggaataaagaagcatggcccaactatatgctgtatacaagagatgaaactttatattttaaaatggcgcagataggttgaaaggaaccggatgggaaaaaaatacactatgcaaatagtaagcataaagaaggctggagttgccatatcaatataaggtaatggagattttaagataaaaacatcataacagaaggacttttcataagtataaaatgatcactcaaagatataacaatcatgtatgtatctagtaacaaagcatgaagatcattaaaatacgtaagacaaaactgacaggattaaaggaaaaatgggcagtatcattctcagattggaagttttaagctcctcttagcagctgatagaactagatgaagaaaatcatcaaagacatagaagatctgaataatgattgatatgctgtgtcatgaaacaaatctcaaagaaaattaaaattttcaaattatgcagttctctgcccacagtggaattaaactgaaaatcaataacaataaaatatcaagaaaagccctaaatatttggaagttaaaaagtgcacttccaaataccccaggaatcaaagaggaaaacaccacagaaattagaaaatatttgaattgaatgaaaagttaaaacatatcaaaatttgagggatacagctatagggtgcttacaggaaaagatttgtaaaacttcatgcttacgttagaaaacagatctacattcagtgatctaaggttccatcttaagatattaacaaataacaaattcaaccccaatcccaagttagtagaatgacagaaatcataaaggaaagggcagaagtcaaggaaatagaaaaatgcataagcaatagagaaaatgagatcaaaagacaatgggctggtttctcctttcagttgtcatcagctctgcgcagtgctggcaaagtcacatggcctttggctgtatctgtttccttgcgtgtaataagggtggctggacttaaatgatacacgaagtgctctaaattggtgcttgtagaagcagaagaggagtaatagtggaattttctaaaataagcctgttctcgccattgcttagtaaatatgctgagcatgagtacatgaacccttaaaggctatgatcacttctccaactatttattttcacaatctgtaacatcaattaattttgcattgttttaatacttgaggaatagataccatgggcgtagacacaactcacagaagcagtgttgttctgcatcaaacaggagtttcagactctgcaaaccacaagttagaggtcccaagcttgttatctgtttgactttctcctgaggtctttggataatcattgtccttgttctgtgggtctatttccccatatgagttgtctgctttttttgcctttttttttttttagacaaagccttgctctgtcactcaggctggagtgcagtggcacaactttggctcactgcaacctctgcttcctgagttcaagcgattctcctgcctcagcctcccaagtagctgggattgcaggcatgtgctaccatgcccggctaatttttctatttttagtagagacggggtttcaccatgttgtccaggctggtctcgaactcctgacctcgtgatccacccgcctcggcctcccaaagtgctgggattacaggcgtgagccaccacgcccggccatctgcattatttttaagacttaatcagacactcagcaagccaaattgtttcctgatgcaaataagttctggtaagactgccatgagggcccatccttgatttaccccttagctgtctttaaatcaggtttctttcttaaagttacttggattcttaaagtgactgttgagaatatgcttttaaggttcaggaggaagcacgacactaaaaccctacacttcaaagggtgtaaagaatccccctgttccttgtaggttgtgctggacataatgttaattagatgctctccagaccagttctggagagtcggcacactctgctgcacccaacagccgtcatggggtctgctgttggcccgtggccatcacggtctaggactacctcttgaagctgtcaggactcctggatctaagtctcctcctgcccacgaattaggaagtttgaataggaggacaggatgtggtgagcgtaatatctggaggaaaaagcagattggaaccgagacatctctggtttgctgatatttcactcttctagaacaagcagtgttaacttacatttttggcaaaaaataccagagaaaagatgctcataacttgaatttaatcccaaaaaacattaaacacaattgaggcacattctacaaaatacccaaccaatactcttcagaattatcaaggtcacagaagacagagacttgaggaactaccccagattgaagacgtgacaattaaatgcaatgtgtggtcctggattggatcttgaaccagaaaaaggacgtcagtgagccaaccggtgaaattttcgtaagatctgtaaattagctcacaatagtatatcaatgttaatttcctgcttttgatcattgtgttgtggctatttgagatattaatacttggagaagctgggagaggacaaggaatatgggaattcttcattctatttttaaaacatttttatgtctgaaattcttttaaaatgaaaaattgtgttttaatttttaaaaaagaatagatgtagaatagaaaactttcatagcagtgtatgttggtgaggaattaaaaaatcagtaggagtaactaacatggaaggggattggtgaagcacacaaaaaggaaagtgaatagaaaatccaaactaaggggtaaaaatattttctaatggattagcacagtaacatcaatgaactaatgttttcagatgaaatagatcctcagattagatcccagccccccccaaaaaaattcatctatgtggtatttctaaatatgtgctatttctgggtcctaaataaaaggactcaaaggttgaaagcaaaagaatgccagccctaccccactcccaccccaaaaaaaatgtttgctagggaaatattcatgaaaagaaagctaatggtgctaagttgatatcacacaaaatatacttgatggcaaaatgttatttaggaatatattaaggctattgtgtaatgatgaaagtaataatttgccaggaagataaaacaatttctaaacttaggtacatttaatattaataacttcaggccgggcaaggtggctcacacccgtaatcccagcactttgggagaccaaggcaggaggatcccctgaggttaggagttcgagaccagcctggccaacatgctgaaaccccatctctattaaaaacagaagaattagccaggcatggtgacaggcgcctgtagtcccagctacttgggagactgaggcaggagaatcacttgaacccaggaggcagaggttgcagtgagccgagatcacgccattgcaccccagcttgggcaaaaagagcaaaactgtctcaaaaaaaaaagtaaataataatatattaataacttcaatagatataattttttagttttacctatacaattttttagttatagggtttgggatttgcaatccataaacatactagtagatttttaacacatttttctcaatattgatggattaagcagtcaaaataattatcaaatgtatagaaaatttgaaaagcaccattagcaagcttaatctggcagaaatttgtataaccttctgactttagttagaagactgaccacattctagccacaaacaagtctgaagaaataaaaaattagtatcaaattatctgaccacagtaaaattatattagacattagtaacaagaagataacttttaaaaccctgcatgtatttggaaatttattttttgtagaaatagagtctcactatgttgcccagactggtcttgaactcttggcttcaagcgatcctcctgcctcagcctcccaaagtggctggattacaggtgtaagccatgcctggctaacatttgga

SEQ ID NO: 375 - DNA, 3200 bp, Homo sapiens
gacctaccgggccctgtctgtgccggccgtgagctgcggcaggacggctggagattacttctctaacaggatcaccagtttgctccacaaagcacaatgtctcgatcacgacaacccccccttgtgaccggcatctctccaaatgaagggataccatggacgaaggtcacaatcaggggagaaaatctggggactggccccaccgacctcataggcttgaccatttgtggacataattgcctcctgacggcagaatggatgtctgcaagtaaaatagtatgtcgagtgggacaagccaaaaatgacaaaggagacattattgtcaccactaagtcaggtggcagaggaacctcaacagtctctttcaagctactcaaacctgagaaaataggcattttggatcagtctgctgtgtgggttgatgaaatgaattattatgatatgcgcactgacaggaacaaaggaattccgcccttgtccttacgtcctgctaacccgcttggcattgagattgaaaaaagtaaattttcgcagaaggacttagaaatgctattccatggaatgagtgctgattttacaagtgagaatttctcagcagcctggtatcttatagagaatcactcaaacaccagttttgagcagctcaaaatggcagtcaccaacctaaagagacaggctaacaagaagagtgagggcagcctggcctatgtgaaaggcggtctcagtacattcttcgaagcacaggatgccctctcagccatccatcaaaaactagaagcagatggaacggaaaaagtagaaggatccatgacgcagaaactggagaatgttctgaacagagcaagtaatactgcagacacattgtttcaagaagtattaggtcggaaagacaaggcagattccactagaaatgcactcaatgtgcttcagcgatttaagtttcttttcaaccttcctctaaatattgaaaggaatattcaaaagggtgattatgatgtggttattaatgattatgaaaaggccaagtcactttttgggaaaacggaggtgcaagttttcaagaaatattatgctgaagtagaaacaaggattgaagctttaagagaattacttctggataaattgcttgagacaccatcaactttacatgaccaaaaacgttacataaggtacctgtctgaccttcatgcgtctggtgaccctgcttggcaatgcattggagcccaacacaagtggatccttcagctcatgcacagttgcaaagagggctacgtgaaagatctgaaaggtaacccaggcctgcacagtcccatgttggatcttgataatgatacacgtccctcagtgttgggccatctcagtcagacagcgtccctgaagaggggcagcagctttcagtctggtcgagacgacacgtggagatacaaaactccccacagggtggcctttgttgaaaaattgacaaaactcgtcttgagccagctgcctaacttctggaaactctggatctcctacgttaatggaagcctcttcagtgagactgctgagaagtcaggccagattgaaagatcaaagaatgtaaggcaaagacaaaatgattttaagaaaatgattcaggaagtaatgcactccctggtgaagcttacccgcggagccctgcttcccctcagcatccgggatggggaagccaagcagtacggaggctgggaggtgaagtgcgagctctccggacagtggctcgctcacgccatccagactgtaagacttactcatgaatcgttgactgcccttgaaattcctaatgacctgttacagactatccaggatctcatcttggatctccgagtacgttgcgtaatggccacgttgcagcacacggcggaagaaataaagagattagctgaaaaagaagactggattgttgacaatgaaggactgacttctctaccatgtcagtttgaacagtgcatcgtgtgttctctgcagtcactgaagggggttctggagtgcaagccgggagaggccagtgtcttccaacaacctaaaacacaggaggaggtttgccagctaagcatcaatataatgcaggtttttatatactgtctggaacagttgagcaccaagcctgatgcagatatagatactacacatctctctgttgatgtttcttcccctgacttgtttggaagtatccatgaagacttcagcttgacctcagaacagcgccttttgatagtcctaagtaattgctgctatctagaacgtcacaccttcctaaatatcgcagaacattttgaaaagcacaacttccagggaatagaaaaaatcacacaggttagcatggcctcattgaaagaactagatcaaagactctttgaaaattacatcgagttgaaagcagatcccatcgttggctccttagaacctggaatttatgcaggatattttgattggaaggactgcctgcctccaacaggtgtcagaaactatttaaaagaagcactggtgaatataattgccgtgcatgcagaggtgttcaccatttccaaagaactggtccctcgggtactatccaaggtgatagaagcagtttctgaagagctcagtcgactgatgcagtgtgtttcatccttcagcaaaaatggagctttacaggcgagacttgaaatctgtgctttgagggacactgtggctgtttacctgacacccgaaagcaagtcaagttttaagcaggctttggaagccctgccccagctttccagtggagcagataaaaagttactggaagagctcctgaacaagttcaagagtagcatgcacttgcagctcacctgtttccaagcagcttcttcaaccatgatgaaaacataaatatctgccacataaaagaagtccaggaaaataacacaaggttgagtgctgcaggaagagctgcttctgcagggagttttctggaatggcgtggcacatattgaagcatttctcagtgtcccgttcacggaagcgcaggcagctcccacgacacacggagagactgactgatacgagatttggaaagctatgtagacatctttggagctcttactgtcctaaactgtacagctgtgcttaaaacccttatttcatataaatggccttaagttttctaattcaagcgggtttttggaaaaatttatggtctccattaaaatacatattac

SEQ ID NO: 376 - protein, 920 aa, Homo sapiens
MSRSRQPPLVTGISPNEGIPWTKVTIRGENLGTGPTDLIGLTICGHNCLLTAEWMSASKIVCRVGQAKNDKGDIIVTTKSGGRGTSTVSFKLLKPEKIGILDQSAVWVDEMNYYDMRTDRNKGIPPLSLRPANPLGIEIEKSKFSQKDLEMLFHGMSADFTSENFSAAWYLIENHSNTSFEQLKMAVTNLKRQANKKSEGSLAYVKGGLSTFFEAQDALSAIHQKLEADGTEKVEGSMTQKLENVLNRNTADTLFQEVLGRKDKADSTRNALNVLQRFKFLFNLPLNIERNIQKGDYDVVINDYEKAKSLFGKTEVQVFKKYYAEVETRIEALRELLLDKLLETPSTLHDQKRYIRYLSDLHASGDPAWQCIGAQHKWILQLMHSCKEGYVKDLKGNPGLHSPMLDLDNDWSVLGHLSQTASLKRGSSFQSGRDDTWRYKTPHRVAFVEKLTKLVLSQLPNFWKLWISYVNGSLFSETAEKSGQIERSKNVRQRQNDFKKMIQEVMHSLVKLTRGALLPLSIRDGEAKQYGGWEVKCELSGQWLAHAIQTVRLTHESLTALEIPNDLLQTIQDLILDLRVRCVMATLQHTAEEIKRLAEKEDWIVDNEGLTSLPCQFEQCIVCSLQSLKGVLECKPGEASVFQQPKTQEEVCQLSINIMQVFIYCLEQLSTKPDADIDTTHLSVDVSSPDLFGSIHEDFSLTSEQRLLIVLSNCCYLERHTFLNIAEHFEKHNFQGIEKITQVSMASLKELDQRLFENYIELKADPIVGSLEPGIYAGYFDWKDCLPPTGVRNYLKEALVNIIAVHAEVFTISKELVPRVLSKVIEAVSEELSRLMQCVSSFSKNGALQARLEICALRDTVAVYLTPESKSSFKQALEALPQLSSGADKKLLEELLNKFKSSMHLQLTCFQAASSTMMKT

SEQ ID NO: 377 - DNA, 68193 bp, Mus musculus
  misc_feature (1)...(68193): n = A,T,C or G
aattgaacacaggacctctggaagagcagacattgctcttaacctttgaaattatccttgaatgtatgattttttgtttaaataatggcattgtttttatgtttaaaacattaattaggctatgaagatgtagctcactggtaagactatttacctctggtattcagtctctaacattgccaataataatgataataacacgttgcaaataaacattaaaacaaaatgtaagtatgagtgtcttaaataggaaagaatctccataagaaatatcatttcattactcccatttaacaatataagaataaatgtaatgttcaagttgagaaaaaaatgaaagattccagaacagtatttgcagtaggttccaaatttgtttgtttgcttaattgtttgtttgagacagctcttattatgtagctctggttgtcctggaactcactatgtagaacaggatggcctcaaacttacagagatccacctgcctctgcttcctaagtgttgaattaaaggtgtgtgccactatgtccagttatgtccccaattttgatggtttaaaaacatatgctgtaaataaatattacatatacgataatatatagagaaaaataatagaaaaatgtcagataagattgttgcaacacatatgatttatgcttttctaaagtcatccactggtctagaagcatttattttctttttaacctgaatgaaacttcgtttaaataaaacaataggtgccacaatatagcagctagcctagtgggaactcgtgggcactacagagagtgatgtgagacttgaagttgagattcccttactgtgtaagagtgactgtgtggtcgtcctaagccttagttcttctcatctgttaaatgacagtaataatatttaccttacaaagatgagggatgggaaatgaggtgaaaatgattgatgtgtaacagagacttgacagatggcaacctttatgttatttttggtactattattgctattaatgttactaaattgcccccccccccccacacacacaccaaaagataacagcttaaaaatttagaaggaaggaaggacatgtctgaggattttaatttaattattccacagtgcacctgtaaaatattttcccctttactgggctgttacatatagaaaattaaaaataactataaatatagcttaagaagaatgatgatattcttgcataaagccaccaccaggctacacactagaatactgatagcgcccctacacctcactcctttaccttctcttcaagttctaatatgaggttttagatgacagttgccttgattttcatcatagttttaccactttcacgtgtactgtaaacatataactttatgccagtctagggcttgtgtgcagatgtatccatactgctttcattcttttgtgtcttttttttttctatcaaatagtccatctctggtagtatatttttgtgtctgctagttctatttatgcaacattgcaatgcataaatacttgtccaatattccataactatttatcttctttattatggtattgattgatgttgtgggtgtctttggcttggggttgttatgaattctacagtgcatataagtagctatcaatatatttccactagagcctcagtggggctcctttgttctgcttttaatgctttttgctaatttagtaaccacataataatacagcatgttaaaaacttaaattgtatgtctctaataactaaatggctgaagttatcatatatatgaaaatatgcaaaccatgaatatatgcatgctttacttccattaaatgcatatgtaaaggttttaatctcatgctttgaaatttttaaaattatttttatcactaggaaggaattttcaaatgtcttaaatattatgttgcatatattagatttcatttaatattatttataaatttatattgtgtttgatattttattttctaaatatgtccttatttgaacttcccatatagaaatttgttataaactaaagtagatcaagtattcccatatgttctctcagcatctcttatagaaaagtctattttttttcacaaatttttaagatagccttcttccttgtatgcttggggagtgtcttttgacaagctccttcacccactgaggagatcttcatattcttagcacatttaaaacatttgtagaatcagattgttagtttatagattcacacctgtagcctctaggctgggatggacctgaatctgtagctgaggctagctggcagtagattgcatcgtacactaacaggtgttgggaactacagacatggaatatcacctttattggtcacattctctctcactttctctcagggaggttatgcaactttccacctctgaaggaagaaaactgtctcttcatattttccatcagatttattcttagataatttagatttgggcttctggttcctgctttgctctctagcttctttccacctgggcctacttttagtgttgactatttaacgcagacaactcattaaactttcatagcactggaagtaatttttctgtccataattctttggtgtatacgacctacagagaaagatgtgtcattcttctgtgcagtctgcagtccccacccttatcccctactcgcttccttacgtcctagggcttctagcgcaacactgagtagaaatggtctgacatttattatggattctcttagctgaaagtcaacattatcattacttttgtttctgtcattctggtaagaatggagtgacatccactgtggttttaatttgcatttaattttatatattctgttctgtaacttttactcatttgtaatggggttactttgttttactattacagtgaggtctctttccacattcataacttcctgtgtagattatagtttcattttcctaaaggtgtctcattgattgattgattgattgatttctgtagtccaggctggccttacatttgtagagattgtttagactctgcccctcaactgttggaatcacaggtgtgagtcaccatgcccaatgtccaaaaaaaatcttttcaacatgtgcatttaaattttgacaaaatcaagtttaaccttttcatgatcaacactacctgtgtcatctccaagaaactatctacccaaagccatgatgcagtgacacattacagaactctccatttcttaagattgatgacctatggtgaattcattgtttttcttgtgggatcaggcttgtcccccgctcctcttctggataactcagtgttgacatcaccgatttctgatctccaaataaattccaagtactttaaaaaaaggaatgtctctttaaatttcccctttccatctccgttcaacccagcaagcccacggcacaaccgagtgtgtcccctacatatttctgaaggtcctcagagactcaactgtgttcacaaccagtccatcagtgaggccactgatgaagacctcacagctgggaatgcccacatgcaccctcagtctgtgtggtaggtgctttgagcaggtgttccctgagctaccatcatctgacgccagagagaaactggggaacatggtgctttgggccttccagatcttggagaaaacatggctccctgaaaattctgctcatgtctctcttccagccttcttgccattgaacttccaacccaatgcagggagaagaaaagaatgtttggtgtgtccattgcatctctttcgtcaatcccattgctttcaaaaaggacctgtgttttctttcttttagctcttcattcttcccagatggttgctgtacttttacctctgaaagtgtttttttttttcttttcttttctttttctttttggaaggcttctctaaatatctaaatcagcagaaatcagcagaaagtcttcatctgacttttactactttaaaagccccagtcaggtgcccccccccagaagaaacagaatgttccaaacactagccttgagcaaaatgagttaagcctacacatcagccctgcccaattgctttcacccactgattctgttccagcacaccccacagcatgtgaggcccagtacttggcactgagctggcaaggggaagaactttaccctctggtggaggttggcaggagtagtggaaacagacatagtaactggcagttgggatactgccaggtaactgctcggagggacagtcagggtcaaataagcatatggcaaagagtagcaaaacggcctggagccagggagaggctaacaatagcacctctatgcagcaaggtaaccagggttccaatcccactggaaggctagaaaggtactctagggtgaggcagcatgatatgcaaaggtggggagctggatgtgaacataaaagccacctcgagtgcttctggtcattaaacatcagaatggctgctggttacaccaagaaagaaatcatgaagttaaggaggtatctttagtaaagcttcactgtttgtaagtcaaggactaatacagattgctgtcaagtgttcctaagacaaagatgcacgctttctccaataatctgacaacatttagtgttagaatggaaaactcaaaaattcttatcctgatatcaactgtgttttctgcagttcagttctgacactgcgctgctcagtcagcgcatcctttactggtcaagagcaaagttcaccacacagtggctcctcccactttacactgaactgatgtcccactttcacttcggataaagtgcaaatgtggtatatagtcaagcagaaaatcttcacagaactggctgagaagaaaaaccatacttaagagattaaagcctcattataaaggagacacaaaggaagagtgtatgcagggagaggggcaggccccgattatgaaatcatgtgtattgttgacaatgggcacaaccctgttaaggacactggcaaaggtggttcccgatgtggtccaggctcaacatgggtggcaaagttctcctcaggagtccaagtttagtgtttaaaaaccattggtcagtgtgtgcaaagactagcaacttcagcttcttcttccaggctaacagactcccccaactccacgccccaagccacacatagctgccacattctggggtgtacccaacaaacgtgctaagagttcaggttgtaggacgtagcgttcaaagaaacctttaccatatcccggcagccaagtatgcgtgtctgtccttttttttttttaattaggaattttcctcgtttacattttcaatgctatcccaaagggcccccatacccacccccccaatcctctacccacccattccccctttttggccctggcattcccctgtactggggcatataaagtttgcaagtccaatgggcctctctttccagtgatggccgactaggccatcttttgatacatatgcagctaaagacaagagctcccgggtactggttagttcatattgttgttccacctatagggttgcagttccctttagctccttgggtaatttctctagctcctccattgggggccgtgtgacccatccaatagctgactgtgatcatccacttctgtgtttgctaggccccggcatagtctcacaagagagagctatatctgggtcctttcagcgaaatcttgctagtgtatgcaatggtgtcagcatttggaagctgattatgggatggatccctgcatatggcaatcactagatggtccatcctttcgtcacagctccaaattttgtctctgtaactccttccatgggtgttttgttcccatttctaagaaagggtaaagtgtcctttcttcattccatccctgcagctactcaggattctggggcccaagccttgcaggccacggtgtgttagtcagctttctgtaactaagtgcttgagacaactttaaagaggcaaaagcttatgtggatcccattgtcttgggcatgaggtgaggcaatcaaatagcagggtaggaaaatgaaggggagaaagcagcctcatagaagccaggaaggaaggaaggaaggcaagaaagaaatgggaagggtttgctaagattctaatatccttttcaaaggcgcctctccaatgacctacttcccactaggattcagctcataaaggttctttcatctcccgacagtgccacaggctggcaaacaaggctttagcagacgagttttgggggaacgctccagagatccctttgctagcagtaaggcccagggccaaggcatagcgctccataccctcctttcctcaaataaaggcatgccaccctctctcgcttctgtgtgttcatcaccaggaagttccactgcgtttttccaagtttcaaccctagggaacactgggcattgcatatttgcataacacagacatcttattactcaggaaaaccccaggtttgtaagatctgtgccagctagaaaaagatcagattttttttttaactgtgctacaaattaaattggctaaagactatgtataaagcaaataagcacaaagctctttgaagatgttttgcggggcctacctacctctagagcctaccagaaccagcaaaaaaaacatgagctatttctaattgaacatgtgtggaagaaacctgctcactcaactgatgccccctgctgttacagactcacataaaaacaagacacttctcactgaaaggagtttgcaaaacatgaaacctgggacaaagcatgactgtctacccctgagcacaagaactctgagtggtcccccttcttaaccatctggttagtaagcagtttttcctctcttcctataaaccgcacctagctcaacaaatggcctgcacacatttgaacaggcttcctgtgtcgatctttaacagaaggcctttgtgttttaccacacaaccaatctggtgccacaacactgacttttatgtgcacgacacagtggactggcattcccagtgtcaacctaaaagtgagagaccaaatcttttaagttcagactccattttagagaacttgaactcaggtgaactaacaggccggtacctaacattagtttccaagttacctcccaacaaaacctgagcctagctccagtttctaggctgacccccaactgacaagcatctccaggttaatctcccccaacaactcagcgtttccaggttaactcccaacaagcccaccccctgccaacgaccaccaatgcagagggaaacaaaagttaagtttatggtttgactcccagcaccagccaattatgttaaagaccatagttgcttcccagttagatgcttctcaggctagaaacactcacctcccacttgttgctttctataaagcctcacccgggtagatattcagggctgctctccaccaaaaccatcctgtgtgtcagcagtgggctgaggggcctgagccagctccattaaaggacctgttgtgatttgcactgaattggctcctgtctgtttatttatttatttatttatttatttttaaagatttatttattattatatgtaagtacactgtagctgtcttcagacacaccagaagagggagtcagatcttgttacggatggttgtgagccaccatgtggttgctgggatttgaactctggaccttcggaagaacagtcgggtgctcttacccactgagccatctcaccagcccatttttttttttaaattttatttatattttttattttttggaggggagggggtgttcactaacacttccctggcagtacaaaagcacttaaaactactaggaagtcacaagtatgaaaaaattaactcttaaaaatccatgcatttttatatcaataaaggtaaggaaaagcgttcgaaagtcctacttgcagtaccaagaaaatatctacaatatgttgggatacacgtaataagcaatgtggcatagactcaagaaaatgcaggaacgagacacttgagctttgggtagggcaggagaatcatggagcagtagcagcagatgaccataggggtagctttgatgaaggtgactgaagatggctgagatgcttgccaggtggaattaactagacttgaaatgagggcgtaagacaatgcccagaggttcagcatccccaggacgctcacagtatccaagaacagcagcatgccactctggttatactcacttctgaatcagacggtctattccagtctttaagggccccacattctccactctgacttctgaggcaggagaagaagagggagaaggaggaggaggaggaggaggaggaggaggaggagaaggaggaggaggaggaggaggaagaggaggaggaggaggaggaggtatacacagctcaaagtaagcactcaaagacagatggaaaccatcagagcctctttaaaggagaaaatcaattctaggcttttggtttgaaaacatttttttttttgtaattttatgagcgagtttacatgtatttgtatttatgctgatttaaaaataaattaagttcggctaggcaatacaaattaaggagtgatttttttttttctttttctttttctttttctttttcttttctttttctttttttttttttttaaagtccttgctggtatggtttaattttttgtaccatcaccacctagtggagaaaaccttgaacttcaaagagctaaggtttgagaagaaatgcagggaggggtattatactagtcttatttcttctgttctcacaatgaactttgaggtcattttcttccttaatatttggaaatggggtcagaagttaagtagctttaccaagggccacagtgtgactcactcagttccagataacttgaaattaaatgtagttcattttcaccatatagccattcaaagggctcaactctattcttgtctttgtgagtaagttatgtatctcaatatggagaattgccttatttatacgtgtgaaatgacatgtgcaaaaggactaagatgaagatagagtagaacacatagtatgtacgagaccctggcttaaatctctatcacaagacaatggaagcaaggagaaaaaggggggcgcccagagactggattcccttcctttatccctgaaaccccacttcttcctctatgagcccacgacttgtttctctttgaatctactattcttgcatcttagtcattgagggttggtcatgtgcactgtatgttcagatctgatttctgtgcccagagatccagtcactgtatggatgctagcactgtcttgattattgaaccatctcctgtatccatgttgtgtaacgaatacttcccagaggctggagaaatggcttagtggttaagagcactgactgctcttccagaggtcctgagttcaattcccagcaaccacatggtggctcccagacatctgtaatgggatctgatgccctcttctggtgtgtctggagagagcaaccgtgtactcacataatatatatatacatatatatacatatatacatatacatatacatatatatatatttacatatatatatatatatatatatttaaaaaaaaacgctccccaatcatctctgattgggtaataacaagctgaccagcctgtggctgagcagaggagataggaaggctggacttctgatctcagccaggtagagagagaaggaagagagggacaagaagaccaatgtttgccatgaggttgatatgaaagagcagtcatgaggacacacatggaccagagtgagccaggggaagaccagattggcatgttaacagggcatttgtctgggtattatcagccttagagggttagaatagcccagaatggtccagcttaggcttgcttcttgttattaaacttaatagttctttgtgtcagctatttgggagccagaacgggaacagatgagttctacacttaggtatgtaacagaatttgtaactcacgtcacattagctattgccagtttacttcatagcataagataactaaaccttcagtgggaaaacagtaaataaaaagtttctactgtaacttgctgtatactgttgggtggtaaagtaaatacacactcaaattttgacaagattcataagtctttgctttcccttaacacatttaatttctgattatcagcaataatcaattataataaaattttgatgtttttggtagcccccaggtacaggttgagaattccagccttagcaacttaacaagtcacactcctctcaatctacctatatgtatttaaatattttaaaagatgtattacatttatatttacatgttttgcctgcatgtatgactgtgcattacctaggtgtagtgcccccagaggccagaataaggagccagatcctctgacctggtgctgcaaactgaaagaggaacctacaatagcagcaagtgctcttaactactgagccacctctccagctccttttgcatctttccaaggagtaacttacagaaaagcataataaaatcataagcagtaatacatggatgtagactaccacactaactttttaaatttgcttttcaaaagtaaaaatacaattttgtattatgtagccctggctgacttggaactcaaaatgtagaccacgctggcctcaaactctgagatccacctgtcagtgcctcctgagtactagtattaaaggtacacagcactacacccagagaatatacatttataaatgcctattgtactcatttcctgctcctgtctgctggaaatacctttaaggactgcctgccatcattttgttattgggatacaacggtgattttcagtttacgactattatatcagctagagataactattaagcaagtactttgggcgacaggtcctaaagtaaaattaaggggcacaggggagggaatcccttttattgcatttccttgagcagccttcggaattgaactttgtctacctgtgtagctcttgtgtgtttatgtcgaagccctttctccagcttcctaggcacttctggggtatttccacttcgttttagttttattacaaatattctccctgatgacagcatttctagttccgcacccagaaggccaaaatcctggaaagccaggttcccaagttccctccgcttgggttttactcgaaggcggttgtttccggtactgagcaggcatgcgcacgcgcaccacgcctatccaagcagcgccacagaaaggctcttcccagggaccgaagaagacgagagggcctgttgtgacggagaactacatttcccaaagttcaatgcgagaaattgccggcggcgattgggggcatcgggttgcggagtcttctgcccgctttggactacacttcccgacacgactcgcgaggcgttgccagctgcgggccgagggcgagttgacgcgggagctcaggacgtgaggcatgagcggcgccctccctcggcccgtgcgtgtcctgctccctacccgcgcgagggtcgcgcggcaccgggcctagcggcgggcatcggcgttctcaggggcaggtgcagccgcacgggcgccagggagggcagctgccaccatggaggtgagcgggccggaagacgaccccttcctgtcgcagttgcaccaggtgcagtgcccagtgtgccagcagatgatgcccgccgcgcacatcaattcgcacctggaccgctgcctgctgctgcaccctgcggggcacgcggagccagcggccggctctcaccgcgctggggagcgggccaaggggccctcgccacccggcgccaagaggcgtcgactgtcggagagctcggcgctgaagcagcccgccaccccgacggcggccgaaagcagcgaaggcgagggcgaggagggcgatgacggcggcgagaccgagagccgtgagagctacgacgcaccgcccacgcccagcggtgcgcgccttatcccggacttcccggtggcccgctccagcagccccgccagaaagggtatggggaagagaccagcggctgcagccgccgcaggcagcgcatccccgcgcagctgggatgaggcggaggcgcaggaggaggaggaggcgggggtggacggcgatggcgacgcggacgtggacggtgaggacgatcccgggcactgggatgcggacgccgccgacgcctcgttcggagtcagcgcgggccgcgcgcatccccgggcgctggcggcggaggagatccgacagatgctggagggcaagccgctggctgacaagatgcgtccagacacgctgcaggactacatcgggcagagtagggccgtagggcaggagactctgctccgctcgctactggaggccaatgagatcccttcgctcatcttgtggggcccgccaggttgcggtaaggtgagtgctgctcttgctgtttttgccaagggccgcggaggtattctgagccgggtgcggtccttagattccggacccctcctctggagagggaggcctgggggcgcggtcctgatgcgtgagcggagtttgtaatacgcaagcaagcatgccatttccccagattccccagaccccttgttgggcgtttttcacaagaaaatgcccaattttcttggtttatgcagagatgtggacagagatttgagctatctttgtggtcatatccatgatttttagtgacccaattccaggcaggggacatgctgcaaacattggggaagaaacattttgtatgctccatttgttgtggaaaactaattaaattttttctattatacttgaccccctctcccactaattggcttattctaactggtttttggaactaatagaagtctctcttctgtgattcgttttcaacaggcatttccataactttcccataccaactgctgcttgagaaaagcatcaatgttctgttttagccacagccagaggagactggttagaataccgtgggtttagagaacaggtcactggaagaatacttgagaaaatgtggtgaagtgacagtcctgctcataggatacccggaccgtcctgtggacagtcaggaaagggcccaggattataaagagctcttctcaatttacggttcagactgcttcattcacaagcacattcctgatgcttatcctgttttcctttgcagctcctctcagccacacctctttatttgctggaatacatcattccttttgtgtctgcttgtactcatgttctctctggccaagcataaatcacatgtacccagataacattttttttttaagcccaggcccttgcactctactccaccattgagctacacttccagctctcaaaataacatgctgattgcttagggtgctgactgttagcatcttgcccactcctccaagatttaatggtagttactccatttaggggttcggtcagtagcattggtagcaattctgacatctgtgttacgacatggaaatagtcagctattgatgcttgtaagctttgaaaaggtctgcagggaaatgactggtgagtcatggagaattgagtacaagagatttactaggccaaggcttctcagtgaggcatgtggtgatagttacaagcctatatgatgggggagcctaattccaaaaggcacaggtaagctgggatttattaccaggccgccagtgtctagtaacactcaactgtacaatttccagaaaataaagtactacctttctattcagggataatttgtcattcggcaagcaaccttctctctctctcttatttttttcttcccattttaaatattgaattgctaacagtagtattagtagtgtcaaatacacatttattgagcggtgccagatattgaattaagagttttcttgagggcctgaaaggtagctcagtagttaagagcacagactactctgccagaggacccaggttcaattcctagcacccacatggtgctaagcacctgtaactgcagttccaggggatccagtgccgccttccaggagagctgacagcctctcttctgaccttccagggcaagagacacacacatagtgtagacattcatgctggcaaaacactcttattgcataaaacaaattattattattttttaaaaaggttttcttgagtctttcctttgttttctaagtactaataagatcaaattgctccttttaatttccttgtagagtggatgtgcacaagtggcatgtagctgtctcatatgctagctgcttatttccctcagaagctgttcattttgcttttctcagctaatctgctggcttcccatttgagcttggttctgggatcagctcttatcctggggcctttagcattatactcttggccaaaggagaaagaattttctctttggtgagaggtcacagctgtcaccctggctttgctaaatcaagacttctattctttattgggattcataagagcttaaagagtccaccaataaagaatcaaaaggagttaaggatggaggatggtcagaattggcctaagatttaactatctcctgattttcattgtaatgcttatgtatcgtccttctatgcttcagcactcttccaggttcagtgtacttggctaagtagatatgatacttatggtacttatactttttggtacctatgcatactgcccagtctgactaggtttttaaactttgcatatctttttctagaccaccttggctcacatcatagccaacaacagcaagaagcacagcataaggtttgtgacattatctgcaacaaatgccaagacaaatgatgtgcgagatgtcataaagcaggctcagaatgagaagagctttttcaaaaggaaaaccatcctttttattgatgagattcatcgcttcaataaatctcagcaggtatattaactttttgctatttttagatattatgtatgtaagataagatacatagaatgtaagatcaggttgtaaagtataaaacaatataaacctgcaacaaatgttaactttcctcaagacacataggcttgccatccatcctcaacccccccttactctctcttctttctttctttaaagtatttttagatgacaagagaatgctttctctctctgataaatgaaataattgccatatctctgagctgtctgtagaagaaaaggttcttttgatccattttccaacttttagagccttttaatctaaaaagacattgtgactagttgaactcaatataaagatcattatttaaggctagggtataaagtacttatctagtttatgaaaaccctggattctagttctgccctgccctccaaagttcatggttttatctttccccactatttttatgttcaaaattattttctgttttctgtgccaaggtaaaaattgtaagataatgctctgtttattttcaaccctttagaaagaaaatgatagtttgtttttatatgtaaaacttcttttttgagttacctaaatagaaaaaatattttcaggcatactcttttctttgatttacattgttacagctttttacgtataggtagaaatatttccccaaactaataaaccgtttttctccagatctgaatctctttgcgtataccaacaccttagcgttctgcctgatttgggcttaaatatgcgaccagtgagttgacatttcccctttagacaatgtctgctggctgcatcttcaccagttccttaagaacagttaggtgatgattgaagtatgtaggagaaaaacattttagaaatactaacaatgatcttctgtagaaagctggtgttgcatatgttcacactgtgtactagctcatcagtgggtagaaggtacttgtctaaccaagaactagtttatgttggagctgttagaattgtacctgagaagtaccgtgttcttccagcaagagaccagagttagacactggcacccagaagttgcactttacatatgctaactaagacagagactcttgaaatggatgtgtctaaactgatgaatatcctgaaaaggtaaaattagacaatgaaggaatagataggcaacttacgtaggatgctgcacgtggctcttgagtggaatcactttcttctcttttcctcccatggttaggacactttccttcctcacgtggagtgcgggacaatcacgctgattggtgcgaccactgagaacccttccttccaagtcaacgccgcccttctgagccgctgtcgggtaattgttcttgagaagcttccagtagaggcaatggtgacgattttaatgagagcaatcaactcactgggaatccatgtcctagactccagccgtcctactgaccctctgagccacagcagcaactgcagctctgagtgagtagattgtgtgcagcccctgggtgcccacacctccctgggaatctcttggcggagggccagagagggctgggccttaggcaggggaagggtgaggccaagtggagccattggtctgcctgtaaggaagctaaaggaggaggagagtgtttgcttctgccttgcaggacctgcctaaggctccctttccttaaggtgcatcttgtgtctactgagaggtgtgtctgcatctctgagcgttagcattgctttgttattattgtggtgaccagggcatttgcttttatgcttcatgctttttcctctctcacttactttaaaggtttagaaagactataggaagccttatttaaaggcttaaagccactcattaaatagaagaaatagatatatactgtagaattaatttacacatgtttgaagatttgtgttagattcagatttctttttgccacacagtgtaattttcaaagtattgaggaaaagctaatgtaattctacccatacaattacttaaaacattttgtatattccaaagctcatttccataaaagtaaagaagtgttactgaaagtgacatggtctgaaagtgacaggctgaagagactgtctcattccttttgttgactaactctgcatcgtgaccacccgtagcctttcttgtggttaatccgtttgatttcatgggtcagaggtttttctttattgttagaaatgttgttcagaagtcatttgttcatgtgctgactgaaataatacagtagaacatcatgtggtctgaggagaaaccattgcccacctccacatgctgtagaccagacagctgcttgtgcttgctccaaggccaagttctggggccacttttcagtgaggattaaagtacaaggcatagttgtaccctcaggttttaggtttcaacagtttctccctgtgtgtctgcattctctcatttgcttctgtcttatatttgggaagaacactaccaccatgcctcattaaaaaaaaaaactttgaagtatttggatctttgggcagaatgaagttgcttcattgtagagtacagttatggaatggccattagaagttggccagaaaaaaagtttgggacctgctgttatctgaccattgttgtcgtatcaggggcccttgtgggctgggtctcaggtcattgtatctactatagtcttttctctgtcttagagggttagttcaaggacccctcacgagtaaatgtgtaggtacttatgtactctctataaaaagatgcagtgcttgcattacatctatacacattctccccgtatacttcaaattctgattagattgttttttagtttttaacttttttttttgctgtcaactcaataccttgttcacgacaaatgttttattactgaactgtgcttccaccctccctaaagtacaatgcctaatatgatacaaatgctatacagataactgttactctctgttgtttagggaataggggcaaggagaaaagatctgcacatgtttagtaaaacacattttaaaaagcttttttttttttttttgtttctgtcaaagactgatagaattttaggctgtagagaatccatgggtcaggtgtagactcatgtcagcatgtggtaaaggcaaattgaaaagagaaaagcaagccaggcagtggtggcgcacgcctttaatcccagcactcgggaggcagaggcaggcggatttctgagttcgaggccagcctggtctacaaagtgagttccaggacagccagggctacacaggtttttggtcttaaaaaaccaaaaaccaataggaaactacttttatcctatatgttagttgtaatgtgtctataagtttatgtcccgcatatttagggtcatttttatttcctgggtctgagttatccatgtgcttccaggcttcttgttcactgctctgtcatgattgaactgaggtcagtagaactgtggggctcatcttcatgcacagggtttccgtgctttaagagatccccagatgatctgcaggcacataaagtctgaggagattcagtagaagaattaagacctcatatagatacagacctgctaaaatggcgttgccgtcagtgcaaacctcccatatccaacatggcttactgttgtcagttgtttagagctgatcctagttatggcttcttttcattcttgcttgcttcttctgtcctcctccttcctgggtatgctaagaaaatgggaagttgtccttgtttatatacccatcacccatcagtcttatcttacctgcttggtgattggttagagcctgaataaatcgtagctttcaatgtgaaaaccatggtttaattcttcaggactatccttcagaggaggtaatcgcccaggtatgagaaccttttttctttggtaaagtatccctttttcacagtaaagtaagtattaaccttagcacaattgatgactgaatggctagcattactgacaagaagttaggagatgttgtagatcacagaaaaacaaacactttctaggtgacttcctgaaagaagtagctgccacctcaattgccaagaataatttttgactttcagtttttgtggataaagtattactttcaagtcactatttactagtgtcaactctatgttcattcttacacacattaatcaggttggttacactgatctaggtagaagaaaagactcagctcccagtcattgactcctctctgggaatactgtgcatccatttgatgtgatatattttgatgctctaggtagaaactagaacatgcacagagaattctagactgttgaaggacgtgtgtgaggtggcaggtgtggcatctaagagtaatccaggtgatgcttacgccactagattgtatttgcaaatccgagttctctctctctctctctctctctctctctctctctcacacacacacacacacacacacacagtgtctccattgcagcagcacagaaatattcagtttcttgcttgttttggtgctggggttcatatccaggtcttttcagttgctcagccactaagctccacctatctccaccccagcctgcgtgcttttaaaaagaaaattccttaggcctttaatctctgcattcctgaggcattaaaagtcctagatgtgctaggtattggctgctgggtattgtgcatgttgaaaagtacatttctgggctggtgagatggctcagtgggttagagcacccgactgctcttccgaaggtccagagttcaaatcccagcaaccacatggtggctcacaaccatccgtaacgagatctgactccctcttctggtgtatctaaagacagctacagtgtacttacatataataaataaataaatctttaaaaaaaaaaaaaaaaaaaaaagagaagatctttgtccaggaaaactacaatggagattttaaaaaaaaaaaaaaaaaaaaaaaaaaaaaaaagaaaagtacatttctgtgcttgtagagaacatgtagtgtgataagagccagacaagcaaagagctcgtagtattccgctctggtcgtctgtacaagagagctccttaaacttggtatactagagagccttttcttcaagaactcgtatgaccccaagtatataagagaggtatagaagtcagactttgatgggtgatgattcataaagtgatgatgatggtgatgcttatgtttgggtttttcaagacaaggtttctctgtgcagctctggctgtcctggaactcactctgtagaccaggctggtcttgaatttcaagatccacctgcccctgcctcccaagtcctgggattnnnnnnnnnnnnnnnnnnnnnnnnnnnnnnnnnnnnnnnnnnnnnnnnnnnnnnnnnnnnnnnnnnnnnnnnnnnnnnnnnnnnnnnnnnnnnnnnnnnnnnnnnnnnnnnnnnnnnnnnnnnnnnnnnnnnnnnnnnnnnnnnnnnnnnnnnnnnnnnnnnnnnnnnnnnnnnnnnnnnnnnnnnnnnnnnnnnnnnnnnnnnnnnnnnnnnnnnnnnnnnnnnnnnnnnnnnnnnnnnnnnnnnnnnnnnnnnnnnnnnnnnnnnnnnnnnnnnnnnnnnnnnnnnnnnnnnnnnnnnnnnnnnnnnnnnnnnnnnnnnnnnnnnnnnnnnnnnnnnnnnnnnnnnnnnnnnnnnnnnnnnnnnnnnnnnnnnnnnnnnnnnnnnnnnnnnnnnnnnnnnnnnnnnnnnactatttactagtgtcaactctatgttcattcttacacacattaatcaggttggttacactgatctaggtagaagaaaagactcagctcccagtcattgactcctctctgggaatactgtgcatccatttgatgtgatatattttgatgctctaggtagaaactagaacatgcacagagaattctagactgttgaaggacgtgtgtgaggtggcaggtgtggcatctaagagtaatccaggtgatgcttacgccactagattgtatttgcaaatccgagttctctctctctctctctctctctctctctctctcacacacacacacacacacacacacacagtgtctccattgcagcagcacagaaatattcagtttcttgcttgttttggtgctggggttcatatccaggtcttttcagttgctcagccactaagctccacctatctccaccccagcctgcgtgcttttaaaaagaaaattccttaggcctttaatctctgcattcctgaggcattaaaagtcctagatgtgctaggtattggctgctgggtattgtgcatgttgaaaagtacatttctgtgcttgtagagaacatgtagtgtgataagagccagacaagcaaagagctcgtagtattccgctctggtcgtctgtacaagagagctccttaaacttggtatactagagagccttttcttcaagaactcgtatgaccccaagtatataagagaggtatagaagtcagactttgatgggtgatgattcataaagtgatgatgatggtgatgcttatgttttggtttttcaagacaaggtttctctgtgcagctctggctgtcctggaactcactctgtagaccaggctggtcttgaatttcaagatccacctgcccctgcctcccaagtcctgggattaaaggtattcactacccctgcctggctaaaattattttaaaatagttatttagtgtacatgtaagttttttcactaaagatgaaacttatttgcttaataatgaggtgaatgtagttgtttgtttaaaacaatacaaaggatacacactgattagaacttatatactgatgaatgacaatagaaaaatattaaaagtctttattgttttgggactggggatgtatctcagttggtagagtgcttttctagcatgcctgaagtcctgggtttgattcccagcactgaaaaaactgggcatggtcatatatgcctatattccagcactcaggagtagaggaaagatgatgtaaagtttaaggtcattctggggtttatagttcaaaccaggtgtcttgagtccaggtagacagcataagtgacatgtgtcacttaagtgcatctttacaaagacttcatctcagctcttgcttctttttattcagtgagccaggctggcttctttggttctcccatgaaattacaaataattttactttccagtatcatgtgctgaataatacccaaaaactaatgtgtgaaagagttcaggcctctagaagagaccatggagtttcctgtgatctgcttaggtcaaagctttttctccagttggagaagctaggtcccaagtcttttacctctgtatcttgttaaccagaaatacattttcacatgcatttgctttggccaatttttccttattacagaagcttttatatctttgttgttgttacttgttgttgctatttttgtttgttttttgtttttttaaagaaagatctcactgtgttaccccgctgtcctggtaacttgctttgtaggccaagctggcctggaactcaggactacttgcctcttcctcctgggtttaaattcatgggctaccacacctggtcatgttacttctttattttgtttttcatttattttgcatgtggattttggtgcatgtatgccatgtaacacatgtggaggtcagagtacagcttacgtattaattggttcactccttttaccacgtgagttctgggaatcgaattcaggcttagcagcaagtgcatttacctactaagtcatcctgccagttcccgtttgtgacctcatcacagtgtagtttgctatttgttattttattgcaggatactatgaaattttggtcagtctagttccaaagtagattttactctcaattaattttctttaacttttgaagtttctttctaaattggagcactcccccctctgtgcatgtgcatatacgtgcatatacgtgcatgtgcatatatgtgcatgtgcatatacgtatgcatgtgggtaggaatgacaggcttctgagagtcagttctctccttctctacgggttctaaggattgaactcagattggtttagcagcaagcacatgtgctcactgagccatctcactggctcctattttatcatagtatgaattatttcctcccctcattcaattataagacattttagttttaaattttagtatttttaaagttttattattattattaataataataataatagtatcagtgtgtcactttgtgtgcttgtgcagtgcgtgggtatgtgagtgctggaagaggtcagttagaaccagttagaactaggagtcaaagatggttgtgagctgcaccacgttggttctaggaactgaacttgggtcttctgcaagagtattacatgctcttactcactgagtcttctttctaaccctaattttttattagtgtgtgtgtgtgtgtgtgtgtgttatgatgtgtgtgaatgagtacatttgtatcatgcagcatatgggaggtcagacaacagttttgtgaagttagttctttctttatgtaggttctcagaattgatatcaggtctccaggcttgcacactgtccacttttacctgctgagctatcttcactgctcccagagtattttaatgcacctcatgtaattactcgtcacagcttttaaaagcaggagttcgggacgtaacagagtggtgggtagaaccttggaaattcctgcctggtgttcttaagtggggattgtcatccatgctttgcttatgcccactgagtgccatcagcacagcccctcttactatttggacagagttgctgacagatttattctgtttttaaaatactctgacaagggtaaagttgcaagtatgaatcatataaaggaaagaaggagtggtggctctgtgactgcaaactgcattagaacctgtaatgacagctagctggattagctctatagccaaactctgggtgcaatatagacagcaattgaggaagatactgggcatcaacctcatacctcctcatgtatcagtgtacacacacacacacacacacacacacacacacacacacacactacacaccgtggtttaatgtttaagggagcagctaattttctcaagaggataaccccatgtctactcttgaggctctagtcacagtgtgctatttataaatctttgaagcacacacttatggaagggacatatactacagtgctaattttaaagaccagcattgtgtgcttctattttttgattttttttttgtaggttcaatataacatgtatttgctttagaaatgaggtctgagcagctatttatttgaagagcataaaactatacagtatgatcccagtagtgttttaaaaattagctacactcttcatggttggttgactcataaaggaaaattaacaaatgacaatgtaggtgttatttctggttgatagaaataggaattttgttttctaatgctttatttttttaagaaaagagtgtctcgccttgagatgataagaaagccaaattagcccactcattatacaaattttgaatgcctgttgtctaccaggcattggaactaccacagaaggatagacctcccacctctgcctttgtgctatctttgtaggataataaaaacaatttcaaaatgacattctcaagtactgcactcagtgcttattggggtctctaagaagagaacagtggttaacagcacacttcatggtttagggctcacactttctgtgttgagaagaggctttcctcagagacaaaagatgtcgttttcattagttccaaggcaaactggaattattcaggcagtttccatcgtcttcctccctggcatgcccttctcgctcaggtgaccctttggttctggtcctttctctgcacattttgttcagtatgtgtcttttgattttcttttaattcatcttcaagaaaatcccatctctagttgataattgtttcctaggctctacagaatgctaatggtgtagtctagatgtgtggtgaatcttctggtgaagtgtctgctggttggagctgccattagaaaggaaaaaggccattcaccagagctgtgaggctcaggtggtcctcaggagtctgtgaagaaagcagtgttagaaagttacatgatgagaactgtagtgtccttgcatttttgtcaacctacacactggagtcatttgggaagagagaacttcataatgcctgcatccacattgcctctaggcaagtctgtattttctcagttattgatagatgtaggagggcccagtccgtgggaggcaatggtacacctgggcagttggtgctcagttgtataagaaagcagactgaggaaaccatggagaacaagccagtaagcagccttcctccatggctgctgtttcagttcctgccttgagttgctgccctgacttcctgcagtgatggactgttacttataactgtaagatgaaataaaccctttcctactgcttttggtcatagtgtttaatcaaagcaataagaaccctaagacacagaatgaatgactagaaatctaggacaacttaagtaaagaaaaaatgtcatgtttaagaattattaccatacaaagtattaaatttcatcatggctttttttttttcaaataaattttggtgtgttattgttgtttctagttctcccatctccctcctccgaggctgcttttgaaacattagccattacttttgtgggtgggtaggtagtaacaaacactatgccaactccagcagacagctggatcctctccccttcaagatgctttctagcccagcctagttcactgtttcccaggtagctggtttggacatctgtgaccaggactcattgttaccataaatagttttaactgaagactggaaatgacgtgaatgagctatgaatttaaaaaaatatatttttcctacaaaaaaatacaactagtcactcaatcaaaaatatcccaaataacatgtgttagctggttgacgaggttggggagaaaaattttatcaaatcaggctttaaagatagttatagtttgaccttctttataaaggtctaaacttagaagtgattgtgtctagatagtataacagaaatccctaagtccactgctgggaatcaggtaggaagattgctaagttaagggtgcattcattggtcttctaagagagactatgcctcaaaaccaaccaaccaaccaaacaaacaaaccaaaaaccagaaaaatatgtaaatgaatagatgttattgtgaaaatcagtcctaaaacgttaggtgacttactcaagttctgagagagccctctaatcagtttctaggatagtgtgaagtaccacatgctctttattacactgggaagattttatatgattaatacccacagaaagtggcatgctgccacccaagaatgccatggcccaaattccaaagacctgttgttccttggtctgctgtgccagagtaattgagatccttgtttgtttgcaagatgagggatttgggctttctgattaaagacatgtgatgctgtctttaccccatgtggaaggtgatccgaatattcctgtgtcatcagatgtggattacccttgacatacataggctttctatacactatgctgacatgctagcatgtctagtagttttcatgatttataggctagaagcagacagcccacttatcaacagtgacttttcataacatttgctgtcttgctttgtacaagtctgtatagattaacttgtacagtgaggttctctgtggttcatagatagactgtgacagcctcagcttgtgagatagagtgagataccctatagatcatgtctggtaaagtgtagtgacatacccttaggacttaggaaacttggtcagttcttagtctaaataatgcttaattatctatgttaacaatatgaattcagaataaatattagaacctttgaaccagaatgttttactgaagttaaattacgatgtgctgcaaatgagaagttgagccttgagtgtgttggtaatgaacactggtttctattgcaggccctctgtcttcatagaagataaagcagtggacactctggcttacctcagtgatggtgatgcccggacgggcttgaatggactgcaactggcagtgctggccaggttaagctctaggaaggtgttctgtaagaagagcggtcaaacctattctcctagtcgagttctgatcactgagaatgatgtgaaagaaggcctacagcggtcccacattttatatgaccgtgcaggtgaggagttgaacgatgggaaaagtagaggtgcagggacaaatgtgcccacagctctttccaccctctgaccttcagccaggtccaaagcgtgctccagatgctcaatttgatctgcatattataatggaagtaagcctcctacacaggactgaagacaggcataaaacaagctgtcttgataagaatcaagacgagcttgggagtttgaaataggacgcttccccttcatcttgtacggtggttagatgtagatttccccttgttgtctgatagcacctaggagaacacggcagtttgaaaggccatgaattcagttgacagtgattcttgtgatcacttacaaagtcagtgaggcagaaaagattggtttatttgagagttgaaaaatcctccatttttaatattaaagatgagtttacaaggattttgatagtttggttttatagtagctttgaaattttgaattttgcagtatgtgctaggtgtttgcacagaaacatgtttatagatggcagatatcccagctcttattaaatctgtgatctggtaatattaaatatcataagcacagcatatttgtaacttctcattaaaggtagagatgaagatggcttattgaagattaagctgaactctattctagaacatttgtgtgactctgaatagtatcacattgcgaaactatggagtggaatctccatgcctttaaaagtcctgccaggagaagaagctgataattgaatcttcccggtctcacagtgactgtgcctccattctggtatttcttaatgatgagagttctccttacaggagagaattggagggtggggctgtagaatggccctggtcctagtcactgcttttcatgagtgaactggctggccatacatcctgagtgactgaagcatccctagctgataatactgtgtggtgtaactagtgctgacacattggtcacccctgtcccatctatgttgtgctgagcgtgggctccagccagcggcctttttgcatgctctctcttgaatatcttgtccttgaaaagcctgggaagtaaaatatctaggcatagtaccctactttgctttaagccaaatactaacacgcgataaaagcaaactgcacatttttcagcagtgagcaacttctcacccacctgtttctttttccggaggcccagtagcagtggtctttacctccccggtgagcagcccagaagaccctttcctttgactgtttcatatttatcaggtcactagtcacaatccataggacatttatgagtgatcttttgagttttttttctttagatttcccaaacaaccatataaggtagcttattaatattatccctactttatataaaactcatctcagttcacaaagcatgtgctaaaactgattctaaaattcacctttatcggggtctgttaagatggctcagcggttaagagcactgactgctcttctggaagtcatgagttcaaatcccagtgaccacatggtggctcacaaccatccgtaatgagaaacaaataaaaaaccttgggcgggattgagcagggcccggagcaagagggagaagggaagggggaaaaagttcacctttgtctacttcctgagaagatgtgctgtctcactgcctgcatataccccatgcctacctcctagagtcactaagtcactctacctagaccatgttactgagaagagacacttggagatgttcagccctagggagctatatgaggggcaccttcttactagccctttgctattccaggaggagctgaaggcagtggaagttccttggcttggtagcacagccgggaggacccatatgtcatacccctatgttaatgtgcttgcactgcccatccataccagcatgtctgtgccacaggggatcatcagacacacataaatataactcacattctcaagaaatatacttttacagactgctccagaaacaagaattgtagaactgttgccctataaatgtgttagcttagactcttggagtttttttataaccctgatttgacaaaaacaaacaaaaaactaccattagaggctttgttattattaatctcgtttaatttcacaaactacacagttgccccctagtaggatccagtaaggtggttcagatgtttatacactagagtgaagatatttctgaatgagaacaaatggtctgccctgcattgatctcatgcttttaggttaataatatgaactctccaattctcaagctgcatgtaataaaagcaaaagtaaatgcattgtttctgtgggctagtaattaacattaaaggtttagttgttctgtactgttctctctgtacaaggcccgtgtgtttaaaacaacattttacctagtgggaatctcaaggcatggagaacttgctaaagtctgcattgctagtgagtttgaggttcaggtccaaactgcctcaggctagagcctatggtacagttcactgtaagtcagtaaagatgagtgacctgtgttagagagtatagggttaacaggcatgaaggactagaggtggctgcctatcccttcccaaccgtatgctctgctctgttgagagatcagggttcagagtgcccaaaccaaagaggccaaacaggggctaacgccatgtagaaaactcaggacacttcagccagggaccatggctcactttactagagaagccccagtcagaggacactgcttattcataaaatttagtaattagattcatgcctttgacctggcctgaaattccttaggaattgaagtttaaagggcctgcaaacttagatacttaccctttggtagaccagattcttgtcactctatttgaagagcaaatgtcatcttagcagctgctaggatttgttcctggagccagagtgccctgcccaccagaacactgtcacattgttgatgtagctcatgatgtctacagagcaggtgcttctctggaaggacttaggaccagaggactttgcctctcagctgtcatgttcttaaacttccacgagagaatggtcaaaagacatggacatgtgtaaagagcgctgcttatttttgataactgttcatctattattccgttcttaagtgtcttttctaaagtacattttgctaacctgtttgcttgtgaatctaggattaaagatgaactaaggccaaatggtgaggatggggccacagtgctttgaggctaagagccattatttcatttatcaataccctaagatcctgcttcacaaatgtccccacagtctatggtgtaatgaccatgggcttcagataccaagatgtcaactggcaatgccactgaggaacaaatgagctctatcagctgtccttcccactttctctcaaccctgatgaccatgaccaggccagtcagtttcactcagatagattctatgtgggcagaagatggaaccaggacatggtcctctccatttcctttgccagcctctaagtctaagtgtcctcagtgtgtataaccgtcaggagtttctcctctgaataggcctgctgtgaaacaggcctggagccctgagtgagctctgtggcttatccaggttttaccccactgagtgtggctggagggcagctgtcatgcctgccttccccagcacaactggggcctgttttagtatgctgctttgtatgtcgtgtaggcatacaaggcagacacgtgactgttgttctggtgtataggagaagagcactacaactgcatctctgccctacacaaggctatgcgtggctctgaccagaatgcttccctgtattggctggcccggatgcttgagggaggagaggacccactctatgtggccaggaggctggtaaggtttgccagcgaggacatcggtgagtggaggagagtttgtgtgggggtgggggttctgagagggggtgtgcttactctagtgtggagtcatgcagagtaggtaggaaaagaaagacttgttctgagctcagtggtcggttgctccatgtgcatgtgtctgactatttacagagtcactgtttctgcttctttggagatgatctcaaggtcattcaaaatgccgatgtgtaggagagagtttaggtttgctttgtagccaatgttaaggtttttattcgttagttctcaggtagaaatgggaggttctggacaccattcaagacaaagaatagaaaagttttccttttcttactatagatactgtgctttcatccatccattcttatgaatgccttcatggctttgaactttgtgtctgtcatgtttatcagtctcttgtttttcctactggaatatatttttccacaagaggccattttgacaccaacagtaactcaataaacagtaacaactactataaatgtaatgtgattggagctcagagataaattgatatagttgtgctgggtattttatccctaagtctgcatgcagtagtggttgctgtttacaacagcacactgacaggttggaacaagagtatcctgtgacttaaacttcgatttgtctcttgttgtatgataggcctggcagatccatcagcattagcacaagcagttgctgcctaccaaggctgtcactttataggcatgcccgagtgtgaggtaagataccagctcagttctttgcaaatcttctttattctgtgccctgtcttttgtgggtttgaatataagtcttgccttcatcacaggtgtgttaggtccactgaacaagctgctcagctttgaactttgttatgtagaatcttagcctcctaagagatgagagcttccctgtctcatctggttgtggtttggttttggttttataatattggggcttgagcccagagctcatatgtgctagttaagtcctcctccacagtactatccacagccctgttttaactttttaaacagtcttatgggttgttcaaaatagtccttaacccattctttagcccccaggcaggccttgaagttagaacttcctgcctcagcctcctgagttactgaagttataggattgtcagatcaagcatgctttcacaccatccttaactttctgggaacaggaagcagtgggttcacctccatgccggacagtcatggcatctgctttatgaaccagggctcaagaaatatttgacttagtgagaagttcataccttaaatgagaactactgatttagttccgctctcaccatgtaacactttctccattgttactaattgtccagactaagtgaaaagtgggctataaaaattaacttaaaaaacaagcaagcatgggaatcatgtaagagttaactaggaggaatcataaagtgctctgccaaacagaaactgtgccatcttcctggtgacatgtgcccttctgtgtcctaggtgcttctggcccagtgtgtggtctattttgccagagccccaaagtccattgaggtgtacagtgcctataacaatgtaaaagcctgtctgcggagtcaccaggggcccctgcctcctgtacccctgcacctgaggaacgcgcccaccaggctgatgaaggatttgggctatggcaaagggtacaagtacaaccccatgtacagtgagcctgtggaccaggactacctgcctgaggagctgagaggagttgacttcttcaagcagaggcggtgttgactctcgggccatgagtaggatgcttgtatcttgaggaaggccaaaagtcactggatcttggagttggttgcctggggaacattaaaaatagaccaacattttgtgccagaaattaagggttccatagatggaggtggttacttcagctaaatgtgtaccattgaaattgtgttcatttgcaccctgtgcaatgattatgcttatgaaaatacctggcagctttgtgcaattaagtaatgttataaggaattatctattttgtcatagtatttaagtcataatgtcatttcaaaattctgttctgtaggctttttttcttttaaaaaatgtatattctgggtagttacaattggtacaagaaaatgtaattgtgatttaatactgcatagtgatttgggtattttttttatatgcaaaggtcttatgagccaataaaactatttcaaagtactcttcagttcttcagtgttcctcctttttgggatggtggcaccagtgtctgccaccattacttcacaggaatgagatacaaagaatgagcaaacaccataggtgagaagattggaaaggtaggggctttttctgaaaatgagtgacccccccccccccccccgccaccattggaggatctcactttgtagcccagactgcacttgaacttgtggccctttctattcacctctttggtgttgggatcatacaggagtatgccactactttcagctcattttattttttaaaggactacacctgtacagtttatgtggcctgtgagagactctaatattcctagcacattctaccccaagcccagtaggccttacttacctgtagccctgtttttttttgggggggggggaggttggttttttgagacagggtttctctgtgtagccctggctgtcctggaactcactctgtagaccaggctggtcttgaactcagaaatacacctgcctctgcctcccaagtgctgggattaaaggcctgcaccaccacgcccgactgtagccctgtttctaagtccagtttcttgctttactttttttgtttctggaagttccgccgctatctcttggtttgctgcctttggactggatgctaattcttctcaaatgcatttcaatggccaggctgtacacatttccacagaagttaatgggtcacttcttactcctttaatgttatctctcttagcggttccttaggcagcccagagttgatgtcagcagttttcctgggaaacggcctctgccttcctgatgctaatacttgttctgctgctgggatatctagtttcaacagcccagaaaggcagcatactatagaggcttttcatccttgctcaggcagcatgcttccttcagtagtgttgtcacagaaggatgctgagaagagccaccgtggacccttaaggactgaacctgatgcttgtgggctacctttaggcttgtctgatagtttggctgggaatccattgtaggtaaggaattatttgttcattgtcttctactttcccagcttgctatttagaagtctgaggacattctgatcaggtgtctgctttgtaaatactacaagctttagagccttctgtttctggtatacaggaagtcttcaatcgtttttatgtgcatttggtagggccttcctagatggagctccctgacttgcaattctagaacatctctctcttctttttttaacccattaaatattgcctgtttcacactaagcaatcttgttgatattggaaacaccagtgaacaaaagagacagttttgcatttactgagtgaaattactgttgtgccctgtagaaaactgaatcagaaatgagatggggaagatggagaggcgtgattagatttagctggaggaccagtggggtcttcaaagaagggatggactaccaccatcccctctgctccacacccagccctgtttatttttccttcttagtgtagtttctgggaaatttctttacctttagtttttgttccttcattactgccatcctgtcttaaatttcccagagcctgcttttcttccctgtctggtccttctcccttcctcccccattctttccttctgttctctagtcctctttcagaagcctgtatttattgtgctgtttgatgactgcttcctaaggatattaatttttaaatcttttctatttttttcctttttgtttggtctcttgtattgctcaccctcccaccccccacctaccccacacacgtcaggcatggaattggaaactgaacacgggataaagggcagtgtgctgtattggctttgttcctgttcagggtatttgttgaaaaccctgaaagtccagtccttagggctttccatttggaatagtgggagctccctctgttatctgcctgtgggtgaaggttcagtgccttgagtgctcagtgtcaagcaggaaaacaggtgtgacctctgatctggtgaccaagtgggacccaagctgttggctctatttggagctttacagttgagatgttctgctgtggcctggagtaagatgagattgtccctggccttgtgaatgaccccaagactttgagacagtttcttcagagaagaagtgggtgcttggctttcctcattggactttgtcatctccgaccctcagcatcatctgccactaacttcctcgtttacccattttccctccctccctccctccctccctccctcctgcctccctccctttttttattattgttgttgctgtttgtatttcaaggcatgggacttactctgtagaacagagtcaccttgaactcagacacactcccccaagtgctggaattaaaagctatgccacaatgccaggcatttacccatttttctagggatagatgcaagattttaaaaattgcttcaccattgttttgatgaaacataggaacttatgaaattcatgtaggactaactggatttactgatttttttttttttttggctaggattcactactcaatatttgatcgatttgtactgtctaaatatggagattaggtaacttggagctaagaaatgtgtttttttcatggctccatttgaaatgagacgtccactccctctgacctgtttccttggggtctgagtgaggagataccactgaaatccataaatattttctgtcaagctaacaggctatagaaccaactaagatcactttactgggcatttagctgaggacatcatggtatgtgaaacaggcatggtgcctgtcctcatttatgaagtcctatggaagtgctttttgggtgattccacaaatcttaaaatagaaaagaaaatagaaaagcaagttttttgtttgtttgtttgcttgcttttgtttttgtttttttgttatggtatatcttctctgcccaaaacaatatataccacagcacatatgaatgggagagtacagcccacacctagtaaaaaacagtactacgactcagtgtaccagcgagtcaaggcatttgccaactggaggcagctagtctgtgttgccatgcgttagggtcatgttataattctgaaaagcattggggaaaaccaccagttcccttgttctgcaccagggctgttaggttttgtttcccctggtacagcacggtgaaattcagcgatgttatgcaaataacttgcagagaatctccagttgctgtaaggaaaatgatcattcatcttttcgagatacacgtcttcaaacgaagacatcttgtggcttttaaatgagaacccagcttttattagtactgtgttagaaagtatagtgttctaggtaggactaaggagaaggctcagtggatagaggcttcatataagcctggaaacctgagtttagtcttggaacccacatgtattttcagtgttaacttttctgttgtgatgacactatagccaaggcaacttaagaacaaaaagaaaaagagttgaaatagtttcagagggatgatagtccatgatagcagagtctcggggcatgggttctggagcaagaagctaaaaactcatgtcttcagaccacaagcagaaatagagaaagcaacgggaaatggcgtgactccagcagttaaaagtactggccccagatgtttcactactgactgtaactcgagtcccagggagctctgaaacctggcacaatgcacggatactcatgtgtgcaaaatgatcatacacataattttgtctaaaaaaattcaaactctcaaagcccacctgcaattacatacttcctataacgaggccatacctcctaagtctatcctaaacaattccaccaatgggggaccaaatgtacaaatccattctcactcaaacccccatgctatgtaaaggtggagggagagaaacaactccacaaagttctctgacatacatggctgcatttcagacctctagaagccatgcaggagctatacagggtaggtttaatgaccacctataacccaagcacataggaatcagagatgggattccaggggcaagctggctagcttgactagaattgccaagttaggtttagctgagaagccctgcctcatgaaatagtaaccaaagaatataacgtctgtcaactttgtgtctctctgtgcaatcgcatgcatatgtgtgtgcaccccaccacatgcacccaaccatacacagacacgcacatgggctgggggaggtaaagggaaatgtggagaatgcagctactctcaagaggaggctattcctgcatacctcaggcactagagaaaatatctgaacagtaaaatgaccagatgtaagcaacacactcaagttggtagcttcttggccactaattacaagcagcacacacatacccagagagacaccccccaatggcagccaaatctgaacttgtcagtaaggaagataggataaaaagcatgtagaaacagaaaacttgtatagttcttaaatgagccttgcctttgatttgtttttgtgtatctctcatgcttagcatgtagaatgtgaaagtacatatttgctaaataataaaacgaatggataacgtttccctggggtctatgtaatgtctggaaatcaggctagtcctcaaagcttctctccagcaggggtcaggctgaggctggagcaaagttcctagtgaccattgcaggccaaggttgtcttactgtttgtgatcaacaggacagataaagtgacctttcaagagttgatttgtctggttgcaaaagcagtgtttgaacactacaaaaattatgcaaaaagtagtggaaataaaccatttttcctcagtggtaactactgtgaatggttcaatatatgtcctcttggttacaatacggtaaatagagtttaatatactctgttagttattgatacaacctggacagccccctagtaacccaggcagagttgtatggatttacttaatcagctcttgcacaattgctaatatatttttctaaagccaaactggctacttcctagctgctcttgccagtggtgcttgctgtttgagtcttacccaagttacttctccagcagtctattttgggggtgggatgggcatgttctcctggcccatcacatctcctgctctctccatctccctccttgactctacttttctctgtcccttgtggtccctatttgcaatcccccagcccagtaactgaaactccacctacctctgttctccccagtgattggctgtagccacttttatttagccaatagctttaaattggggagccaagtttacatagactcacttggtgtacatgaggatatgtttgtcaagagcagccaggtcttgggggccagtatttagcatttgaatacatagcagcaccagaccagcccccaacactggacatttttttaaacgtatgtgtgcatatgaaaattggaaacttatgccacctgtttagcagctacaatctgaaccaccagggggcgcacagttcatgtcctgcacctctccatctgtgccatccacacaggcagtgaaagaatggacagcctaggaactgtactttatgagagaaatgaatccctttgcacactccgcctgccaacctttgccctctgcccccatcgccagggttctatcaatagcccagccatccatgcacactgaggaacatggacccagagtgagtctgctggaattcaaaccctggctgggctgattcgtggtcaaggttgtcatctttgcttttccccttcctcatctgtaggaacttaattgcaatggaacctcatcactgagaactgagatgtacagggtctcatcttgcagcgctgagcgcctcatctcagccttttgagtgctgggattaaccagtgtgtgccattgtctctgtctatttccgataatgactttaaaaacctaccacaatgccggtatcatactatactctatgctgttacttggggacagactttttcaatttgtaagatcctgcctcaaaacaaacatgtccaatcactaagcaagtagtgtattttgcaccccaggcagtgcaacatgtttcttggctgtagctgtaccacaaacacaagtgaggcacggtgcataatggagctaggccataggaacgtgggctctccattacaatctatggcagcaccaacatatgtgacaggtaccaactggcagtggcaaaataccaggatacagggaaagtgtttttcacagaactcaaaatcccctgtgcactctccttcctggttatagtaaaagtgtttttttctggtcctgagaattatagaaatggctggcattgctttgctgtgctaggacctgctctgacagctgttctgacacctgcaaagccacatgtgttaaacattgattctgtgatttccttctggggactgttttccttgtgttttaaaacatgaatacgtggagctgggtgataatctctgattcagccataggacatatcatcgtaggacaggaaaggaacatctgagtcacttaatctaattcctgcagtgtgacagcaacttgaccatggtggtgataaaaagaccggaattacagtttatcagatgatgcattcgatcatgactttttccattaaagcaggcaggcttaagaacacccaggcttcactgaattaagtgctttatactgtgtctacaagcacagaaatagcacagttttaaaaagtgaattgtagatacagacactgtaacaagacaggacacttttcataacatgtgagtaacaaagttgactcgtctgcactatgtacttaatcaaacttccatgacattcagtcagttgtcttaacatctttgctggaaacaggtctaaaaaggttttgtagagccatcttactgtgcactgatatcgacttacctgcatctggtaaaatacaacatattcacaggcagtgagtttcaggcaggcagcaagagattggaagtgcagggtgccctgggaactgagccttcaggctcaggaatgcttaacagagtagatggatttcctaccatgcaccaccactgatgtagcccagaaagcatgctatcctggactttattttcccagggataattgacaagctgcactaagagcacagagagccatctggtttctagaagagggtcctcttctcaagctgttgtattcctaactttgagaatttttgtttttgagaagtagctaagggactagattggtccaaggtcccctgaagaactgtcctgcagttaaccacccaaatcaggcatccttacaacgctagtttgtttcaagagtcctgtctccccagacacttgtgctgtggtctcttactatactggtagatttgacgccttctttcatttttatcagttttgtctcagtgtattttgaatcttcccccttggacgatgaaagtagcatgctgatgaggaagaaggggaaaccaaaataagtctgtaattgttcaggatctgtggactcggggttagtaaagtcacagtacaacaaggctgtcccagtcagcatcacccagtcattttctcctgagcccagagccctcaaaatcctcttctgtcagatattgggcgcatattcttcatccccaccaaaataaaagtgacatatcatcactacaaagtaaatggcaactaaagattattattttcatgacaagtattatcatcttaaagaggcttgcattggttacttttatgtggctatgactaaataactgtaagggagtaaaattttgggagaaccatcatggcagggaagttgtgtcgggtcagcttactgcttaggaagtaaatgtagtggcgactgttcatgtcccagaagaacactaaacagagctccacaggaactgggggctaggcattacttcgcccaccatgacttctgccacttgggtctactctgtaaagggtccacagtctgtaattggactgtataatatgtatgtatatgcatatgtaataatggcaccattagctggggacaagtggtctaaacatttcctcttccaacacaagtatgtcaaatatgaaggcaactgatgcagcttgcctgcagagttccagacattatcagacctctgagcattgaagctctgagatccaccaggaatgacttatctaactttctttccgggggcctgacgaaatagctcagagggtaaagttctttaccaggcaactgtgaagacagatattcagagcccaagaacccatgtaaaagctgggtaggcatagcagccgctggtaatccttgcagatgatccctgaaggaaactgactagtgagaccagctgaaatggcatgctgcttgtttagggagaagagtctgctttgatatataaggtatagtaattaagaacactttggaccaccacacacatgtacctgcacacataccacacacacacacacacacacacacacacacacacacagaggaaaacgaaattcctcatggcttaaatgaacctaacttctgtcacaatacatccctcaaatttcaactgttctacctaagactctttcagcatgttgaccactagaaaaaggaaccacgtaccctcctgctttatattgttcaaaggttggactccttaccccaccccacccctgccctgtaggcagtctagttctgatcagatcctcccaacacgagaagctaaaccgtgaaatttcacatcccagtttcttccatcctgactgcgatagctgtcacaagattttgcgagtgttgctttaatagtcgataggaatttcaagtaatgccttaaagtcaaactgaagttggggctgaaataatagcgaagcatccagctttttatgtcacaattaagtctgatgaagccatcattttctcctgctgcctggcaagcccagaatataaaggaactttatttcatgtgggagggaacagaatagggatagatttgcggaagttacagaaacaatgataagaagagataataaatcaacaaggaaattgttgccaggcaacatggttggttgtcaaagagatagccttcagtaataacccttggcaatcttcaatattaggctgtaaatctctgaataagaatgactgagctatgagtggatcagggtggacactcttccaaagaaccagtgcacccagctcacccattctgtctgtaaacataacttctgcctctctgagaactgtgcatctgtttcactgactggaacactttgtctcttgtgtatttaaaattatactgtgattgtagtttttttttttttttctcagtacaatgaacccaggttgccatctccctacttacttgggtcccagaactctggccagaggtagcaagggcatgtgactcacagacagtgaaactggggtcctgtgggagttctccacaacctgaaaccaaattaggtaggtacagaaggcggggctagttggctctggggtaggagatctgcatgagcagtgtcagtctgtaaacactgcggaggaggaagatacagttgctagcctttgtacacactgggagaaggaaatacagttactagactttgtagacacttatcagtcttcctaaacagtacaccagaactcccaagaaaagccttgcaatttctcttgagcctggctcatatgcgaaacagctttgcctatttcccatgtgaggccttgggcatccttgacacagctgcgcccagcctggcccatatggataatagctttgtcaattggccatgtgtctggcaggcctttgctgtcctccacaaagccttggccatgataaaaatccatatctcctcaggatttcactcacgcaagccttcctttgctccctataccagttgatgccaaattcccttatattattcttgttagatcaccaacatttgaccagtgagtcccgtacattcccaggtccatgaagtctgtagaatgttggatttgaaggaacattacagaatactgggccacggtcttcatttccatggctgtgggatctgctctatgactgacaatctcctttcttcttgaatctgtgttccacagagcctgccttttatgcttggagccctcatcctgtcttttccttgttaaaatagtctatggcaggaaagtctgctctgctcacccttgtctccagctgctaggcatttccaggattcagaaacactgacaaatggatgtgagcaatgacttccaagatctacagcaaagcttagtcacctagaggctgtcctgacatgtttggaagagtccctccatccttccctcccttccccgtgtgaggctttgtgcaagacagtgtcagtgcatagatgaatgggcgggctctctgggctgaaagctggctcttgagactgtggacagcttgtgtaacatctctttattggtttcatcatccatacaatgagaacatgttacatctaactcattagccggatgagaggattaaagaagcttaaaaatattctagtatgtagataagtatgagatatatctcccttttttgaatctttgccattatttttaatcaagatgaagcaaaatctgccccccagaagactaggacagtctgttctcataagtgaaggttaaaatcaagggcaggagaggtcgaggtggagaggagccgggatctttcctatagaggggtaacttttcttactgggctggtgggaattttagcagtattagctaaacaatcattttgctgtctttcattgggacttgtcacatgatggtgagttcactttactgttttcagaaagtgagccgacaaagagggcttctgaagggtttcattgccatcacaaccgagctgtggttgaacagctcaggaagacaatggtttcctgtgtaactggaaacaaaattgcttgtatctaggacaagcgtttcttaatagccaagagaaaagggaaggcaaggggcagaaaagcaaaataagatcgaagttctttttaaaatcagtttatattgattgcacaaaatagtaggtcccattatgacagatgtaagtaaggggtttaaccatgtctatctctgaacacacacacacacacacacacacacacactattcccacccacctctcctcgtcttgtaccttaatattatgagccccttgaatttcaggtcttttttttttttcaaggtgggaattctttgcgaatgttggcacacaatattgaagatttaacagtaccagccctcacattggaattgctgtgagccaaagggatcggtaaactaaattaagtttctagagatctcttttattaactaaccacaaaagaaattggtggagcctgggaacacagctcagttggtaaagtatttttcttgtcccacaaggacttgagtttgatgtacagaacctatataaaaaaattccatgcatgatggtttccacttataatcccatctgtgggacttgctggtttagttagcttcactcacttggccagttccgggctggtgagagatgctatcttttaaaaacgttgctggttcctggagaaagatacctaagtcctctggcatccacccatacatgtattatgtatgtatatacatatatgagggagagagaggcagttaaagaattagaaaaatgcagaaaaatgtgtgaaatcatgcaactcttactaatatttactgcagttgtcttaatagaaaacatacaggtgactgagcccagtggagtatgtatgaaatatgagcacatggaaggttgagaattataaatttgagaattataaatttgaggttagtctgagatatataacaagattgtctcaaaacgccaagagaagaaaaaaagaagcagcagaggcttattaaacatgaggggaagagacttcctagtgtcttaagtattttaaggaacatgatactttactcagaaaactgaaatctgtggtgcatctacattcatttaaagctatctgtaaaaatattatgcaatgttgtttacatttttaaaatacagggaaaccattttctctgtggaattgaagtcccagtaggagctggcgcaacagtccaccatgaaggaagggctggcgcaagcgcactttgaaaaccacattcagtaacatccgcttgctcttgcaatgcatggcaatcctgaaccctgaaaatcactcaatttaatgaagtatgtaaaactgtacaccgtaggacccccttagggccattccctgcactatattccccctctccatgcacctctgtgtttatttctcccatgttgaagtagggctgccacctccaacacaacgtgttagggccagacagttcaggtgtagaaattcttcacatgttataatctccatatgactctgagccatcagcttctctgagggagaaataaaaccactccttcctgagtcctgtgttgtctttatgtcatgtattcactcacactcaggctcactcacactcactcactctcacactcacattcactctcactcatcactcacacactcattcataccctcactgactttcacactcactctcactcactctcacactcatgctcactctcattctcactcacactcacacttttactcatctcactcactcttacactcacactcactctcccattcattcattcacacactcaccctcactcaactctcactcattctcacacactcatactctcactcactttcacactcactctcattcatactcacactctcacacatgctcattttcactcacactcacactcacactcattcactaccgttcactgttactaactctcactcatactcactttcactcacttttggtcactctcacactcattctcactcacactcactctgactcattctcacgcacactcactcactaactcacactctcactcattttcacttgctaattcatttaatgtgttgatttcagtgcacggtctgtgcattcgaagctcaggctcagcctctgagctagatactcagtcccaggtgagcgggatttggtgctgatgttgactgtttatagagattttggatttcctaggagccactggaaaaaagtaggactactgaaggtgtcagggaaaggttacactcaacaggtgctactgaaatgctgtttatccacggtcttctatcagtatcagctaccttgttgaatgtatatttattggaaattgtaaaatcattagtgttccttttaattggcagcaagtgaaagggcactgatgttgaagtataaggacctcctagggtaatgaagaactctttgtgggcttaactatttgtggaagtttagggatactagccatgataggtggtcacactggtttctgcacctcagagcttggagacgcatgctctcattctcctctgagctcctccatggcatgaggaccatagcatccaaggcatgatgtcagggttgataatcagtagacatacaaatgtcagcccaagggcccaggcttactcgacgttcctgttattttgcattctgtgttagtgatttctcccaccataacaggaggtgaagctctctttcagtgagactcccaggttacattgtcatgattttcttttaagtagaaaattggtagtgattagaacaattattttaaagaaacagagcagggcaaaatgtgtcaggcgtctgctgtaattttaatgatttgtaaagcacccttaaaaggtaaataaacaaaggcaactcagttttctactactcagctagatttctctcctgccccctcttagaatcagctatccctttccttgtgtcattaaagacagtgtttccagctcagaagccactagaaagccagttttctgccactgcgaattcacaaagctctccctgccaccagctgtggtttctctttatttcatttgagatccaatgagaaaagttctggaactgggctgttcatacaggtcattctctaggacctctcatggggctgtagcccatgcaaatgatcaggaaacctgcgatttaactcagagtgtgcattttgcaaaagtgaagatttactgttaagttgactaaatctaaatttaactaataaaaaatattaacatgtccaattcaagctgaatgtggctgtgtacgcctataaacggagctgcttgggaggtttgagagggaggatggcttgaatctgaaagtttagagaaaaagaaagcaaacaaggaaagaagaagaaatggaagagaggaggaacatatggggagtccaaatgcttaggattggagagatgacttagcaattaagagcacttgcactctctctgtctgtttttttttttttgtctctgtctctgtctctgtctttctctccctctctctctgcctctcgtgtgtacactacatgcatgtatgatgctttcagaaactggaagagaggaccagagttgtagatggttgtgagccaccacatggatgtcggacatcaaacacacagattttgtaaaagggcaacaattgctctaaactgctaaataatctctccagcagccatacttgctgttcttgcagaggacctggattcagtatgcatgtagcagcttaccacaacccttaactccagtttcccaactgataccttcttcccaccctccatggccaataggcatgccatgcctgcaagagaaacattcatacacataaatttaaaaacaagcatataaatacctttcaaaattcccaagtcaaataaaacacttacttgtgtatatgtcctgcttagaaatcacttttttcaagaattgattaaaacaaacaaacaaacaaacaaacaccccatcaactcgtatttggtcttctctcatcttctgaacactttgttttgttttcacagtgaagtctacagttgtgctgttgtcaatttatgtacagggtgtaaggagaaattaaatttcatctcttctcacatagttccctacatgtttgaaacaatacatgggaaattttctcctttcaccttctgccctggagagcttccatgtattgtcaatatatgatctgggatttctaatacaaatcaattgaatgtggagtgtaaagggtgggcttgggaatagttgtccccaggtatttttaggcctatggtcttaagaccacaccctgtggccatcctcctgtcccccatgggtataaagcagaggaccaaaagtaccttagatcacaacatttgtataattaattatacctatcctcccttttaagaagttgagttattgttaaatgacttgtaatgtttggtacagtgtacaaataacatgaatcattatgctttactgattggggaattataacaagaactaaatatctgtatgcattcaatacagacacaaatttaaaaatactttttatttccagttgattgactctgttatgtggaatgaagtgtctggggcacctggattacactgggatcaaaggcatagagaggtttctctggaaaatggaatgatggtcttcctcaccagaaagcagggctcacaaagtgcagggtgacttctaggctctctattctatccacttctaacacccctacatgtaaactgtcctgactcatttctgcagcattagcctagaaggttttgcctcagtgtgtcctcttacctaagttgtcttcttgttagacttggaaattcttaacctttttaaagttacacaactattagtagcacttgccctctttcacaagaaaggtgtcttagttactcttctgtagctgagaagagacatcaggacaaaggcaattcataaaaggaagcatttaattggaggcttacttacagtttcagaaagtgacccatgaccattgtggaggggagcatgacaggaggcaggagcagttgcagagcttacatgtcgaaacaacaatcatatgggaagatagagacagagacagagaaataaaacatgtacaaactgtagtggctcagacttttgaaaccccaacatccccctattgacacacgtcctccaacaagaccatacttaatccttcccagttccaccaactgtggactaaacattcaattatatgagccttaggggctatcctcatacaaaccaccacatagagtacagcaaaagggagcagatatggatatatctgaggtcgtatagttccagatatcaaatagtgtttttgaaatactggatcacaggcttgggagatggcttagtgagtaaggtgcttacatcacacacatgaggatcttagttctgatccacagcatacaggtggacatctataaacctaacactagggaatgaggacaaatggatccagggtgatctctggacagcaaaactaatcaaacagcaagctccagatgctgtgagacactcttttattggacttattcttggacaccagagagttttctgatttattcttaattttaaaactgcaagtatgatgattacatggacataacaattggttttgtaaactgaactagctattttacttaactcccctcgataatagtaagatacagtttctaacaaaataatcgaaaacattatgaagttaattttcctttgcaaaatagttcaatatttttcagctatagctagactctttattaagatactagattattatttatcaattattaattatacttattaattatggagagcatgcatttttttctctaatttctttctatttttgttctttcactttgagggaatgctactgagtgcatgcaaatctaaaatttttatattttctagtgcactgaatctttttctcataaagtgttcatttctaggataggaaaagttatttttgcctaggattaatatagctacatctatctctgtggttagtgtttgcataagttagccagtgaaccgtttcctctttggagtttaagagacaggaaggcagattgttctttgtattcaagattagaggagttattgaaatcataggtggacaaacagatggcagcacagctggacactgaggacagatgcagctgtgtaaaggagtaagaaaccttgtatattcttgagaaagagtaggggtagattgaagtgtttttctttttaacctaagtttgactttggtggggatcaagtgagtaccatataattgataaacatatttcctggttcatgaagacttggggccaatgggacagggagacaagaacctagagaaacacgttcactgtattctggaaaccaattgactatagttagttactgcagctgacacagttcaaccaaaatacaagatggcatggccctccctggccagcagtcagttttctcactgtggcagctgagcacctaagaggcagcttaatggtgggaagatagatttgtgctgatggcttcaggggtttcactccttggctctccagcatggatgcctgtcactacatcatgtctgtgggggtgggtggcacatggtgagacttcacttctgaacagacaacgagtagagagggggggctagataagataatagcccccacaaccacaccccacttacctgtttacttcagcttggcccaccttctaaagtttccagaacttccccaaatagagccaacagctaaggaccaagtgtttaacacactttgtactcaaacctattgaatgtctttttttcctttcaaagaatgtttccttaaatattacatgttgaactgaccactattgtctcttaactaaaccacttggacattttacatttcaagtaattacttaacacctactgtcacttcccatcttgttgtttctcatgcttcttgtatcttgatttcttcccttctcttgccttctttgggttgattgtacattctttgtttctctttggttcaatatagaagctgccaaagcattgtactgttaatccttagatttcagcacctatccatggcttatcttcccagacaatgcaaggaccttggaaaatgttctgtaagtgaaggaagtactagagacttaactattcctctagcccaatagattattaaactccattccctgtcatctggcttctaaaccataatttatatttattttagaattaaagtttgaatatggtgtgatgtggtgccagctaactttgaacacatgaacttaaatcatccttttgcatcatcatcctagctatctaggactataaagctccaaatctggagtatcatttattttaaaatagttcccataattctgtatacattgaaaactacttagacactattgctactattttatatggtcaatatttacttaaattcaccacaaatgcacgttcttgttctttaatgtcctctttcctgtgcataaagaagatttctcaggatagtctaaaggcaaagtctatataaatcaatgctctaagtttttgtctgaatatgtcctgaaggatatttttctcaaatatgaactaagttgaagttggtagggtttggagtctgcgtttcccagctaactggaagacctgtctgtggcctggctccacagctgtgtggctgtgtgttgttagcatggctgccctgtctgatcccttttattgggttgtttttatgatcgttgtcttaagacttctgcagtttttcaaggatatgctttgttttgttttctttctaggacagagttttttttttttttgtttcatcggctagggtctagagtgttcaccgaagcctttttatctagtttgaaataaccattttgaatgttagctttttttcttttaggtgtgtgtgtgtatgagggtatacgaaagtgttggtgagggtgtgtgtggatgtgtcttcacaggggtgcatatgtgcatattggtatgcacactattgcatgcatgtgcactgacagtcacgcttcaccatatgctttgaacactgtctcttactgcactggcttggaccttagtgattggcagggctagctgcccaattctctccagggatccacttgtctctgtcctctctcaatccactgctgaagttacaatcgcacccttctacacagggagtgtgtgtgtgtgctggtgatccaaactcaggtcttcatgtttttgcagggaaggcacttcagtgactcagccatctccctggccaaatgtttgccctttatatataattctgctctgtatcccatccctgtctcctatgcattttcaacaacttcttttggaaaggtgttttgagatagagtgtaaaccttgcagtcctataactgacttggtagaccaggctggcctccacattggagatctgcctacctttgcctcctgactgctgggattagtcctggctggcttcatcctttttgagttgtttatcattccttctgtattttccatgcttacttttggttttggagtttattgactgtgtaactttctagaagaaactaaaatcatttaaataaccaatttattggattgcttcatcagacttaaaaatccacaaattctttattatttaagttttcaatggaaataatttattgtatgtttaagctctggggtttctagttccttttcatccagacatgaaatgttgtttgtaagtttgcaatagcctgctaaagtatctgaccttggatttcgtcaatattatcttcacagactgttgttctctggtttgtatgggcggcagcagcatttagagccttccactgttgtccttctcttttgtttgtgctgctttgtatctctgttgccatggctgcccacccaaacagttatctttgattatactctggatgttgtacttgaaaagcagattgtaataatgatttgaggcttaagggtatccacgctaccccagatggatatgacttcagttagcatctgcaggcacccacctacagtccataaagtttgaggatggagtcgtccagaattttcagcctagctatgaacctttgatgtactctggaggtcatgcaaaagccgaggaggaaaacaggagtcctgctttcattgtacaatcaaaatagacatacccatgccaaaagtcatggatataaagagctaacagggttgaacatacaaaagaaagattggtttctggttagagtttttattgtcaagtacaaatgaaaataatcactattaaaatctcagggaatgaaactctaagctctgccttgtatctgtaaagtctccttcttctatggggaacaaaccctgccaaggaagagcacattagatgtgggattgtgccgaatgaagaaaatgaacggatggtccactgtgaattcttcctcaggcaacaacatacagaatgtagcaatgcctcctgtagcagcggctgcctctgttccttcctcattcacttccacaaaggacttgtggacaatttttgatatgaaaagatctctggatcctgacatgccagagagatcagccttgctactgctaaagagatcctgcactcccaggcggcccaggttagagttgagggtatagctctcttctatcttgaaccggggcagtttgacgtggacatcaatgaattccaagttctcacgtttggtccattcaagcagtttttccaaagttatttgcttttcaatctggaattaatataaagcaggtgtgtatttacttagttgattgttatatggtaattactatgtgccaaaccctttacatacatcaatttgttcgatggtcatagcaatgctcccccatcacagtggttcactgatgtcagaacatattctgaatatttacattttaggcttctgggctgggagtgtggctcagtaacagaacacttaactagcccaaggtacttgggtaccgtgaataataaaataataataatgatagatgttaatttattaccgcaacaatgtactattccaatgaacggactcacagttgccacaagtcacagggttttcttcatgatttctgcctaaatagattccacttagattttattttatctgtaaattgctggaatatatcggaattattttccaggtctttgagggtagaaatccaaaacaaaaaacaaacaaacaaacaaacaaaaaacagtgggtctttcatccattcatccacctatcattttgtggatgaatttttgtttgtctacttctacctatctatttatccattatccatccacctatcattcatccatccatccttcatccattcatcaatccatctacttatctgtccatctgtcacccattcatacatctactacctattcagtcatccatcttctttcatccatccattcatctattcatttctctctgcctcactccttccacttgttctattcttcccttctgttcctcctttagtccatccatctgtccattcttccacacactcaggattcttaaacccctctcacattgaatcacttgactgatggactatgaggttttattaccctgactgcttgaaaggtacagggaaattttagtagttttctttattttgaaactttctagagttgtagtgatgtatacactctactagagctgaagtaacattccataactcctgggggggagaggggggcaaaatatatgggctttatttatttatttatttatttatttatttatttaaaccaagtgtaagtagttaacatggggccacacaccctgcaatcccagcattcaggagccactgaaagaaagctgtaagctttggctgcacagcaagaccttgtccatggaatggagtcgagtcgagtcgagtcgagtagagtagaacatagaatagaatagaatagaatagaatagaatagaatagaatagaataggcatgctaatgacagtaactttgtagcattgatgtgaccattgagtgaattgatataaagggtttggcacatagtaagtaccatataaatattaactactattgttcctctattggactagaccagaaacacttatcttatggatactgacaatttccttctttagatcagagtatctttttgtaatgagataaattaccaggtagaaaatacaattgacaaatgcaccacaatcatgttagtgcacactctgtacattggagtgacagcaggctccttcttgaatgcaagtgtaggctgggaaggaacagaagctaaggctcagggcagtctaagatttctgagggaaaactgtaatcttcacagtttgtctacttctaaccttgttaggagacacccaatccccaaagacttaaatcaattcttaatataattcctttaaagttactttaagtaactttattatgggggaccactcatcactgttacttttcaaatatctacatgttcccccattacaacggttcactgaagaccaaacatattctgaatagtttaattttaggcctctgggctgggagtgtggcacagtgacagaacacttacttagcccaaggtaattggacactgtgaataataaaataatgataatgatagtaacagcaataatagcaatagtagtaataataactatataaacatgagatctcagagcagtaagtcctgatggactatattgacaaatatgggcctgcagggtaaagtctgtggatggacaagtgtttatggttcagtaaacacatgggaaatataagaacaatgcaatataaggaaacaaaccatggcattgagagccagttaccttcttaagacccgtggactcgtcctcaatgtctttaggcagcagaatgaccatgctaagttctccaccctggtaaggcatctccagcaccttgcacttcaggtccgaaatgtaaccaaatggaaattttttcttttgatacatcatcttcactgtttttgtgtctttctgaatggttgcaaaataaaaaaatactcaagttattctctcttgtgttttaaagcagaggtgaattgggggtcttggggtagagggctcagtggtaaaggcctggctaaccatagaggagacaccttgtgctacaactccagcactcacacacatacaatcaagagcatcccaggatgctggtgtcacctgaccttactcagtcggaatggagcatccgttgtgtcctctgtcatgaatttctcctcccacattcccttaaagtagatggcattcaccagcacaagtttggtcatactgtccaccacacccacagacaacagttctgggattttccctgaaaagataaggtaagcttttttaaaggttcatatcaaaagtttaaatttaatccagtcactacttagctctcacatagaggtcacacttcattttgtttgaattcagtgttgtcaggaaggacccacttgtctcatttttattttaaacaaactaacttgtaagaccaagcgggctgtgcctagtgcttcttgagaccctaagttccatcgcttgaaccagaaaacaaaaaaatcattaatgtcagtcaatgtcttcaaaggtttaaaacaagaaagttctcctttctggcatgcaagcaataaccattattttgtgaatggctgttctttagagaaaacaaacaatattccatagtgaaattttttgctcactggtaaattatgtcttcaaatctgctaagtaggagactgttcttttgaaaagggctttaaacaaatgtccaagagataaaagatttatcctagggtaagtctattgaaacaggagctattttacctatagtctaacacacttctgggaactgatagagttccagacaggatccctgagtgctgactcacacagaaacaagactgaggacagatccattacccagctgaattgagcccagagagtgagtcactccctatccactacttctgagttactggacaagatggtggccaaaaatattatgactataccagtttctaaatactgacttcatggttccatgaggtttcacctctcatttctttgcatatgaacactaaacaattctgtttaggcatgtataataactttattctgcattttaatgttggttttaattttcaattgtacttcagggggacccataggtactcaactggttccactaaaccatgtctgtatttctccactaataagtttctgacatcttacattgtcccttattctagggaatagcatctacatgtcagtgcacataagtcaggatttgggaagttgtggaagggagacaggagatgcaagtgagagagtgcaggggaatgagaacttgtgcataatggctctgctgtggttcagaggggtccccaaaggaccctgacttgaaggtttggactctggtccatcctgcattggaagacagaggaacctttaaaatgtaggtcctaggtggtggtggtggggtctacccacctatacatcattgggaatgtattttaatttatttgtattttgagacagggctcttgccatgtgtgctcaaggcaatcctcctgcctcagcttccaaagtgctgggattgtaggtctttatcctcaacgttaccttggagaaggcttgctgctattgaaaatggttgtgagacactggtctctccttccttctctttattcaccaatgaggtaaacaggcctcctctgctgcactgtcttaacaagaggtgcagtgttgccatgggaccacagcatcaagtccaatcatttataaactaaaacctccaactctgggagtcaaaatcagcctttagtccacaagctgattgtgtcagggtgagctccagaaggggaactgagtaacagagccagcactgctcagcctctcaccttctgtttgacctttgacccactggtttatctccttccttgcatcctcagaggcatgcagaaaatccacaggggccaagtcagcaccatacattttctgggttgaagccaagtattcctgttttttttaaaaaaaaaaaaaaaagtgccatgaattatatctattccctacagaaattttctaaaatccccacaagaaaataacaaagtcctaaaaattgaaaatgttttattaaaacctaagctttggacttttttgttatgttgaaaaccacacaacagtaaatgtactgtcctaaacannnnnnnnnnnnnnnnnnnncattggttgtttgtttctgtcctttctcttgcttttgttctccttgttcctcttttctctcttggttgtcatgtttgttttctctctggtgtgccgtcgttctattcacattgtccgcagattcgtgtgttgtttttttgtcttgttgttccgctttctcattgcgttgtatgtggattgtcctgtttgattccgatccctcgtttgtaggggtgtcagtcatgactcctggattttgtgttgtgtctcctggggggtgtcgcgctccgcctatgacaagtgtggggtatctgttgagggttgtggcctggatgtcgcatgtcttcttgtcttcatgccccttcgtccaccgtgttctcgttgttgaccgctgtttgatctcccttcttggtttgttctctgtcccgttgcccttttgtctattcctcgttagtgatgggtcattggctatgttgttattccctttcttggtggtggcgccttttgtgcatgtcatcccactatcactttctttcctgtggttttgatattctcatattctatttccccttgttttttctttctctttttatatatttatttataattgttgtctcactgaaatttacttattcttattttctcctatacatgacacactctttttcctttttattcctctcatcatatgatatcagtactatcttaatggtgcctatgtttattgtcgcattatttgtcttttacttatatatatcctctatacgcttttgcgatctcttttctgtgtattcgtctcgtataatcccacatcttatcacgtatatgtgtactgttcatttgacagttgttccatgtgtcgcgttccgttctttcccggtgtgtgtcgccgttggtcccggggttgccgcgtccgctcacgcgtcccgtccgcgtccgcgtcccgtcccgtcccgtcccgtccgcgtccctcccttccttccttccttccttccctctcatccttccttccttaaaccctccacccacatctcttgagataggatgtctctttgtaccagccctggatgtcctggaaatcaatttgtagaccaggcttgccttgaactcacagagctcttcctacctctggctcccatgtgctgtgtctgagtcatctttgaagcttacaagctgtagtggcaagtatatccctttatataacatttctggtgttaatacaaaggctactcatcctttttgaattttacactaatgttttcataattgagtaaatgttgattatacttcaagtggcttttcagactcatttttcctttgtatgtgtatgtgtgtgtatgcaagtggggtttatgtatgtacaaatgtgtatatgggtgtgcatacctgtgcaatcatggaggccagagaaaatgacaggtgtcatacttttattcccttaaaacaaggtctcccactgaacctgcctaggctcgtggtccacaaacccaaggggtcctcatagctctttttcccacagggctggggtcacaggagactatagagccatgccaggcatttttctgggttctgggatccaaacttagcttctcatacttgcacaggaagcgctcttctccacagaggcatcccttcagtccttgctttctcaagtcatccaggatggatcctttccttagaaagactatgagatgaaagtcccacatgcattctttgctgtttttatgaatacctgcaacatgtctgtgcctggaaaggtctgtgttacttcaggaagtttcagaatgtgaagtgctaggtacttacaggaaggaagttgtaggttttctctccatacagtctgttagcaagtttcagagtgtgagatgctccacgtttgctcacttcagcattcaggctttggaagcgtgaatggatgtcctcaacagagtcaaaatgaaaagtctaaaggaaagacatcattcttcatacaatcatctatgaagtgattccctgttgtctacatccaccaaattacttttatttgatacccagtaactccagcccaatattttattaacatatcattggcaaaggaaataaaatggaaccaaaaatgtatggctctgtgagacatcattaaacatagcttctgaataattttcaaatgttccccgaatgtgaatggttaacaagttaaatatttatgtcaaaattttttccataaagattcaaatggtatattcaagtttatatactgtgccatatacaagtttgttaaaaaattttttttaaatctcagaaataactaaacagtgtcaataagacacattcctgttgtgagacccaaaacgtgggagtgactgagaccttctttctcaatgcttatcttattacggtccacaactcattctctagagaaataacttccttaagtttattctggtgagagtttacttcctcttctgctagttgtaaatcaacaggccttttatggttgtgtgaggtctggcctcattacttgcttctaggacacaaaggacaaaagcacacagggtccagagtccatgctactctctgagctccgcttactagattgctacatggacacacctacgagactgaaatggggagggaaaggccttgagacagtatactgtttcctgatgctgtcagctgtaaaaagccttaatgctgaagcagacataacctgcgagaagcacctagcagcaggtgcagttaggaaacactttacccactcctgtcatgatttccaaaggtggcagaattcccctctcagaattaaggaacaccaagagcagaagtgcccttcatacccattaaggaagactaggcagctgtggggagagatgcaaaggtgacctgctgtctcccaggggtggactgagaggaggtaggacctgtccaacaggccacagggactttacaatccctcctcctgcagagccacagccagtgaaatcaggctggagagaggcacagggctaaccctgggaacatagacaggtggctgtctttaccttttgtccccataaaaaaaccaccaccaccaagctctcttcctgtagcatgttcttatatttgtcatgcctgaaggtgaccctattactggcatgatttatgagtagtggttatcagtgcaaaaggaaaacaggaaacagctagctctggggaggtgcagggctagcttacctgaaagcctgtgattcactcttgtgaatgggagaaccaaacccacaggtagtgtcattgtctttcttcactttgtgtccccaactgaacagagactctgccctaatctcacttaaagttggtagtgaatgaagaactgactgttttgggggtgtggctctctgaaagtctgactgtaccatctaacaagcatggagatggcagggagagctggccagtttggcttttgctaaccttagaaagctgagctgcagtgctgcctttggcccccagaatgaccatggccaaggcagaagaaatgctgaagggagagaagaagatgtttcctgtggggctgctttcattcagggtttggaacagctccaaggcgaagagggtgttggctgaactcagctgctccatggtgaagtctgcaaaagaggggagatcagcactgccagctacaacaccagcaacactacctacctcagctctgacatccacccctaggaccctacagtttggaattcctacctcatcctgtttttcctaagagggcaagcatactacttcagttctccatgcctgagatcaaggctgaagtctcagctggagtgaaatatgcgaatttgagaatgccactcaaataagtaagatgtgggtgacagggaagaggaacactcctctgtgtcccttttgcaaacaagctgattcctgcagtgggtaagcaagccctgcttgaggctcatctgctaatccagctgggtcccaaactcagagctccagtttgtccaagtacaggctaatcacaaatgtgtgtccctggctgtttagctacccgggccacatggagttctcattgttgaggatctaggatctcaccagcttccttccctcccagcctccctgcagccaggattgaccgtatgaagctcagggcactgtctcccagatcaaggttcaaaaagaaagccgagggaaagaaaaactaggatcaccttcctccctcgggcccgcggcctggagtagggtgcagttggggatccacagagcattttctggttacatcttgggtgagggtgaggtaccaggaacgtgctggttcctggaagaggtgccagcttcctccctccttgctatgacccctgagaatcttacctcttgcttagcaggtctggctccacttacagctaggatgaagtgctcagagccagctgttgcctttatagcatgcagaaggggcgtgtcttcctggcaagcccaagctgggtggaggcgccttttcttggctgagtgtttaaaacccgaccttggagggctgtcaaaataaaagcagaagattgtggccactctcaaggggactttactttcctcagttgcaggcctttttattattattattattattattattattattattattattattatttctttaagcagagatctggtaagttatttcttcctcagctgcaaatggccaagagaataaataaatgtcctttcttccaggtcaaaagataccttcttgaattccactgaaacgctgtaaaatcaaaaggaatcctttctgtgcggtatgtaggtagggatggagaaatatctttggggtcctttggataaggtcccagattgccagttacaagcaataggtgatccttgtcttctctgcctttcaggtgccaaggctagctcagggaccacaccaggctggagaagccctcaacccacaattccccactattagactaaaagtttggacaaatcccctcactatgcaacttaaattagaattgactagcccaggccattgttaacttgatgggctcagctttattctccttgaagtgtttggaactgtaaattcacagaacttttagtgcttcttgtctttcttcagaggacaaaggaagaatcctactgtaggtgagggtcacaacacatggattagtgtttgttagactcgggaactaaaagaggagaaaggaagatggggaggtgggtcagcacgtctcttgagcactcccgtgttggatataatgcctattgtgaggtatcagaagatagaaacttcgtgtgtggtgtttgggaggtgaggactttgagaagtgattaagattacacagggttctcagggtggggacgcctgactgaattccagaatatcatcttcatgaccactaggtggcgagcacgccccagctcttaaggactatgactccaagctttaataagagaaggagagatgagaagatcagaagagatagatctgcgctccttttttcccccctatgataccttgatgccttacactttctgggaccttgtctagatgaaggctagttcagatgctgagtcttgaacatggagaattcataattatcaagccacaaatgttttactataacaacataaatggacatagtccttttcacatacaaaatatattcatccatgtagctcaacgttattctagtattaccagaatcagaaatgaaattcaaaatatccccagtgagcccgtggagtcaaataagttagtttcttctgaaataaaatgggaccagcttagaacagaatttcctttttaaaaaaatcagtgacaaggaaaaagtggtaggtcctacagactttcaaagtccagcattacaagcactgggacaacttgaggcttgaataccaccattacacctccctgtttctacagtcagacagggcagggtcatggatgtccaaggctctggtggacttcaaccccataaccaccagatgtcgatgacgcagcagccctcatgggctgagtccagtgcttgtggctttcccaggctgctgaagtctgtaataatgctctgctgatcaggaatcttggaaaagaacccctctttaattcctcgaaacatcttcctggtgggaacttcgcagtgttacaaccccaggctccaagaagcagcactctctggtgactccatggctgcctaggacttacctcataaagccatccctttaaatccaggagaatgtgccacactgcaccacctcacaaccagctggcccgagacatcatgacacaacatcaaggactttcagagggacagcagaaccaaagagtgccatattacaacgtgggggcagttgtggtatcctgagtcctgtagtgcactgggtccctcccttgaaactcttgtgtctgaggccttctggtgtgtgacaggcatggcaattgggataatctcttgatgactttggctcactctggcttgcagtaatgaatagcctctggcttcttgccacattaatctctttatcaaagcttacttttgtcacagcctccatattctttcctgaacatggggtttctttctttaacatggtgggggatttccaaaatcctccagttttatgctaactagttgccgccctctatccctccacctcccccctctctccttatggcaaataaatctgcttttgtgctgagaacttggtcttggggtgtcttgagctgactccagttgagtgtccctacaatttgcctttctgagcctagattacttcacttagcatgatgatctctagctctgttcagtgtcctgccaagacataatttcattcttctgaatagctaaaaaacgcccaccattgtgtacacataccacatgtaaagtggctattaaaacatcacaggacactttctccaaaatcgtccacagacttggacacaaaacaagtctcagctgatacaagaaaggtataataataacatgcatcctatgcgaccaccatggacgaaagctggatatcaacaacaacagagatagcagaaagcttatgaacttagtgaaactgaacaactattcagtagtgaatgaaaattgggtcaagacagaaattagggaagaaatcaagaacttttcagaattaatgaaaatgaaaagactcagacccaaacttttgggacacaatgaagggagttctaagagtcaagttcatagcactacattaaaaaataattgggcaattctccaactaatagcttaatgtcaaacttggaaactattgaagaaaaggaagagatcacaccattttggaagtagatgtcaagaaacaaactcatggtggaaataagtaaaatggagacaaataaacaaacaaaaaacaaaaccaaaaaatctcaaaaaccaaaaccacccaaaacatacaaacaaacaaaaatgaatgagaaaaggagtggttctttaaggaaatccacaagattgacaaactcttaaccaaattaaacatggagagagaagatccaatttaacagaattggaagaaaagagggatctaagggccaccaaggaaacccagagaatcataaggatgtattttgagaacttgaacaccaccaatttggaaaatctaaaaaaaaaaaaaaaaaaaatggataattttcttgtcatgtactatttacctaagtcaaatcaagatcatataagcaatttcaacagaaatatcccctgggacatataaacattaactaaaatctctcagtcaaaggagcccagggccagattgttttaatggagaattttactataattttgaaatagaattaatgccaatactcttcaatttccatgccacaacatcaacctaaataggaagagtctcaaaactatcatgtggagtgttgctactctgctttggctctctgtgggccatgtgcttctagccatctgcccaggaactctttggatctgtgaatgaaaaaacacacaaattagtttattttctaaatgcctaggccactcaagggctgggcagttctaatcttcccatggctagcatacttttccctctggtacttctggttcaacaccttctaaatctacctttaactttcctgccctgttaccttctgtgaggtccattggtcttcactgcacaagattcttgtggacagcccttctgggggtccactttccctttcctcctacattttggatgattttccccctacagctctaaattttatctgtctctctctcttggtgattctctgtctcattttccccagtttctagcctgtgcaaatctaaaggttccaccccatctccctttgctcagccactggccactgatgtctttattgatcaatcaaaaaccaactgggaacaaggacctttagcattcggacacacagattcacaaaacatttcatgaaagaacatgacaaggttgtccattctctctgtacataatcaatatagaacttgaagtcttagctagagcaataagataactgagggagactaagtggatacaaatagaaaagaaataatccaaactgtctttatttgcaaatgttatcatagtattcataaatgaccttaaaaaaatcacaccaggaaattcttatagctgacaaacagttgagctgttgtaaatttgtgcacttggtgtaagaaaaaaaatcaatttcatcttttctcacattggttcctaaatattcaaaaacaagatatgggaaatttctacggttcaccttctgccttggagagcttccatgtatttattttaaatatgtaaccagtgattttcaatacaaatcaattaaatgtggagagtaaaatgtggctttgggaatagttgtccccaggtatttgtagggatatggtcctaagattactctctgtggtcatccttctgtcccccacagatataaagcacaggaccaaaagtaccttagattacaacatttgtatacttatatgtatctccctataggaagctgagttattaaatgacttgtcatgctagatacaatgcacaaacaacatgaatcattatgctttactggttggggaattataacaagaactaaatatctgtatgtgctcaatgcagacacaaattaaaaatacctttcatctcaagttgattgattctatgatgtggaactatgtatatggggtaacagattgcactgggattagaggcatagataggtttctctgggaaatggatagatggtcttcctcatcagaaaacagggctcataatgtacagggtgacttctaggctttctgttctatccacttctgaccatccctacacataaactgtcctgactcatttctgcagaattagcctagaaggttttgcctcagtgtgtcctcttacctaatttgtcttcttgttagttttggaagtacttggtcttttctaagttatacaactattagctgcacttgccctgtttcctaggaaagatgtctcttctgtagctatgaagagacaccaggaccaaggcaattcataaaaggaagcatttatttggagggtgagtccatgactcgtaaccatcatggaggggagcatggcaggagcagtagcagtagctgagagattacatgttgagacaataatcatgggagagagggggggtttgcagtggcctggacttttggaatcccaaagtctccctactgacacagctcaccaacaggactgtacttaatcattccccagctatttcaccaactatggagcaaacgttcaattatatgagccttaggggctatcctcaaacaaaccaccacatagaggacagcataaaggagctgatatggacgtaacttaggttgtctagttccagatatcaaatagtgtttttgaactactggatca

SEQ ID NO: 378 - DNA, 3327 bp, Mus musculus
actaaaccttcagtgggaaaacagtaaataaaaagtttctactgtaacttgctgtatactgttgggtggtaaagtaaatacacactcaaattttgacaagattcataagtctttgctttcccttaacacatttaatttctgattatcagcaataatcaattataataaaattttgatgtttttggtagcccccaggtacaggttgagaattccagccttagcaacttaacaagtcacactcctctcaatctacctatatgtatttaaatattttaaaagatgtattacatttatatttacatgttttgcctgcatgtatgactgtgcattacctaggtgtagtgcccccagaggccagaataaggagccagatcctctgacctggtgctgcaaactgaaagaggaacctacaatagcagcaagtgctcttaactactgagccacctctccagctccttttgcatctttccaaggagtaacttacagaaaagcataataaaatcataagcagtaatacatggatgtagactaccacactaactttttaaatttgcttttcaaaagtaaaaatacaattttgtattatgtagccctggctgacttggaactcaaaatgtagaccacgctggcctcaaactctgagatccacctgtcagtgcctcctgagtactagtattaaaggtacacagcactacacccagagaatatacatttataaatgcctattgtactcatttcctgctcctgtctgctggaaatacctttaaggactgcctgccatcattttgttattgggatacaacggtgattttcagtttacgactattatatcagctagagataactattaagcaagtactttgggcgacaggtcctaaagtaaaattaaggggcacaggggagggaatcccttttattgcatttccttgagcagccttcggaattgaactttgtctacctgtgtagctcttgtgtgtttatgtcgaagccctttctccagcttcctaggcacttctggggtatttccacttcgttttagttttattacaaatattctccctgatgacagcatttctagttccgcacccagaaggccaaaatcctggaaagccaggttcccaagttccctccgcttgggttttactcgaaggcggttgtttccggtactgagcaggcatgcgcacgcgcaccacgcctatccaagcagcgccacagaaaggctcttcccagggaccgaagaagacgagagggcctgttgtgacggagaactacatttcccaaagttcaatgcgagaaattgccggcggcgattgggggcatcgggttgcggagtcttctgcccgctttggactacacttcccgacacgactcgcgaggcgttgccagctgcgggccgagggcgagttgacgcgggagctcaggacgtgaggcatgagcggcgccctccctcggcccgtgcgtgtcctgctccctacccgcgcgagggtcgcgcggcaccgggcctagcggcgggcatcggcgttctcaggggcaggtgcagccgcacgggcgccagggagggcagctgccaccatggaggtgagcgggccggaagacgaccccttcctgtcgcagttgcaccaggtgcagtgcccagtgtgccagcagatgatgcccgccgcgcacatcaattcgcacctggaccgctgcctgctgctgcaccctgcggggcacgcggagccagcggccggctctcaccgcgctggggagcgggccaaggggccctcgccacccggcgccaagaggcgtcgactgtcggagagctcggcgctgaagcagcccgccaccccgacggcggccgaaagcagcgaaggcgagggcgaggagggcgatgacggcggcgagaccgagagccgtgagagctacgacgcaccgcccacgcccagcggtgcgcgccttatcccggacttcccggtggcccgctccagcagccccgccagaaaggtcagcgcgggccgcgcgcatccccgggcgctggcggcggaggagatccgacagatgctggagggcaagccgctggctgacaagatgcgtccagacacgctgcaggactacatcgggcagagtagggccgtagggcaggagactctgctccgctcgctactggaggccaatgagatcccttcgctcatcttgtggggcccgccaggttgcggtaagaccaccttggctcacatcatagccaacaacagcaagaagcacagcataaggtttgtgacattatctgcaacaaatgccaagacaaatgatgtgcgagatgtcataaagcaggctcagaatgagaagagctttttcaaaaggaaaaccatcctttttattgatgagattcatcgcttcaataaatctcagcaggacactttccttcctcacgtggagtgcgggacaatcacgctgattggtgcgaccactgagaacccttccttccaagtcaacgccgcccttctgagccgctgtcgggtaattgttcttgagaagcttccagtagaggcaatggtgacgattttaatgagagcaatcaactcactgggaatccatgtcctagactccagccgtcctactgaccctctgagccacagcagcaactgcagctctgagccctctgtcttcatagaagataaagcagtggacactctggcttacctcagtgatggtgatgcccggacgggcttgaatggactgcaactggcagtgctggccaggttaagctctaggaaggtgttctgtaagaagagcggtcaaacctattctcctagtcgagttctgatcactgagaatgatgtgaaagaaggcctacagcggtcccacattttatatgaccgtgcaggagaagagcactacaactgcatctctgccctacacaaggctatgcgtggctctgaccagaatgcttccctgtattggctggcccggatgcttgagggaggagaggacccactctatgtggccaggaggctggtaaggtttgccagcgaggacatcggcctggcagatccatcagcattagcacaagcagttgctgcctaccaaggctgtcactttataggcatgcccgagtgtgaggtgcttctggcccagtgtgtggtctattttgccagagccccaaagtccattgaggtgtacagtgcctataacaatgtaaaagcctgtctgcggagtcaccaggggcccctgcctcctgtacccctgcacctgaggaacgcgcccaccaggctgatgaaggatttgggctatggcaaagggtacaagtacaaccccatgtacattttttttaaaaaaaaaaaaaaaagt

SEQ ID NO: 379 - protein, 601 aa, Mus musculus
RRASAFSGAGAAARAPGRAAATMEVSGPEDDPFLSQLHQVQCPVCQQMMPAAHINSHLDRCLLLHPAGHAEPAAGSHRAGERAKGPSPPGAKRRRLSESSALKQPATPTAAESSEGEGEEGDDGGETESRESYDAPPTPSGARLIPDFPVARSSSPARKVSAGRAHPRAAEEIRQMLEGKPLADKMRPDTLQDYIGQSRAVGQETLLRSLLEANEIPSLILWGPPGCGKTTLAHIIANNSKKHSIRFVTLSATNAKTNDVRDVIKQAQNEKSFFKRKTILFIDEIHRFNKSQQDTFLPHVECGTITLIGATTENPSFQVNAALLSRCRVIVLEKLPVEAMVTILMRAINSLGIHVLDSSRPTDPLSHSSNCSSEPSVFIEDKAVDTLAYLSDGDARTQGLQLAVLARLSSRKVFCKKSGQTYSPSRVLITENDVKEGLQRSHILYDRAGEEHYNCISALHKAMRGSDQNASLYWLARMLEGGEDPLYVARRLVRFASEDIGLADPSAQAVAAYQGCHFIGMPECEVLLAQCVVYFARAPKSIEVYSAYNNVKACLRSHQGPLPPVPLHLRNAPTRLMKDLGYGKGYKYNPMYIFFKKKKKS
